United States Patent Application Publication US 2014/0057251 A1 - sequence listing, part 51

SEQ ID NO: 65607 - DNA, 1110 bp, Cannabis sativa
tactcttccacaagagtcttatccgatgagatatttatgatgagttcatgtgctctttgctctatttgactactctccaacctatttatatatttgcatgactttgtgtttttctttccttggtcactttttatccaagtacttgatacactctatttgtctaagttattcttagttaaatagctaattgtaagagtttaatcactaagctctcttgagtaataggttctacttagttatttttatttggatttaaactcaatttctagattaagtgcttatcatgtgagtataattaaatccactctttatccattataacttttagtttaagtgttagtgaatttgaaaaaattaaaaaacccactacttttctaaacatcttttcttaatgaaaattgtagcattcaaaatgagtatagttatatctatacccttatgctccctaattaactaaagtttgattattattcttagttacttgtttttttgagttttgcaataaaaatacatctattttttaataaataaatatttttattcaaactttaaaaacaacaaaaaaatactaatagtcacaaagaacataattgtctatggaggatatttgagataataataaaataatgaaagtaacaaacatgacttggctaactatcaaactaaaagggatgttgatatattcatgccatgcacataggacttttgactaagtgttcattgttctaggaacgtgccacatgttctccattgaggcgaaaaagcgtgtacactctagacctaatcactgcttcaatttgatacattctttccagttaggaccaaggaccccaggtgttgggtcacgtgctgccaagaacacccttttcaacacaaaatcacccattataaattttctattgcggacacgtgagtcataatacttctttactcgttgttggtaagaggcattgcgtaactgagactcctctcttctctcatcaagtaaatctaatgtttcttctaggtgcaagtggttacgatgttgctcatagtactagtttcgctgtgaggttacttgaattctaattgggaacatgccttcagtttcatatgtgagtgagaagggga

SEQ ID NO: 65608 - DNA, 1397 bp, Cannabis sativa
gatatagtgatgagtacaggtacgacctattatttgttttatgtttaatataattatcatactctcttcacttctgcttattgtatttcattccaatttacatattatcttcttgttgattgcagtttcgttctcaagaaaacaacaaggttctatcaaaggcgtgcaaggttttatttcttagttttcaaatttcactatcattgtcttagctgcatatgttattgtcttagtctgtttggatgtgctaacaagcagaaaattcctccaatttttttttttccctttaccttgctaatctactgggctttactggaagagtacattaaaataatgctatgtttctttcaaagcatatgtgcatgtaatacaaatgcaaatatatgttattgtatattctatctatgtgcatttgtgtgtgtgcacatattttaatgatgattgataggtataataaccataaacttcactacaaccatgaaccatgataacatttttgcaagtaaatattagggtcagctcaagaaagtagtattagtggttacgcatagcattgtgtaatattatcatttagatatgtgttcgctttgagatccttctttcctttgttcttgtcattattgtgaagtgctaactagtggaaattgaatctgcagcaaaatacagtctcttgttgtttcctttttaacctcagtatatgttactaaatggaaggaattcttccatgataaggagttaagatatccgccatcttttcgtgcacgagtaatatgttgtgcgtcaatagaagtccttcaagcatatctttcttggagacaaaatgattgtgagtaggttgaattcctagtacttttaagataagcaataaagtgaaactctaattactgagataggttgaattcttatttttattattttagtttttcactcagaatttgtaaactattagattttaagtgagaaagcctatggatgtgacgttaccgttcacgaattctctttcacaggtcatataaacaaccaacatgccacgtgttttcatgagctggttaaacatggaaagactgaaaaggaagcacagcagtatttgaaggtgtgagcattaattacatggttacgagctaacttttgacttgttgaagggtttaaaatagtgacgatgtcatcctagagtaaaagaatttgtgtttcgggaatctttatattttgtgacaatgtcaatatctctactttaattacttgaggatatttaggaaaaccttattgttaattttcttttcttccaaatttctaattaacttaactattattaattatgtaaattggcaatactaatggttttatgaaatactaattcttattttaccttatgcgaagttaattgtgaatatgtgcag

SEQ ID NO: 65609 - DNA, 631 bp, Cannabis sativa
gaaactagaaaaagggaaactaagaaaagagtaatgttaattacaattaatggtaataaataaaagatttggacatccacataattaataatatttataacagaaataatataatttttattttatattatgaagaataattattcaatgattcagtaatttttgtgttattgtaattgataaatacatatatttattaaaattttattgtattttttggacttactctatatgtgcttaggtgctttttaggcttgttggtcatgctttaatctatatttttgtgttaagttatgctaatttgtatgtgtgatgtctgtccaaatttatatttgttcgtgtctaacttaatttgtatcaatttcataccgtgtcaaaaatgcttatgaaaactgagctaagccactaatgttagcttagtggtgaaggaggatggagaaaaaggagaggtcataggttcgaactcaagatctttaagctattaagttattaattgattgtaaaatacaattacgctataaaagttggtaagaaaaaagcaaatgtgaacttttttaaaaacggtgaacattttcaatcaccaaagcaatcttgtgataaggtggggtggcttgctaggatggataggttt

SEQ ID NO: 65610 - DNA, 1089 bp, Cannabis sativa
agcagatacaaaataggaaatacatgacctataccgtaggtatcttaggagttaggtggatataatcttttatctactcttggctgatgtgatttctcataatgtattcgtcactagacttatcgattgtagtgtaatcgtcgtaaaaggggggttaagtcatctgtcatgtcgtttatggaggcttcaatacgtcttcacccatgcggcattaaatgtgaagtgattgtacgagtaatctctttacctcccagaactgccttagcatgactctagcctcccggagcataaagatgggccttatgctcttttccgggaggcaccttctctgaggtgtccttttttctgtcgaagacttagttagttttcatgagtgatggttcttccagatccacgtgtcacatttatctgcgtccacgtaatttgggaaaaaataagggcaacctctatcccccaagcctcatttagcaaagggtaagtgaggcttgcttaatgcctccggttagcttgttggtctaacggcacgtgccttaagcgcgtgggttgcatttatgatggccatcattaatatttatttccttttgcaggcaacgattcgcttcccgtccattgagaaaccagcacatttaatccgagtgtcagaaaagtactcaaatgttttcaaccgctctggcacccatgtatctcagccgttagatttctagaatacgaatcgattacgattcccaccgtacgatggtgtctgatcacagctgccttgcaccccttctggtctataaaagccaatatttttccttcattgggttactttcactatttcgctatttcgtcccaagaaactccattgagaaaatttcagaaaccatagatttcttactgttgtttctttgtcgttgccaatctgcattctaccgtcgatcattatcaacttccagttcacgacctttacgtaagttttttggatacattttacttttgatgttcacttgcatgttagggtagagtttttggtaaagtatttgatttctgtggaatgattttggcgaagaccgtcgcatggcgtagttttcatttgtgttctgctgcttt

SEQ ID NO: 65611 - DNA, 1290 bp, Cannabis sativa
atgcggccagtgggactaaggcatttatagcctttgtatgagtcactataaccaagattgacgcatttgatagagtggaactagaatttgtgggattggtaaggacgaaggcatggaaaacacgctgcaccaaacattttcaaaaaagcataatctggttttcgagcaaacagtatttcatagggtgatttctggtgcagcaagggtgtgggaagcctattgattaaatagagtactgaggtgtgaaaagcatcacacaccaatatttgaggggcatacttgcttgtgcgagcaaggtaagtcccatctcgataatgtgacggtgcttgcgttcagcacgtccattttgggcagaggtgtgtggacaggggtgctggaactcaatgccgtgagtttgcaccagatcaataaaaggcttgtattcaccctcagagtctgatctaaggctctttattttcttgtcaaattggttctcaactagagccttaaattgtatgaatgcagcaagggcatcgaactttaatttgagaggatatagccaggtataacggctataatcatccacaaagtggatgtaatagtggtgatttatgttagaagcaacgggtgcagggccccataggtcagtatggataagatccaacacggatttagcacgagaattagatgaacgaaaaggaagagcatgtgctttaccatattgtcaagcatcacaaaaggttttcatttcatttttgacacacttacattaacagactctagaacatggtttaaaaccttgattgaggggtgacctaatctcctatgccacacatctacttgggaaattaaaagactagcagcttgaggctgagttacatttgagtcgactgaaatggtaaaggctgaaataaggttggacttttggtgtgaatgatttggtgtggtgtgaggtgagtccaactgatacaatccatccttaagcactctgtgaagcagcaccctctttgttaccttgtccttcaccaaacaaaaagttgagtaaaattcaatcagcacatttttatcaatggcaagtttagatacactaacaagatttttggcaattttaggaacaagtagcatgtctttgagcagtaaatagttgccagatttagtgttcaatttaccattaccaatgtgtgagatttgtagcttactgccattgccaacaacaacagactccttaccattgtaatcttgtttctgagtgaggtttgaagggtcagatgttatgtggttgctcgctccgctatcggcaaaccaagcatc

SEQ ID NO: 65612 - DNA, 810 bp, Cannabis sativa
cataaaattagtatacgtgcctcgtacgtaattttttactagtatatatatatgtacgtatatataaattgaaaacaaatatatacataatcatggcagagataaatcttactctgacactaactattacatatttatatgaataatatgaactatatgaacgattatatgaaatgcagaataaattgaatatatacataatataactaaaaaatcaaaatacctttcaaccattaatcttttttgcttcaatcccacacgagctttggatctaaaaaaaaaaaaactagttagtgtggataatcgggcttctaagctctctttagtctcttatatggaatttactgtttgcacaaaatgagtgagaaactcaaaaaccgataccttatattgataggtgagatactccaacaacatctatgtcacattaagtatcagaatattttgataattaattcaaaaaatcaaatcaagttaaatgaatgattcggtaaatcaaaaactgaccatcaatatgatattgtgatcaaatacaatcaatattgatttgtgatcaaatattcatacttatcacatattgatttattattttgacaatcaatattcgtatatacttatcacatattgatttgtgatcaaatacaatcaacgagataacgtaaataatcaatttaaatgattttgtacaaatatagaaatattataatagagctaacatgacttcacaatatcatattatgtctgacctaaatttataacttctatgtcatgatattgtgctccttgtttctaagcttttttttttttttt

SEQ ID NO: 65613 - DNA, 1289 bp, Cannabis sativa
  modified_base (53)..(53): a, c, t, g, unknown or other
gtaggattctccctgggagtttgttcggtcttgccagtgaactttcccttttncccattcccttgcctattattgttgttggaccgtttaccgccaaagcttgaattgctcgggtaatgggggagctggacggatgtctcaacaatggaagcttttggccaaccaggtttttgctcaagttctgcccgctgaatggcttcttcaagcttaataaaaccttctgcgcggttaaggaagtcactcattgaatctatcggtccgttcttcatgatgtccttccaaagttcacaaagaacctcaatgccccccagtatcgcggataactttccatcttcggtcactcgtgcaaccttagttgcctccgtcaagaatctactgatgtaggctcggagaggttctcctggtctttgcttcacttcgacctaatctcctaggttcaacggaagttggcgagaagaggagaattgtgcaaagggactagttggtttggcccattagctggccgccaccggtaacttgagtggaagtattaggtataatctctcttgatgaattgcttgacaaggtctgcccgcctaccgcttcgcccacaggtggaacctgtgaccggggatcggacggctgaccatttatagtctgagaggtgtttaccgctggatctttgtctgtctcgcccagggggatgacggttgcaggctgttgtccggtagcatgataggcttttcgtatcaacacggtggcttgccgggtccggtcgtcaatgaatgcttgctaagcccttaacgtttccatctccttgtctctccattcagcgaacatgcgcctttgctcttcgaatgcgagatttattgcagcacggagttcctactgatcatgatgcagggtgttggtatgaccttgcatgactctgagagcagcatggaggttttggatttctgtatcatctccgatagtcattcgaacattaattacgagcggaacgacagtgctaggaatgccctagttggctgctgaactgtattcccaatctcttgcacaccaggcgcgattccactcatacgattcgtcacaccgtgacctacaatcaagggttgttcgagatttgtggttggcagaaccctcgtgttccccgtgttctgtagtgcaggatccaccgcctgtggatgtgctagatcaaccacgcatctacgagtctataccaccattgtatttgtgattagatttgagataaagagcgatccttgattctactctcaatgaaagcgtcaaaatgttgacctcgtttttag

SEQ ID NO: 65614 - DNA, 2047 bp, Cannabis sativa
ggggtaggggaacaagagtgtaagtcttgtttctaataagagcaaggatttcatcatccatagcatgtttctactgaggcaattgaagagcttgagcaactgtagtgggaattgaagacacgctaaacactttaggtttatgaatacaagctttggctctagttgtcattttgtgatgattttgaactttttgcacttgttgaacatcagtttcttattattgatgatcagtagtaggtagaggatcaagtgttgatttagttgttgagtcatgagtaacaaaaatgtatgttccagaggcatggataggaattacatgctcaaaaccagggggtatggaaggtgttacagatttactcctttgagtaggagtggcagaaggtgagctgaaagtggtgataggagatgtatttggattatgaggaggggtgcttggtggagaggcagagttggtggtattggacaagtcatggacactagtagcagttgtgttgatagatggaatttgagcatgtatatgccattcctgaggagtgatatattctggttcactatgtgctttgttgtatgggaattgatgttcatcaaagatgacatctctggacatgtacattttgccattagatgcaagacatttgtatcccttgtgatttagactataaaggaaggtgcaaggttcagacttgaattgcatcttatgtttgttatagggtctaatgttaggaaatcacttgcttccaaaagtttgaaaccagaaataatctggttgtttgtgaaacagaacctctaagggggttttgtgattcaatacaggagtagacaacctattatgtataaagatagttgtcctaaaagcctcgccccaaaaatttagtggcatagaagactgagctaacaaagtaaggctattctcaactatgtgcctgtgcttcctttctcctagaccattttgttcgtgagtggttgggcaagggtgcctatgtaataccccaaactattgaagaaacttaggaaagcttctaaattccccaccccaatcagtttgtaccattttgatttgagttcccaattgtagtttagctttagctttgaacatttgaaacacttttagagtttgacatttgtctttaagcatgtatatccatatgaacctagagtatacatccatgaaatggatgtaatacttgtagccactgtgagaaataatgtgagatggaccccataagtttgagacaacaagctgtaaaagggttgtgtactcaatagtagacacctttgcaaaaggtagtttatgaattttacccgaacaacaagctagacaaacaacttgagaagatttattatcaatagaaatgttacaagttttgagtacacaatgaacaatacttctggagggatgccccaataatctgttgtgccaaacatcaaattcagagaacttgcaattattattacaacgagcacaagaagaagttgaagttgagacagtgtttgtagacagcttagtgttttcaggaaaaacatgtcctacactgtctcggctgactgttttgggaagaatgtctagaccttcaaaagtatagaggttattcttgcgtctcctttgtagtataacctacctggtgtcctgatccttaacacaacatgtgtcaaggtgaaactcaaagaacactttgttatctttagcaaacttggacacacttagcatgtttttggttatagcaggcacacgtaacaagttattgagaactaaagtttgtttagacaaatcggaagatagaaaagtttgacctatgtgcttaatggacaaacctagtccatcactaacaaacagttgctcctgtccaagatagtctgagctttgagcaaggttggtagggtctggggtgcaatgattggttgcccctgagtcaggataccagttcatgtcccactcagtggagttagtgacaacatttgtctgaggtgctgcagcattggtgtttccagatggaggagggcctaaattttttttgtcaaatctatagaaacgactttagaccgtatg

SEQ ID NO: 65615 - DNA, 1806 bp, Cannabis sativa
ttttattttataggcctgtaaaataatctctttaacactactttttatattataaattattccaaaatttttaaaactgattagaaaccttttagattgacctttcttttaagggtggattgtcgaagcagccaaagctataaaatcattcaaaacccaatcaatttctttgtattctcacattacaaatctgctaaagaatgaatatttttccccaccaaaggttaaaaaatggggaaaagaacataactttacaaacagaacataccagtcaaacccaaatcactatgaatcttccacacaagaaaagaataaaaattgggcaaataacaaaactgtaagtgcagaataacatcactcaaaactcaaacagtttccccataaattgagttcttacattgcaagtccactaaagacagttgcccagaatgttgctttgtgggaaataatgaaaaagaatgtacgtacctgaagcagtagccataattgaacaaataatatacgattcagattagttgcagatgattgttggagacgatgatgataactgggagtggagaagtgttttctcttgcgccaaagtttgaatctttgtgtttgggcaaacgtaataatcgaatctttgggatgtttttatgttgcagagatgttggaagtgaagtatagttgagtctcgcgccttctagattttgtctgcatgtaaacgacacgtcgtttcttattgtgttgatgtgtacgaacgtgatgtcgtttttactttttttttacctaaattccatgtcgtttgaaaaataatctctcaaaatgtaaccacctccaattaggatagttcattgtgaagaatttactttttttttttttaagaaaatgagctatgtataggataaaattgttctaaaaaatttagacaataaaattataacatactcaaacaatacactaaaagagttagagtttcaacttataatactgaaatatttcaaaataaattatattaatttaacaatctacaaataaaataataatgtatcaatgaaatactaaattctcaaattctacctcatattcaatcaagtaaaacataattaataaaaaaacttaaaaataagtaaccaaaagaggtatttataacctaacaaaattcaataccacttgattagttattttctgaaatttactaatatatttgaatatgaaaaataccaaattaacatgaaagccaatctatttcaaatcaaatataaaagctttatcaacttttattttgatttttaacatatatttttgaaaataaaaaatctcctacaatgacatggaacatgcaccaaaaggagaataaatagagtgagtcagctctttaagtcgtaatattatccaaaactttaataggcttaattttaaattttacgtatacttttaaaaaataataaactaaaatcattcctttatgcacaagagttattttcatgattttattttttcaattataaactcaaaaattaaacaaacttgaaggcaaattccacgccatcttagcaccaattaaagtgcacaaaaattaatttattatttaatttcaaatagttaataacaaaatttatcataaaaatgccaccactaagattcgacctaacaatttatctcaaaaaaaaccaaattttatttattttaatgacattatttttgaaccactagtttgtttgttggtatgatgaaggccaactcttgtgttgggccaatagttgacaaaagatcttaactcatattaaaaacacaactttttatatatttatttaaaaaaaaaaa

SEQ ID NO: 65616 - DNA, 1712 bp, Cannabis sativa
  modified_base (341)..(341): a, c, t, g, unknown or other
  modified_base (1554)..(1554): a, c, t, g, unknown or other
atcagcttgtagatgcaacaacagggcatgaaatattaagcttcatggatgtttactcaggctacaatcaaatcaaaatgcatccaccagacaaagaacacaagtttctcaacagatatgggtctatattgctacaaaataatgttgtttggtctaaaaaacgttagagctacgtaccgtagattggtaaacaaaatgtttaaagactagatcgggcaaaatatggaagtgtacatggatgatatgctcgtcaaatccagaaaggctggggggcacgtagacgacctagacgaatgctttaaagtcctcaaaaagtacaatatgaaactaaatcccttaangtgttcctttggagtcagctcaggaaagtttataggcttcatcgttaatgcccgaggaattgaagctaatccagagaagattaaagccctcctagatatgaactcgccaacaaaaaccaaagaagtgcaaagcttaactggccggatcgacacgcttagcaaatttgtttcaaaatcaacagataaatgtatcccattcttcaacatcctgcgaggaaacaagcagttccagtggacagaggagtgtgaaaaacctttccaagagctaaaagcacaacttgcaaaacctcgcgtactctcaaaacctctaaacagagaggaacggggaatatacttagctgtcacagaacatgccatgagtgccgtactaatcaaaaaagagaacaacgtaaaacacccagtctattacatcagtaaaagactcattgaggctgagagccgatacgcattaatagagaaactcgcctactgccttattctagcaaaaaggaagttgaggccctatttccaagctcatcctgttcgggtatacatcgactagccactacgccaaatactgcaaaaactagatgcttctggatggcttctcaagtgggctgtagagttgggcagtatgaaatcactttccaacaccgaacagcaataaaaggccaagccttggcaaactttgtggtagaatgcacaggcaagaaagaaagcataccaaaagcaaccccgagctggtacaaacacctcagccaagtaacaatgaagacaagccaacctagaaactacatgtagatgggtcggctacggatcaaatatctagtgcaggaattttccttgtcacgcctggggggcaacacctacacgctgtagtcaagttcagatgcaaagcatctaacaacgaagccgagtacgaagctctaattgttgggctaagactagcccaggagatgaaggccaaacacattgaaatctgcagtgatccacaactggtggtaaatcatgtatccgaagaatacgaggctcagggagaaaagatgattgcatatttgagaaaaataaatgattttctcgcacaattcaaaagctacggtcttagacaaattccaagagaagaaaatacaactgcagacgcattagctcgattgggaagcaacaatgtaagtgacaaggcaaacttgattcctatccagttcctcgaagagcctaccatcactggcacggaagnaatcgaaatgattgatacatccccaaactggatgacaccaatagcgacctacctcgactttgggaaactgctagataattgaaatgaagctcggaaaatgagaaggaaagctgcacggtatatcatggtagaaggaattatgtatagaagaggattct

SEQ ID NO: 65617 - DNA, 773 bp, Cannabis sativa
gttattttttttcaatgattgttattttttattgttaataagtttaattaatagtgtcatagtgtaaattgtgatagtattttagtgtaaaaattgtaaaactttttaatattattacatatatatatatatattgtatggatatgagacgaacaatttcaaatagatattttaatgatttttttgaaaggaaaaatatatttattatattataaatagatattttgattttttaaaatttttaatttttagaaaaatatggtacaactaattaataataattaatagattaaggtatataggttcgttttctatttctacttcataataattaataatttttttaaaaaataccaatgcaattaaaacatgagaaatgaaaatgatataatagtatcacataagaataagaatgtaaaaaaaagtttttgagatatgtataattataaaatcacaaaagttaataataaaaaaaactattagcatatatatcttttatatttgaagaatagatgaacgattagtgagttagggattttaaaaatatatgatatttatagataaacgattatttgttcaacttagtttcatccaacaaatataagatttgggtactaacgtcacattttctttgttattttgattttattttttttatcactttctctttcttataattagcatgtgatatatttatatataaagaattggttctccaataaaattaaattataatacattaatgtgattgaattggttatcattcaatcaaa

SEQ ID NO: 65618 - DNA, 938 bp, Cannabis sativa
  modified_base (371)..(372): a, c, t, g, unknown or other
ataaagtaaaaatatgtaaagtggcctttagttacaaaataaaaatacaataaaaatgagaatagaaatggtaataggaatgttaaacttttcaaaactattatatatggtacaaatagaaaaataatatatatttaattatgtatcactctcaaattatactttttagatctaattatcaaataataaaatataaataaatatttaatttaatattctattttatattaaatattaaagtaacaacataaatgttattcatataatttaatcatcacatattgtctatccatataattataataataatattgctttcctataattctatacaaaaaatatatagtaaacatattattgtaatattaaannttgtagatatatgttttaaaataaaaaatattacccatataattataattttaatcatttattattgagaatggtagataaggaaaagtaatttttggttggtatggaatggcttttcaagtcattttatttaagaaaagtaatttcctagtttacatgaattacaattctaatatattggtatgagttttccaatgataataaacaatagaaaataaaattatgaggaccatcgggcctactatcggcccatatatcggacttatcaagctatcttcttcaaccttaaccccccaacattaacctataccatcggaccctatatctcgcctacatcgggctagcctaatcctaaatctaattgctttaatcctaaatcatgaaaaaataaaacgaagttaaaaattcatgaaaaaaataagggattacctatgacgaagatattgtcggcgttgggtggtgtggttgcggtggtctgtgggtcgtgtggtcgcaaggtcgagctggtctgattgtgtgctcctctgtgtgtgtgtttagagtttagaaagagagagagagagaga

SEQ ID NO: 65619 - DNA, 711 bp, Cannabis sativa
aatgtttaaataatttgcttctaattctaaaaaaataaaaaaaattaataattttgaaatgagaacatttactaagatagtcttatgatttaaggttatttgttatatttttttttgaaatgaaagcataaactaacataatcctatgattttaagccatttattataatttctcaatacaaatctcaccaagtgtcaaagaagactcttttctttacaatattgatttggcccacacaagagaaaaacagcccaacaagaaatcaatttctctctccaatcaagagtacaaagactccaccttcacaatagtggttcggtcaaagacaaaagtcaatcaatgaggctcatcatcttcagattcggcccaacaagaaagaaaaatagcccaactaaatgcaaccctgagagtgaaaggcctccgctccgatctccgatgtccgatcagcgatcagattattattaaagatatattaagattattaagcttaagcttttattttttatcaaacatttaaaaaaaaaagtaaggctttaatttggatttatacgtgtgtacattatcacaattcatagaatgttagtaattgagaggtctaaaacataagattagatatttaatctgtaaaaaaaatatgatatttaagtatagaatatttatgaagctcttgattataaaaagaattgtgtgttttattataagtttttctc

SEQ ID NO: 65620 - DNA, 790 bp, Cannabis sativa
ttctcattgaaagacctcgactcactgcattacttcttgggcattgaagtgcatcgtgatgaaactagaatgtacctatcacaatcaaaatatgttaatgatcttttcaaacgaagcatcatgacacacttaaagccttgcccaactccaatgtctgttggaaagacattatccttaaaaaatggtgagccattcgacaatccaacagagtacagaattgtagtgggagcactacagtatttgacacacacgcgacctgatattagtttcactattaacaaattgagccaatttctcaaggcaccaaccactactcactaaagtgctatcaagagagttcttcgataccttaagggaacatctcatcatggtcttcatgtgaaaccttgtgaaagactcaccttaactggcaattcagatgtagattgggcgtgttgtcccgatgatagaagatccattgaaagctactgtgtgtactttggagacaccttggtctcatggtcctcaaagatgcaagtcgttatttctcgctccagcaccgagtccgaatatagggcccttgcccatatctctgtcgaactatcatggacttacaagagttgaaatttcctttgcctaagatacctataacttggtgtgataatatgggagctagtgcccttgcttcgaatccagtctaccatgccagaaccaagcatattgaactagatgttcactatgttcgaaaaaaggttctgaaaaaaacattggaaatccgatatgtgcaatcaagtgaccaaattgtcgactg

SEQ ID NO: 65621 - DNA, 1061 bp, Cannabis sativa
taggaatgtatcttaaaaaaaaatgttaatagaactgtggtctaaatgtacactactttttttgttttgttttgtttttataagaagctcaattttaatttttcgccccaaaatacttgggtcggtgctgtcgctaactaatcacaaaataacacgtcttgaatgtgctaaacactattggtgtccaataaggatgcttattttttaaagataaaccatttaatacaaaacaacaactaataaagattaaaaagtacctaagaattcagtcaattccattcatagatttcaaacaaactcaaactctatccattccattataaaaaaaaaaatatcataatgtggatgagagagagggaccacactactctctctctctttctttgttttcatcaagcaccaaaacgacatcgtcttgtaaattatataatcataccaaagtctcaaactttcatcttcgtcttacagttcaatctcaacaaatatgcttctctctcttgtacaaacctcttcatcatcatcatcttcatcgtcatggctttcattttcatcaaattattacttccacattccaacacattcttcttcttctacccttttgcccaaaacccttttccctgataccctgaaaacattgttactctattcaagtaaaaaatcatcacttgggtctgcacttaaatcaagaaagtcctcatctttgcaaaccgtatctactattcaggcttctttgcttgagtctccagttttatgggctggtcggatttgtatcttttatgcccttttgaaggctggtttagttggatctcaggctaatccacttgtttcaggttcacttctttaatgggtgtttttcttaaataagttttaatggatcttttatgtactcattgatttgtttttatctggttttagatttgcaaagaagtgatgaagatggtgatggtgttagtggtgaaactggtgatatgggtttctctaagtggatgaatagcataaaagggaagccaggtttgtgtttttttcaaatctattttggttggaaatgatgttcttctaaa

SEQ ID NO: 65622 - DNA, 1721 bp, Cannabis sativa
tattcgattaacaaatggtatattttctcttcaattattgcatacatgattttttttattttatcttgtaatgcatataaaagaaaaaaaaaattacaaatcaaaatctatattaatataggcagaggcaatgagggagctaagggtggcccccagtatttttttttatttttaaaaaattacatgtaaaatataattaaaaatatatatatatatttttttttgaaggaaaatatatttttttttatttatgtattgaaccctcataaattgttgggctgactagtgcttccaaattcgaattgtcaaaaagaaaatctatatatatatgtgtacattttcgatctcttactgtctaaattctagataagaattcaatgataatgacatgacatcttgtaataacaataactaataatattgataattacagctgttgttggagatggatttattgggcgagacattacattccgaaacacagccgggccatccaatcaccaagccgtggcattacgatcgggttcggatctatccgttttctataaatgtagctttgaaggttaccaagataccctttatgtccactccgatagacaattttacagagaatgtgacatttacggtactgttgacttcatatttggtaacgctgcagttgttttccaaaattgcaacatctacccacgtaacccacccaacaaaaccaacaccataaccgcccaaggccgaaccgacccgaaccaaaataccgggatttctatccacaattgtcgggttactgcggcttcggacttgaaatcggtccaaggctcggttaaaacttacttagggagaccctggaagcagtattcaaggactgttttcatgaaaactagcctcgatagtttgatcaaccccgcgggttggttggagtggagtggcaattttgccctcaacactttatattatggcgaatatgccaatactggacccggttcatctacatcgaatcgggttaagtggtctggttaccgtgtaattactagtgcatcagaggcttcaaaatttactgtgggtaattttattgtgggtggctcgtggttaccagctaccaatgtgccttttacctctggcctttaatttctatgcactccttttctataatttgtatcttgtatttacttttgttctaccacgtcataattaagattagtcttggttatttattgtattttattaattatttgtatttttcaaataataagtgatcaaagttcacttacgtcattaataatatataagaagggtattgtacgtaagtgccaattgtctgtgttattattatgattgtggactttttgtggatacaaagtctttgtcaacatatggttaatttgtatgcgtatatcttctttgtatttttccatggagaaattacattaataattatgtcaaagtaaatatattcatcagtaattaatttcgttgatgttcttattgttaatgtacatgtacggttcatggacttatatattacttatgtacattgcttgaaagcttagctaaactttaattatcaacatcatgattatcgaaatcgttaataaactataaaatattatttgacattttgatatatgtaggagtagaaataaaataatctagttatagggcgaaagagattaagtatctaaagagagtatgctgtcattaatttttgttatatattaatatttttt

SEQ ID NO: 65623 - DNA, 997 bp, Cannabis sativa
aagagcagaacccgattgcagactatcaatgatactcaagcaatctgcagcaacaatatggctttcgaaacacagcccatttatgagcaagacgaacccccaagtgtacagcagcagcctccgccaagtgaactgaagctatacctggtaaaaaaacagtttcagccacaattaagtcacgagccgaatctctaatcacaacacttaaaccacaccccaatttatcaacaattaaggaggcatctgtgttaatcattacacaatcaataggaggaggaccccatttctgatttgctttcacaactctgtcctgtcgagagtgcttactctcttcaaaataatcatctaacttctcaagagcccatcttacccaactatgaatctcttgagcttgatgtttaaagatgagtttgtttctatgctgccaaattagccaggaaagaccgatgaattgaagcatttcttccttaggaagtttgccccataagtaaaagagcaaatctggagctttcggcatgtgtataaaattctgagtatcaaaaccagcaagcttccatatcttaaggactttaggacaaaaccataaagcatgacaaatatcctcctctatctcgtgacaccaatcacaagtagtttccaaggacatacctctttttgacaattctattttcgtaggaatccattgattaaacacacgccaaatgaaatttttcatttttggaatgagcttagaactccatataaacttccaccaagctttcaatatggggctgtgttagagcatccagcaagatccgtatgtagaaatctagttttataaccacttacaaccgaatatttaccattattatttaagctccatgacaaccaatcgggtcttgaggtgatagagataatgccaagcacccatgggatatcatctttatgaaaccaactatgaacttcattagttttccattttccatcattattaatcaatttgtctagagtggtacct

SEQ ID NO: 65624 - DNA, 1683 bp, Cannabis sativa
ccccaatgagaatttagttttagctgtatttggggtcatatgttctgactataaacttttgacaggttgctactcgtttcttatcgtctagccctcccctttattggtttgctgcacacataatgaagtctcatggtgaccggagatggggatatctgatctgggcatactctgcatcttacattcttctcggaagtttgctcttttctaacttctacccttttacgtgaactctcacactactgttacctccttagagcttctcttttgaagggttagttagccttactgaagtaaagatctagcttcccttaattgattgcccatggagactcatttggttatgataaatactaaataccttagtgaagatctaacttgtctcgaagaaaaattcttataacaatgactaccaattcttatatatttcagtttcttttttttattacttgttagcaaagaatagagtcaactctggcttgtcttgagcaagttgtatttttgagcatatgattgattgatattttattatattttttgtgtagaagagaatttgttgaatataaacatgtattttttagcaaaaaaataaataaaattatgtagatgacatgtcttttttatctctctctctctctaggttttatacaaagcttaaacttgaagtttcagagtgaaataatagacgtaaactagatatattagacaaggattcaagctattctatattaaatgtagtatctacactacattaagtttgttgtagataaaaaaaaaacaaaagactctatgttctccattgaccaaataaatccagacctgacacccaaagatggaaaacaaataaaattgtaataattatgacaaccagacttctagtggccaacaacggcggagattgatgaaattataagatttctatggcttggtttggtcatttgaaagtcggagatatatatatatatatataaatatatatatatatacctgaatagggtgacaaatggcactgaacagggaagttctctctcgaaatacttgcatatttatttcttacattctcttttttgctgttttagggcgcttttttttggcctgtttcgtgctcaaggattttctttatgactatagttattttattccatgtactctgtgtgcgttttgttttcttattctttttcggtttagtttacagatgttatcattcttgccgccaccaacgattggtttagttcacagatgttaacattcttgtcgccaccaacaaatggaattttcttgttccggtgttgttttttattcagtgacaacaaggattcaaggaggagagagccgtaaggatctcgtggtttgtttctttgttcttccaatcgtcgctgatgactaattatttaaaggcaaataagagtgatggccgagattaattcttgatagtatttaatgttgaaaatttttagccttcagtttacagaatctagaagaaagagggtggaggagcttctttgttccgatgacaaagatggtagtgaaatatacgggatggtctttaacgttttttcggtaattttattaattacctttactatattaactaattatctttattataataagctatcaattaaacacacaatgttatgtataaattttatatccgtagttgaatatgttttaatttgctag

SEQ ID NO: 65625 - DNA, 824 bp, Cannabis sativa
agcagctcaaccacgaaaattcagcaacaactctaatcttttcatcctcaaatctcaagcaaacttacaaattaatatgtagagttgctaacacattaaagagggtcaaagtacacaactcatgcataaaattctcaatatgaaatcccctaatttcatattgcatacacaacccgaatcttgtttcaaatcaacaaaattccaagttcaagaacatgagttcaaacctaacacatccctattaaattccagcacaaaaacactagtaaaatataaaattccaacctagaaaacatcataaaatctcttcccaaactcaacaatggaacatacaaccacaacaagctcaatttcaacaagattaacaccaattcacttaacatgcaacaaagaacattcaaagcttaaaagagcatgctttccaattctaaactcagttacaagttcaaaattaaagagtgaggagaagaactacctcaaattcaagccacaaccaagcttaattcccaattacaaagcttaatccaacaccaacatcaacccattctcaccaatttagctttgaaaaattagagagggttagggagagagagagagtgtcgggtaaaagagggatatacaccagaattttttattttcataatctcaaaaattcagcttttaccaatataagtcaaataaggtcaaaagaccaaaatgcccctagggccaactctcacatattcacagaaacaagggcatagttgtcattcacactcatttacttttcaaataaaattcaaattgtccattatcaaataaaatgccaattaattcaatccaat

SEQ ID NO: 65626 - DNA, 1681 bp, Cannabis sativa
tttaattgttacttttataaaaaaattttatggtcggcacacctattttgtctttatactataaagacattttcttggctattatacacattaaataaagtgtagttgcatctattagattaaaaataaaagagaaaacctattctgacatgtgtctccaatataatgtgtcatgcaataaaattattataatcaaaatattttttattaatatttaatttaatgggacctacttagagcagctccaacactcacttataaggagtagcccaaaacacttttatcagtaacatagctattatactgagtagtcttgcatttgagtgaatcaaaatgaccactccaactgttgtgcaacaatcatcatccaattttttttattaaggaaaataataaatgaaagacaaatcaatttcaaatgtagggtaacggtaacaattttagaatgacacactcaaataatttaattaataataaaaagaaatcaactgttttatcctctataaatactcattatttttcactcttcttctacaccatttttacaatttcttacaaaatctattatcacaaattttctttattttttcttctcactaatttcatatcattttccaaaccacttttctacattatcttatattcataaatggattcccaaaattctccacataccaactcccaaaattcaatcattcaatcttctcaatccaactaaaattatcaaaattctccacaaaccaacccaaaaaattcaaatttacaatattttccattaactaaaattttcccatataccaactctcaaaatccaaattttctattttctcaatttagccataatcctccatttgacaacccccaaaattttaatttccaatattctcaattcaacccaaattatccaatcttctttttttcttaccaaaattttacctcttttgagactccccaacatgatccaatcttcacacaaagacatttactctcacatgtgtttctctcaccttttccaaaccaacatgaaatggtttcaagcattaataaaaaaagtattgatttgaatgtggattcgttaacacaatccgtctctgaaacccattcaacacatggtgtaagggaaatttcatattttattaaattttattgtgttattaatttttctcttttattttgtaggtgttctattagtggggcggaagtgacaactcttagttttgaaattttttctgatattaaggttttattgtctagttctcgtgggtatctctgcatgcccttaggatagacaatgaatgatttaaatggaagaaaatcctcctctggctgcgtaactttgttacctttgttattttaacctgtatcggtttcccttcaaaaaaaattattatagacaggttaatagaataggttatttaaaaagtgatttactaccaacattaatattgtgctaatataatattttttggttttaaaaattaaaagtacttattccttttaaactatttcgtttacaggttcttttcagttttccaggcagaaacagttgtgttgctagaagatttgcgttaggctcaagatgtgggacttcctgtggagagggttttctgattcactttctttgtgttgggattttatgccctaaatgaaacccattacaatctaatctgatttgttatca

SEQ ID NO: 65627 - DNA, 532 bp, Cannabis sativa
ttcctatcaacttcctcaggtatttttttgttttatcttcgtctctaactctgttgtctcttaggtttcttcgattgggcgtgctttaggaaacatattcatagaaattgctctctagattttgtattcattataattattatgaatttccgtcggtctcctttgttattttgtatagatgaacttaatatgaagttaatttcgtggattctattgaagggctaatttcacgttgatctcggttggttcttgtattcatttattcatttgatatacatgtgcccatttagatatctatctatatagatttatgaatatgcatatatgcatagtgtaggcttaattatattcttatacatacatatgggcaaacctgtgacaatataaatcaagagataattcacattcttttttttttaatgcattactagctggttagttttcttgtgctagttcgtttggtacggctattatattttatataatatataaaaatatgatatatttaaatgcattactagctggttagttt

SEQ ID NO: 65628 - DNA, 1079 bp, Cannabis sativa
  modified_base (595)..(621): a, c, t, g, unknown or other
tctatttatatgtacataggtggcgatgagtacctagttttcatttttaaaagggaagagaaagagtgacttgtgagtccattgagattgattacttcacaccatctcatccatggaagaaagcttattattattagaacaaagtaatcatcaagaagaagatattagtaggaggaatgaaattattcattggaaggtgttttttgaagaagtgaagaaattagggtacttaggaggaccccttgtgattgtgctattatgtcaatattttttacaagttatttctatgatgatggttggtcaccttggtcaactccctctttcaagctcagccatagccatatctctttctggggtcactggttttagtcttcttgtaagtaataaataataataataataataataataattactcatataaatttgttatttctttcaaaaacctaacaaatcttccatattatgtgatgatgattacaagtacaagaaagttatgcaaatccatgaaaagggtatccttttccaattctttttaagatgataaatttgtcactacttaatttggttagaattaatatatatatatatttannnnnnnnnnnnnnnnnnnnnnnnnnnatatatatatatatattactttataatataggaaaataccaatttattgttttgatggaattgaggcttttttgcttagtgaagatgataaataggaagaagaaaaagtagtgttaatgatttttcaagtttatcttgtattttattcaataaaaagaaaaaggtgtattgttttaatatttaattataatgataacataagtttggtttgttgtcataaatgaataaacaatataattgttttttgtttttataaaatatttttatgaaattttctttcttaagttgatgactgaatacttatagaaaggagaatcatacatcaaaattgagaaattaacttgtctttactttagagtaatattattgtaaaattgtgtttcttatttattattgagctattaagtttgtgttatccaattattcatactatcaattcatgtctttcaaattttaaa

SEQ ID NO: 65629 - DNA, 1071 bp, Cannabis sativa
ccggtaaaaggaagttttaccggcacatttactctacgcgccggtaaaaagtcttttaccgaccaagcttcccaaataagctttgctggcgcagttgtgcaccggcaaagcgttgccgacgcagttaggatacttttgccggcgtaaaaatgcgccggcaaaagcgggttttcttgtagtgtgaataaaaacctaaataaataattaaaaaaaaaataatacaaaaacaacacaactactacattaagaaaagaaacaaaaaataatacctcaataagagtatccatcattctgtttaaattagcaaaagcagatataatagtccgctgctggctaagaaaaagagacacatctttgtttaaattctcgtattcaatacgagttacataatcatgagccttagacgatgatggaccaacttgattaccttccatagaagcattgggcacagatttagaaacgaattcacgattacctttacctttaaccttaataaaggaaagagaagtgtcactagaagaataatcagccaaattcaaacaggctctctcagcagaagttggagaaatattttcaagttgtaactgtaacaaaaaaaaaaagccaaaaaaaggaataaaagtgaataaacatgcaattcataaaaaaatgaaaaaataacactgaaacaactaaaaaacaaaagaaaaacaacacacatatacctacttgaaagaccaattggagatgatgttgttcacattgtctatttttagctgaaaaaatttaagctctggattttaggccagttaagaagcctaagaatgccaatgtttaaatacaaaaaaatattcccaacgacctatggacaacactcaacaaaccaaacttgcatttcataaggagaacctaacaacctataaaacctgccatccttatccttcttcctaacatttctaatactggcatcaatcttacccttaagagattcaatagtcatctcaaaacactcattcccctgcccatactcattataacgaccactatccacaatatcaagttcctcaatagagacaacctttccaagaggac

SEQ ID NO: 65630 - DNA, 666 bp, Cannabis sativa
  modified_base (454)..(477): a, c, t, g, unknown or other
atactgtagtatgaaacttataaaaaaatagagtaaaaaagtaaaaaataccacctgacagtatttttgtaaaaaaatggtaaaagttagtataccatgtaaatttttctatgttttattgacgttggtaacacttttatttttaaattttttaatcacaaaaataaaaataaattttttatttttaaacttttattttttaaaaacaaaaatgtgttctgtaaatattatttcattttatttgttaatttatttaagtcgagtccagggaggtcagaatcgggagtgggtccaagtctagggccaggctcagatttgattttcaaaatctatgttagggtcggagtctaaaatattaattaaaaaaaattgtttaaaaaaaaatttaaaagtgattttttatgttttaaaaatttagattcttaattaaaaaattaggggtgttcgcggtgcnnnnnnnnnnnnnnnnnnnnnnnntttcaaaccaacccgcacatgcagttcttttaatttctaaactgcacccgcaccgtaaaactaaaaaactgcagaaatcgcactgcaaaaaaaagtacggtgcggtgcaatttttacggtttggactatcaccattaattaaactatcacaaatacaacaaagcttgagcaacacttgtcaaaaatacc

SEQ ID NO: 65631 - DNA, 734 bp, Cannabis sativa
attctcacaactcatctccttcttctaatcataatttgaaactattgtctcactcctaaccctaaccccatgcaattctcccaccacctccaccaccgtcccgaaggtgcaaccctgcccatccctctcaatttttgagtccacccacttccctctttcaataattgtttttaagaacataatttctttttctcattcttgtatatgtatattttttagttgctagtttatttttaattaagtatatatcttttttgttattgcagtaaattcaataaattcttaattattttattaaaccatataaatgtgttaatttatatatgattgatcttcaattattggttagctgatgttttatgtgtaattgtcattatgtatagatttactatatcttcttatacttattttaaaatacagttataagttttttgatgttgtgtttttgcttttttatttttttttatagttcatttactattgagctctagttaatttgcatattgcagtggagttgatatatcttgttgtttttctatttgttttcgatgttatttttttttttgttgttttataatttatttttggatgatttaaatattacagtgtgtttgatatcacgttgtttttctattattttttgttttgttgttttaccatatattttttttgtaataaaatgtcgtacttttgtaattttaaaatgcattttttaaaattaaatttataaactg

SEQ ID NO: 65632 - DNA, 971 bp, Cannabis sativa
  modified_base (416)..(416): a, c, t, g, unknown or other
  modified_base (654)..(655): a, c, t, g, unknown or other
gcgagtcagaagacttctttataaataactgggatcgacacaagacatacattgtcgacctaggaaggaagaatggcccctgctcacaattgagatcactataatccggtttttgtcgagacatctccagattcatcagttaaagacgtgtttaatacacaatagtattgacccagtaaaagtgagaaaatcacagctatatggttttcaaatcataaaccgtatttacactacttaatatgtaatcaaatcccacaattttagggatgattgttgtacaattatttcagtcaactttgtaattaactgcaaactatgtaattataaatagcggcagacaagttcaaaaaagggacaaaaaaactcatatgaatgaggccctgaaaactactcaaaaatctgaataagattgactngtggactatgcagaattttaacggcaaaaccacgtaaaaaccttatgttcatattctttattttgatagctttaatttcttgtgtgtgaaatcaatattgtgaggctcaaatttggttaattgcgttaacatctataatctaacaccctaaatatgaatattctaatacgatgaaataaacacatataaagtttagaaaacttgcagtgatggcagtggaatattatgactccttccnntcagatctctagcccttgttcctttctgtcacaaagcattatcaagagctgaacatggatctgatccccttcaattcggttaaccaccgtcttccacactatgattgagtacttgacttactatgagtgggcatggtactccatctcttaaggcttgaaatttatgaagaaaaatagaagagaggattcaaaattttaaggaaggaactctcatttactagtttttttgacaaagaatgaaaactaggttcaaataggttaaaggttggatgagaatgaaagtgtcatgttccttttatagtatttcaactaaagt

SEQ ID NO: 65633 - DNA, 728 bp, Cannabis sativa
acgtgctaatattttgtagtcaaactggatgttatcttattatacactataagttgtgtacatgataacgaaatactaatactttaaatatccctacatggttgacattataatagttgtatttagttaatttgattgttgtaattaagtaataaaatatatcattttcttagtgcaaatattaaaaaaaaagttggcatatacctgttgagaaaataattctataatacttaataataaactatgaaaataatattataatgaagagtctatacactaaggagaagaactaattgaaaaaaaaatttcaataaaatattggtccatgaaaataaaaattacaagcatataaagtaaatctaaaatattaagaaagaaaaaataaaataatttagaaaaaagtttcacaatacttaataatagttcataaaaataatagtcaagagaatataaattaaattaagatagaaacttacaagatgctaaatgaaaggcatactaaaaagattggaaggagccttgtgtggatggggctagaacgtttgtcatttcttgtgtaagatgatgttcctacccgagaggccaatttggacctcaagtgacacgttcgcttattatggtcctaacctgcgcaacgtgtgcattgtcgacttccttgtatgccattatttggttttcttctagaattgtttgggatactcatacctttggtcctcaccctaattgga

SEQ ID NO: 65634 - DNA, 962 bp, Cannabis sativa
  modified_base (905)..(905): a, c, t, g, unknown or other
gactgaccctacaaaccaacacgaatgtttccaacgtgcgagtgtgaaaactttccaagaggttacccatcttgaaattactctaggttaagcacgcttaactgtggagttcttttgtgataggctaccagaaaataagatgcaccttgttgatataggaagtaccaatcaatccatttaagacatcttcaactatgtagtcccatacttacacagtctcagaatcatcacacttgaccttccccaagaaatgtgggattgcacaacttatccgatatttttccttactgatcacgagactactgactgtcaaaaatatctcccttacggggttcaacatcctcgttgaccacacttcaaagcgggtcaaggctctgataacattgataatgcccatacttgcttctattaggtccttacacccacataatgatgactcttatacatgagtatgtcacgggactactaattgtcataatcacccccttacagggtctgacgtcctcgtcgacccacttttggttagatcaagactttaataccatttgtaacgcccccacttcaagcctccattaggtccttacaatcataaaatgataactattatacacaagtatgtcactctggctactttttggaatgacggctaaccttacagaccaacacgaatgtttccaacattttttgtcctcgtacgctttttgggaaaaactttctaggaggtcacccatcctaaaaatacctcaagttaagcacacgtaatgtgtggagttctttcgtgcatggtaggctagtagaaaataatatgtactttattgatataggtagtaccaatcaatccatttaagtcatcttcaactgtatagttccatatctacatagtctcataatcatcacacttgacnttccctaagcgatgtgggattgcacaacttacatgatattttttcttacagatcacg

SEQ ID NO: 65635 - DNA, 886 bp, Cannabis sativa
gaaataaattaattatataaataaggttgtcaaaataattaacataaattttgtgacacatcagcaaagttataacatcaaacaaaataaacacttaatgcaattagagaaggaaatcgtcaactaatctccacacaaacataccaccttgtttacaaattattacatgtctaacaatcgaatgaatacatttaaatatcatccaattaatttgccaaatcatacgatcctaaaataaaaactagaaaccgatcaaaaaagcttcaatcgtgaatcaaaaattacaaagcttcaaccataacacgaaaaatcaaccaaacagtcggcatagcaattcaatcaaaaatctgaaacaaaaaaaataacgttacctctcacattgtgatcgacaattactgaatcatcatcgtcgtcgtcgtcgatgcttcatctctattgttcttctcatcactttaaatagtaaatgtacagccaaaagctttaaccatgtaattttaaaatacattaatatccaagctaattagtaaacgaaatattttaatattaattaatatacttttcaaataatacagttttatgaacttaactttaataaattgcgatcaatttttttttccgaaacataatatttaagaacaaaactttttacttatcttatgttgcataaaatatataaatatttaattttaattttcatgaaaaataatgcacaactacaatcagtatgtttaattaactatacactaattaaatgtatacataaataattattattagatatttttattgagatttttacacctcatgtcaaaattgacaccttttttacatttttatccatacacggttttttaaacttttttaacttttacatttttcaatttta

SEQ ID NO: 65636 - DNA, 959 bp, Cannabis sativa
gtattcgtgactctgttttgctgcctaggtgggctagtgaaaacgaacttgtattattattttgtaaaatacttttgggatccgaatacatgaaacttttagtttatgaagtttaaattattacaagtttacttttcttccatttgtaattaaagtttaatttcttcgctaattttattagtaatcccgtttagggaattatggtttcttaagtttattgggtagcgtgcctaatagttagggcattacaaacattgtcaattgagctttcttaaaaattcttgttattttctttgctatatttcattattttcgtagacacaatttttactctatagtgctgactaatgtgctatgtgttctttgtggttttttcttttttgtttacaaaaaaaaaaaaaatacaaaaaaggacttattatgaaaaaaatcaagaaaaaggggggcatattttttgaattgttgagcttttttttttcttttatggaaacatatttttattgcattttatttattttgttttcttttttttttttttgtggggatttgcttttatttctcttgtgtgattttaggaaatttttttattaattattttgttggtttccttttttttttggtggcattttcggatatgggttggtattttgtgtttattttgtttagattttgtggggatatgttgtttccttttttcatttttgataacctttgactatatttttaaacatctttttgtttccttttctctcctcacatggtggccaaagtaaggaaactttcctctttttcttttttattatgattttttgggtatttatttcctaatgctatatatgtccacttacccattctctttaccccaccattcccatgattacaattaacatcttctctctttcttttctttccaaagatttaatctttttcagtttgagaagatatttttctacagtttc

SEQ ID NO: 65637 - DNA, 1392 bp, Cannabis sativa
acatgaaatgactattatgtccatgacaaatgagagcttgtaatagcagccagttcgtgacccccatgatcccatgatattatttccccacgtgtcaaaatgttacttacattgatctttattactaaattagaacaaacccaactcagacctcaagtaaaaacctcccactcattcactcaaataacttcccactcacttaaaaaataaccaactcttcattatatataaacccatttttacaattaccacaattctcacactcaaacacatctccatccttgttaaacaaaactgtgtcgttttgagttgatgatgatgaaaatggctttcaactcatcacctctcttcttcttcttcctctctttattttctcttcatgttctcaatgtcgtttctttcgaattcgaagttggtggaaatgaaggttgggtcgtaccctcttcaaatgagaccaatatcttcaataattgggcctcaaaaaacaggttccaattgggagacaccattggtaagtaaagtacccttaaacgacataattttttcttgtcgttttttccactaatttttcttgttctttgttttgtaacagtttttaagtacagaaaagactcagtaatggaggtaacagaggaggactacaagaaatgcaattctagtcacccaaacttcttctccaacaatggtcacacactcttcaaactcaacgaaactcaccctttttacttcattagtggggtttttcgtcactgccagaagggtcaacatatgattataaaagtcaaaactccagaagaatctccatctgatggtggtggtagtggtggagcctcctcttctggttcagcacttggcaatggagtcttcttttttcctctgtttttaatgtcgtttgctgctttcgttgtcgtttaattatatagctagctaagtttgaatctttaatgttataagttgttttttctttcttgctagtatgtaactatgttctttgttattcggtttataatttaaatatattgaatatttgaaacacataaatatatatgaactaatcaatttcataacctttttgtcctaaaattaatattactcaatagaagagaacatgagaagggtttcccaatatatattatgtgtaaaataacaaagagtttaaagcatggaataatcataaaattacaaaggaaaaaacaagtatgtaaaaatagtaagtagaaataaacacatgatcgttggttcattcattcattcattaattccttgctctgctctactctgctttcaatggaattatatcatatcaaacacctttctcattgttttgggttttgattagaaacaacaaaaccatttcttctgcatcagaaaaacaaaaattgaagataaata

SEQ ID NO: 65638 - DNA, 885 bp, Cannabis sativa
gggttctggtacaggtctgggttctggtccaactcccgggtcacatgtcctaggttttgggttttggatcgcaggtcctggcgtaagtttgggtccgggttggggtctgggtttgggtccgaggatcgatcccagtctcggtcagggttcgtgttaggttccgtgcttagattcggttttgggtccaggtccaattccttttccaagggcctagttccggttcatgttccgatttcgggtctcgggtctatgtctgggtttgggtcctagtcttgaaatggttctagcttcgggtcttggtatgattccaagatctagacaccgactgtgggttgggtccaagcatctggttgtgggtcaagatacggataccaatcttgattttcgatctcgttccgattcgaatcctgggtcttggtccatgttcgtgtccgattcccatttggatcccaatcttgggtccttgtcccagtcctgagtcccgtttttggttctaatttttagttagggtccccaatctaggtctaggtcctgggtttaggtcttagtatccaatcccggtccgggtcttgggtctgtgtttagctctaagtccgtgtgtgggttcgggttcatgtaccgagtcccgatgctagttttgattcgtgtgcgcgtcccggtttgggtctaggtttgggtcctagtcaaattccagttgtcagacttaaacccagactcaaactcggagacaggtctgggacacgagtctgggtcaggttcaaggtttgggtccgtgttcaggtctgggtctgggtttaggtctcaatccggatctaggttctgacttttgatcacagtcttggtctgggtccgggatcgagtccaggttcgtatccggatccctat

SEQ ID NO: 65639 - DNA, 1455 bp, Cannabis sativa
cctggacgctaggcgagtaggaaaacatgttcgaaatgtattttttgatacttaagtgatatttggacatcacttagcctgtatatgtgctctggtgaagttggttaccagttataggagatgtcgttgttctgctgattagtggttaaaaatacacctttatttattttaaatgataaaataagttgaattttaattgatattttaatgaattattgtaatatattttataaatgaaaatattttattttgattcaatttatgattttcttgtaggaattaaagtgtatttttgttgaaagaaagagaaaggagcaaagtagaaaagaaaaaaaaatggcatttttgttgaagtccaaagcaacccaatccaaaaaggtcaagcctagcccatgaaagcccatcatcaattttctctcttccaaagcatgtgatgcaatgataataaatctaggtcatcatcaaccatattttcttcttccacactcaactttcatccaaagagtagaaaataaaataataacgataacaaaaataatattaattttatttttgattttgaaaataatatattagttgtcatctttttgtaatatttgggagagtaacttgttactatgagtaatttctaccattatcatcaatattaagtgtgtaaaaagatgttacacatcttaatttaaaattcttaataccataggagttatggtgtgtgcatgagttacatttaaatccataacatctatgggggttatgagtttaaatttcaaatgatgatatcctaaacactatataaagaggtctaagatgctcatattgagaggaaaagttttttactaaaaaaaagtcattgttagaaaaccctaaggcttaataattctcaaaccatgagagttcccttagtgcttagagatatggagaaataagcttttggacaaaagtgtaatactttgttcaagtcatggtaatccctcaaggttgtgagtgatgtatatgcatatatattcttctcttgttagatatatgtattatattacatgtgttgtattattcttttactatttttatatatatatatttatgtaatatatagtgtatatatgtatattgtaactattagctggtaaaaccagcagaaaaaatcagagagaaacagaaagaaaatgagagaaagtgaaggaaaatatagctgcattcattgaattgtcattaagttgttacaagagaaaaggctagttatatataactgctgaaatcagttacatacaaattgaccaagctattcatttaattttgatagtaacatatatttaatcaattttttattttagtctttatattatttatacaattaagttgtttttatcttaatttatttattaatataataaatctctaacattaccaaccaaaccaccctaactaatctaaaaaagacttagacacataaattag

SEQ ID NO: 65640 - DNA, 1445 bp, Cannabis sativa
  modified_base (1103)..(1104): a, c, t, g, unknown or other
atttattttataaaaataaaatgaaatatagattaaaataatctttttttttttttctgtgttaaaaatgtatgttttttttttgaaagaatgttaaaaatgtatacctcattttttaacaccccgtccacttagtcaatggtatagacccacccaccccactatcatgatacacaaacatttttattattgcacgtggtcgtgggttgttatgatatattaatactcatattatataaactactttctttttaaggtcttatttttattatgaaaattcaattagttccaattaaaattaatacatgtgcttatgacaatttaaaagatatcacaaacaattcagagaacctagcaatctaaatttctttccacctttacaatgtgaaggacaacatttataaaaaagaaatatgtatatgaattaaaagtaacataaattctcatctagaatagccaatatgacattgcataatagtgttaaaatggctatggtaaaaattctaccggattgtttggaatgaagtaatctttatatgcaaatggtaattttaaaagctggatacggaacttgtagtgggaggaattcatcatccaagtagcagtttggccctaaacacagtctgttgagatattaacccaagtcccatattagaagaatatgtaagaattatcttagatataagtattccactttttccattagtatgaggccttttggaaaggtgcccaaaaataaaaaccatgagggcttaggcccaaagcgaacaatatcatactaatgtgagagttaaggtgaggtagcagctcgacaaggcggaaaaacgagaccaacaagttgtattagagccaaaagtttaagcgcactgggatagtgggctgcatttacgatgtgggggagaagccctcaatgtaatgacctcgtgattgaagatctacataatgccttgtatcgaaagtttcttgatattaaatagtcaggtggtgtgtcccgttgatgattatggcaatagaagatggagagcgttgttaggacctgtgtcgaaagtcctcttgacaaaggtggtggttaggtgacgagttctgttagtgatagcggcggnntaaggtagttttgctggaggggaggccacgagtatgtggtccttagtttgaggggagaattattagggtatcaatccaagtcccacatttgaataatatgcaagagttgtcttggatataagtgttccactttctccattagtatgaggccttttgacaaggtgcctaaaaataaaaaccgtgaaggcttaggcccaaagcggacaatatcatacaaatgtgagagtcaaggtgaggtagcagcccaacaaggtggaagaatggagcccaacaaaatcaacctagaggctagaacacatgttctcattcgtcaataaacgattctactctaaacttccatc

SEQ ID NO: 65641 - DNA, 3762 bp, Cannabis sativa
aactcaatatggcaataccctaaactagcagggaattaaccaactagaaacctgaaactaacacgaatcaaaaagctgaattttttgagaactttgctgcaaaaatcggtttcccggttttatatgtacctgtaaaaccggttagccagttttacccagaaaacctaaacaatcccaaccccaaactaaatcgattccaaacttaaccaaactttccagacctgcataatataccccaataaacaatttctaagcaataaaataactacccaagctcataatctaaaatcaccattaaagctccaagtttgagttctaaaactccaaacttgctaaaccctactaacaaccactaaaacaagcgtaattcaacatatctaaacataatcaagcttcagaaaacaaccataaacaataacaacaactacagcaacataaaaaccaaaatcatgcaaaaactctaaacttaaaactcaagaactaaggaggaagttgctagagatttaccttgagtttggaaacacccaaagcttgctgaaaatactagaattgttgaagaaaaaattagaaccctagctggttctatgaggttcgaaggagagagagagagcttgagagaaaaagtgatctttgatgatatttgattttttgtaaaatgagataactataaaaattgttttatttaattgataacatatataaaatcagatttatttatttaacatatgtccactaaaggacaaaatactaaaaagtaaaatgactattttgtccttcccacactacaaatcataaaaggtcacttaggggtattttggtcaattctaaattctcaactaatcccgaaattcccaatgtctaactacaatgtcacgctatactaaaaatattgggatatgattttagtagccaaacatcgcattccaatgttgtcgggcacaaaacatgcaaaattatgaaatttcatatataacatataaaatgaattttgaattcaaataaatcatcgtaaattagtaattcaaaactaataatcaatttatctgttaatttctaaattaaagccaagcggtatttacatgggttgagaatgattttttgcgcaaaaattatattctagatggtttatctaattatttgtatgactactataattctgacaaaactgccaaggaaatttacgacgcacttcaaaagaaatacgacactaaggcagctccctacacctccatggcttcacataattcattgagatcccataatcgttgaacatatccctcatcatgtcttttgtacttagtcccatcttgggtgtacttccccttaataaattggttaaccacccatggtgctgcctgctttagcatccaggttacatgtgtattcgttatgaaatacagtaacctcaaagtggtttgatcacatcttcttctttctcctaaacttccacttgcaatatggatccttgtatgtaatgttcatcacatcggtactataattttttaccatccattcaaaattgttattaagtgcaaacctagcgacgacttgtctcaattcttccttgtttttctacaaattttcaagttgcatctcccctaattccttactttgtaaataattagacaaattatgattttccaatatatcttccttagtctacataggagcattaaacttgatacaaacttcgaatgacgagaatgatggaaatagtgcattacggggagcatctcctcctaatctacattgctaactactactagttctaggtgtatgttgattttcattacggggtatctgttgttgctctgcaccatgattttttggtgcacaatctaatcttaaagaaggaaactctactacttcatcgactaccaactcatcttcatcatcattattcaaatctacaataggatcattgttgtaaaaaaaaaaaggggcatctaactcattaagctgactaaaacctagcatttcattgtcttgatctatattggttgcaactttcacattcacaccaaccaaatcaactgttttagggacaaaagacccaaccacgctctgagggagagaattagcagcaggagtaggctccgaattccctgaatttttcaccttggtcacaaataatggcataaagtctgtgtttgacatggtcgccctcatctctaagaacactcttagttaacattctttcttcataaccttaggtggaacaagttggcctttcatgtacatcgaacaaatctctaatttcaaatcataatcctatgggtcaacctccaactcttcatagaaaatgttgcgcattttttatagggttgtgtcgctttcaactatcaacgtcaaacttccttcacttttatacacccaatttaatccctcaacactccaagcaccaatatacaatacaaccagaaacacaagcgatcctgcaatttaatacaaactacaaacagctgaatcagcataacaaaaataacaaaaaatgacaataataagaaacaacgtcgacaaataatcgagaacttgcgaagaagtaatcaataattgttttaaataaaaataagtaaatcatcgatgaacaattgagaacacgtcgataaatcatcgataacatggggcaatgaagtttaaaaacacaactgtacacaccattgacaaacaattgagaacacaaagataacatgtcaagaatggttagaaatgtaaaatcatttgccatttcgataaacaatttagaacctatcgaaaagccttcgagaaaggtcttccctgaccttgggacatccgttttgagaaccttttgagtattgacaatcaatcgaaaaaaatacaaacacacagaatactctaaaaaatgatatctcgtgatttcaacgaaaactatatcaaaacttaaaaatcacaaacaattgcatagatctaccaaaaatatactatatttttacaattatttaacaaatattttaaaataatatacttacccattaatccataatgagagggaggtagaggagggccggcggtttggttggtgagagaaggttgggcagacgtccttcacggcggttgggttggtgagagaaggttggacgaatgtccttaatggtggtttggtgagagatgattgggctatcctcaacggttgtaggcggcggagctagagagaagggaatagggctctatatttttattattttgcaaagaaggggaggagtgtgttgggcgatggggatgtagagagaaagatttgattttttttaggttttttaaagtttcgaaaaaaatagcaagggttattttataggcaaattggaaaattatcagggtaatattgtataaatcaattaagaagtattttttgctataagattttttttaagtatattaaatgaaaattttatttatttatttatttttattatttttttaatttatattagtttttatttttttaattttattgagcatgggttgagtgaaattttgttgacaatgattactcgtgtttgatgtgtgtttttacttttatgtcttatgcatgatcttgtgaaaaataattttgttgatgatgaaaattcttgattgtgtgaatagttataattctaagaaaatgatagattctcatgatttgtgtactaaacttgtgaaaaattattgctcaaacttgatttttttaaaaacttttgcacatcagttgaattatcatatttgctaatatttggaaagatgaatgcatgtttgaattttgattta

SEQ ID NO: 65642 - DNA, 1469 bp, Cannabis sativa
tttgttgcaatgtgaactactttactgttttaattttcaatgtacaatgtaatctgacatgttcgtgccgatttcaggatcccacaggtacaattgatgctagcattcaccacaaagttctttctcaaggagagtttgggaagatcatatccgttggttctgttttgattctccaaaaggtttggctttttgtcctttattttattcacataattagtgcctcttttcatgaatgttaatcatctatgccacggtaccattataggtgtttttcaattcaaaagataattaacagcaaacatggtgagactggtagaattattgaaccttttattccttttgaaggtacctgctttcgctcctttttgctctacattctttctcaatatcaccttgaacaatgtaatcaaggtatgtttctttttgttcttgctaattagttagccgactatattttgatatgtaggtaaactctataatagatttctaagaggttgaataaattggtgaaaaatgagcttatagagaaagataacagtagttagagggctgatagagtagtttaactattgtaaaccattggtataccaacaaatttagaggatttttaatccatagaaaatggcataccaacttgtggtcttctttagttatgttgaacactatgcaaagcaaaccaagaatatgtcattaagtaatacacgcattctctctttcgaacaaaataccaatatgaaaatatctatatgtttatctgtactttttttaaatatgtacatgcaaggacaaagaatcacgtgagttcacatttatcaaggagtcattcatttttctctctacatgttgaaaattatcaggtcatttcaaaggatagtgatcctcttattgaacgcaattgtgctccatcactaagatatgctgcaaaaagttctggttggttacaatttcaatttcatttcaattgtgattttattcatcttgcatatattcagaattagtgataagattactctatgatcacttatgtcactcttcttgtatattgtaaatagagagcaatgaaagatcacatacagctgaaccagtgatttcacagaaaagaaccgaaggaattatgagtagtctgaacaagaacagagtagtagatctttctgagaacagtagctttattagcaatgaacactgcagaaactcacttggtaatgctgctgagaaagaatgttcattcacaaacactccggttctaagcagtacacatttgagtgaccgagcaactgtggcagatgaacagtttatcgattgtgagcaatctagagcagacaatttatcgtgcagggttgaaaccgcaaccacagctactgcagaaaacttggttgaagtccctgctggtgagaaagaacctgagaaggaatttggtagtgaaaaaccgggaaaggtgtcgggtgcaacaacctcaatgccagactgga

SEQ ID NO: 65643 - DNA, 747 bp, Cannabis sativa
  modified_base (37)..(66): a, c, t, g, unknown or other
taacatacatgtaatcataattcacttctaaattgannnnnnnnnnnnnnnnnnnnnnnnnnnnnnagggcataaaacccaacaaagtctggttcttcttcagggagtacatctcttcgtacatagctccattctattttttccagtctttactgttcattgcttgtgcatagctagtacgcttttcatgcataatctgattagcaacatgaaatgcaaatgcgattaaattactttttaatataaccaacttctttggtgcctttacttctctctgtgttctatctctagccagtttataactttttagattatctctttcagaatcatcttctgaatcatcactttcgtgatctacaggtgtttcaagctccactcttgccgaaggctcaacctcaagctcattcccagagctttaatttcatctcagttagtattggcttgacttccagcaggtttgttaataaatcccatagcagattcattaaaagtcacatccacactaattatacattttctcattccaggctcccgacatcacaatctatatcctttgacttcttctggatacttcaagaaaatatactttaaggcccttgcctcaagtttgtcctgcatgatgtatgcataatagacacatctgaataccttcaagtgttcataatttattggcttccctgaccacacctcatctgacgtcttgaaatccaatgatgttgacaaacatttgttaatcaaataagttgc

SEQ ID NO: 65644 - DNA, 516 bp, Cannabis sativa
aataccataagcccgcttaaattcgatattctaaatattacttattattgttccgctgaataattttttttaaactgacccatatgactctaacaaccatttgtcgtattttccaatgtgatgcgtgtcgtaagccacaacaaatttactaatattttaatttcaatacctcctattattttagtataagtgtaagtaagggtcgatcccacaaggactatatttatttaattattcacaaattagtaacaagaatcagaagatggggattttgatgattagaaaaaatagtaatagtaaaaataaaaataaaaaaaaaatttaaagtgagactacaatatgagaaactagttaatggttattcgccaccctgaacaatcattcctaatttctattaataaatgtaattttagtttccaatcaaactattaatcccgtagataaatctgaagtagtcaattattctaatctccctattgtatgtaatcaaggcgaagcgctcaataattaactctt

SEQ ID NO: 65645 - DNA, 901 bp, Cannabis sativa
  modified_base (31)..(32): a, c, t, g, unknown or other
ttattttctatttatttttagtttttttttnnttttttaaaaaaaaaaatcataacctccatagctgaactcttccccctccacgatcccaattcgtttttcctcttctttatgttcttcaattttattttcaactcacattaaccgattccgataaccattttctataaccgtttttcctctttttctttttctcttaatctatttataaatatgactattactcgttcttcatccactccttcccctgtgcaaaagaatagttctaaaatagggttgaaatcttagctaataggaacaagggcaaacatcctgtttttcaggaagatgactctgattttgctcctcccttgtcgaaacgtgagcgagttcctccaaagaagtaatcaaatgttgctgcccaggaaaaagttcctcatgataatgcttaaaaaaatgatcaagatggtgctggtcttcgatctcaggtttgtttttcggtttctttttggtttcccccatttttgaaaattttttgtattcgacctttgtgggttttgtgtttattgatttcattattttaggttatttattttagcatttcttttgttttgtttggctttttagggcttatattttattaatttgatttatgtgttattttaatggggttttcatttttcgtttgtttagttttaatttttgtttcatattgttatttttttttcctgtttttgtttttccaaatgtgattgtttttcattttagttagttcatttgatcatttctcattttttaattgttgtttttatagttttttaatagtttaaacgccttgctgtatgtgtttttcgagttgttttctgtctatttctatatcatcaatgggtaacaatgagatttatcatgaatgttgatgttc

SEQ ID NO: 65646 - DNA, 551 bp, Cannabis sativa
  modified_base (513)..(525): a, c, t, g, unknown or other
tcttccggtgtttcttcgagtcctaccgggaaggccttagggtgtatgtgagtccctaccgtctccatggctttttgcatggcgaccatcacctcttgcatttttctattttgctcctttttgggctgccatctcagcttcatgatcagcaggcttttgcctcaagatcggtaactctgtataactaccctcgtcgtaagcgtcatacttgtcaaagttctcttcatactcctcgtcattggctttatcgcgctcctcagagcccacattcactcttcaggctacttcttcgtcctctgggttttgtgcatcctgaggaggatggggctgacgtgtattgttgcgagtttttaccattgttgatctagcttttctgattgttgtctgtttaaagacgcttcctttagctctcaatgaaagaaccaaaatgttgaccgaggttttcggcaaccaattaaataagatataagaagggctgtagaaagtttaatgcaggagatttttacgtggttnnnnnnnnnnnnngccttagtccacgagtcttttttatt

SEQ ID NO: 65647 - DNA, 1184 bp, Cannabis sativa
aaaaaaaaggagtgtttggataaaacataaaaagttcttttttcaatttcaaagcccttttaaaagaagctaaaatttgtagcttctctcttttgaacttttgagtagctatttttaagattaaaataatttatataatttttaatttactcacaaaaaatatttatttaattatgtctaaatattttgaaaagtacttttcatttaaaaaagatcttcatataatagttatgtaaatggtaaaaataagtcaaagcttatacttattttatatttctagatataagtaaaagtaaaaacttagctgttataactgattttcggaaaataaaaaaaagtcaaccttgcgactttgactaaggtttataaatgtcaaagaaatcaagacatccttcttaagggccccatggcacttctagaggactcgaaaacatcaaccaaccatttggtgtcgatcttacagcacccaagtgtgcccaaagtagggttcatgggcccccacgagcgtctacaccctagaaacctcaatctgccaaggaaactaacaagaacttgagttattggggcatgaaaatgacttaagtttgtgcataaagtcaatatggcatcaaattctcaagaaaaaatgcatatgcacccactgccatatggaaatagcagtgtccatcaattttggtgggcactgccacaagggaatggcagtggtcgctcctaactgacccatgaaaggaaaattattcaaatggattccctcaacaccaaggagtgaaaaacaagtgagggaaaccacttcccacctaggatttaccctagccgaccaatgccataacgataagccaatgcccaccaattttggatggcactgccaacaggagatggcagtggtcaaacaagaagaggggaaatgagattttttgccaacaatgcattttcatatataatatgtcaaaactaagtgagagaagacaccaagtggtaaagaaattacttggtcgaccactgccataagaaaatggtagtgcccatcaattttaatgggcactaccataatggaatggcagtggtcagcccttgcataagggaaagggtttcattggccaagctaaattttcaacatatatgtatcaaatacaaataagaaaattcacccaagacattataaggtccatatccgaccactgcca

SEQ ID NO: 65648 - DNA, 857 bp, Cannabis sativa
tcgataagatcagtacttaactccatttcatccactgtaatcggtacaaccttaatccacctcctagagataactaactccccactaggtaaaagggttctgaaacctaattcataactataacagggcctacctagtttatcaattactcttgatgccacataagagtgtgtagcccctgagtcaaacaataaagtaaaataggatttatttataaaaatctgacttgtaatggtaaatacccaagcaagagtggatatgaactccttatttggctctcccctagtcaactgagggctctccctcttaaagtgtctcatcttacaacactggaagcaggcattcttatcacattctcccaagtgatgttttttacaacgaggacattctgggtacgtaaatccaccttgacgaccactactctaacgatggttcccgtagaattgcttggtgtgaaaggagccttcctttttgaatcgaaaattgaatcactactagtcctacccaaactagaaggaggtggagcactgacaccacaggaaccttgagtccctcggggctcatgcaaaaactgtactgcaccttcggctcgaaaagccttctgtacaatcagtgcatatgggatagcatcatcggttgtaattgttaaatcatgatggatcttggcattaagctcacctaggtacttttccttcttagtgtaatctgtaggtactgtacctgaggctaatgtggccaatcgttcaaacttggtcgtggtgtgccttcagtactaggactagataatgtcctagaacagtctcctgtgccgcaatattggatgtgaaactacctaagataagctgggtttcacctgc

SEQ ID NO: 65649 - DNA, 616 bp, Cannabis sativa
aaaaaaaaaaaaaaaaaaaaaaaaaaaagaaaaaagaaggagaatttagtaatttacttttgggaagcccaaaaccacattctcctttttatatagttatagatttacaccctgttatatccgagttcaattttttctatgaaaaatcgtatgaaaacgacgtcgtttactgtattgaacggcgtcgtttatgtgtgcatggaaattatggaaaggaaagtgggtttgtggatttccgggtcgggtttataaattaatgggattataaaaaatcttacacgtgaccgtcgaccgacctcgtgatgtggttgtcggcatgtaattttcctttttaaagtaaatttaatttatatccgagtctgaattttttggtaaccaaaacttatcatttagttaaggatgtgtttggaagtaattgtgtaattactaagtagggtaattactagagtgataattatacagtttagtaattacactatatttaaaaatagaatatgtgtttggatatgaggtgataattacattatatacttaatatttttttatatacaaaattaataggataaattgcggtataaatacttaatatttccgattttatacacttaaataccta

SEQ ID NO: 65650 - DNA, 934 bp, Cannabis sativa
gattcttttactcttagtaaatgatgccttaataggtcccatcttttaattttttcattgtaatttcagtaaagttctttttctttttggtggaatttgtaatattcaaatatttattatttatgtacatgtacagtattcacaagacaatggatagagcttattaacaagactaagactattttcccttcattttgctcctttgatcaattagattagttgactattattatagttaatattgttggttattggactgttattacagttgttttattcctggttttgtagtggttagttactatccttgtactctgctacttgcctatttaaggcttcatttctttgtacagattttcattcaatcaataaaatacttttcttgtttttcatttcttccacaatatggtatcagagcaaggaagatatgtttcctttcgatcctgattctctctgttcttcctcgccgtgttctacttcttcttctccgacgacgatcagtgtcagcattagaagaattcatctcttcatcgacactcttctttcttctaccttcttctctctaaacattcttagacgcacgactctcatcttcagattcccatcatgtcaaatgatcaagaaacagagcacgtcaacgatgttccagctcaaataaacaatggaaacaatcaaaatcaagcgcctgaaatcggagcaaatacactgatagtaagatcaagaaattcgatcgaggatccttcagacccctactatctgcatcacagtgataatcctggaaatgttctagtatctcaattgctcactagataggataattacattacttggtgtcgagcaatggagttggccatttcagtcaagaacaaattggcttcttgaatggttatatacctaaacctcccattattgatcatgttatctataattcttg

SEQ ID NO: 65651 - DNA, 1185 bp, Cannabis sativa
  modified_base (44)..(57): a, c, t, g, unknown or other
  modified_base (1121)..(1136): a, c, t, g, unknown or other
ttgtcatttaacaaaacacagggtccaatctataacttttgcannnnnnnnnnnnnnaaatggtatttacccatatatatttttcattccttcacatattttcttttgtttcaattttagatttcttgctttttcttaaagaatcaagtttttctacactatttgaagatgtgaaaaatatatagaatttataattatattataaaagtttgggtactaacatatatttaatgctattaactattgcttttgttgtacttttaaaagatttatgcctaaatcaaatcttttatgattttattgacataaaaattatatattatatttacaatgttatgtcgaagatattaagattataaaacactcaaaaagtacatataatttcaaatctaattattctaaaaatgtttcgttattcaaaatcctaaatgctattttaatagaacattttctttcaaagaagaagataaatatgagatgagcacaagtacaaaattgaagtcattgattaagaattcatagaatgttttgattttctaaaaatacactactcttttatgtatttctctttgatagagaaagagaaaatacaaaaatcctagtatttttttgagaaccattactgttttgggtatttaaaacactcaaaaaagagataataccataagttaatgtataatttagcccctaattaaattataaattaacttatggtatatatctacacattattttcacgagaatttaattccccttgttataacataaatgattacttttttttttttttattgaagtgtttatatattataatgtataatataaacacaccctcgtatgaccacttgagcggttaacataagtagttacttaattttgtattatattttataatattatatatgtatacaatgtacacacaaataaaaattttctctaaaagagatccatgaataaaaatagagatatttacaccacatactaacttttctctaaaatttacatttatactgtaacaagacaattttttaagaaagcttgttttttttttccttccttatatcttcgtttttttttttatcttcctccaaacttttctataaagtttttttttttttttnnnnnnnnnnnnnnnntttttgttttttttttctttcacttttttattttaggaaattagggttt

SEQ ID NO: 65652 - DNA, 629 bp, Cannabis sativa
tttataattagtcacaactttttacttttagtcacaagttttattgtgactaaaagtaagaatttttatagtgagccaccagtgatcaagcatcaaaaaagtattaagcaaattaggttaatgaacatctgacagagtcaaccctatcgatggctatcaatctatgatcttctaataaaaattagaacacaaccccattttcacacaaaaaataagggaaataatcaaacaaccaactatgacgagacacccaaaaataagagaattggataccactaaacacaaggccaatagacagaactggccgagaaagagacaaatatcacccccgccaaagaaaattgatccatacaatgaaatattgaaacaccaattgagaacaagacccgctccaatcgtcagaacaataaaaaactctaataataaagtagatcggtgacaaattaccatataatatagaaataaaattaacataaaatagcattaaaattaaaacaattaaaactataggcacaataaaggacaaactaagaacgaatcagacccaaaacaataaccattctccaccaaactcctaaaccgagaagatgatgataaacttttgtcacagatttgtgcccaaagcccaa

SEQ ID NO: 65653 - DNA, 3773 bp, Cannabis sativa
atatatattcatgggtaagtccacgttacaaaatttaaagaagtgtttcggtgcactttatatttgtttcagcatacagataagttatatagttaaatattttcttataatcatatatatcttaaaattatttaagaatatttataatttttttaaaaaaaaaataagattgttacagtataaaaatagtgtaagagcttattagtattttgtaaatggtataaaagtctataaatatgtaaatgtgtagtcactaaagaatatggaatgaaaaaatagaactttatttcaattgtagattggcactgtttcgaaaattgcatttagagtttggcgataacttgaagaatacatttggagtttggcactgactcgaaaaatgcatttagagtttgacacttactcaaaaagtgcatctcaataattaatattgtatcaaagatttatataattttttacacatgtgattatttataaatgtgctaagtacactgtttaaacctaataattttttcagcaccgtaaattattacaactaatcttaaataactacaacgtacgtgatcataaataaagaaattaagataaaaaaaaatatttaaatgttaaaacagataaaaatctaccaaattaactctttatttttatttttatatatatttatttatgtatatatattcctttatatacataaacacttatcataaagtcttcgaatcataatagtttgaacaaaaaaattgaagaaggttcttatcaatattttcttgatgtttactcatgcatgcatgtactggcagagatgataatttatatatatatgaatatatacatagtaataattaataaaatgtgtatatataatgtgacaagctcttaaagcatgcatcaacattttcatttcattttcatcgatccaatcattatattcagtgaatatatatatacaatttcaacgatatggaccatagtaattataaaagagatagtggtgcaagcaagaaaccctagctagctatatatatataacaaattatttttgttcactataaacttgatattatataattaatatttatgattatgtttgttaaaataaataagaagcttaattactttaattagagggttttgaattagggcatcacatggggtggtggtgattcatatatataaatatatatataattaattataattatataattataaaggtagagcctttcatgcatatcctgacatgtccaaatcatggttttcctaaacaattcatgcaacaccaaaccatgtcccctctcatcccttaattccacacaatatattaattattacctaattaattaattatctttctcaattgcagttataatatccttaattctattttattttgttaataattactattataattaagccttttaaaacgtgtagatcacaagtaaataaaaacatcttttaaattgaacacagtttagtcacttgtaataataaaaatgtctataattgttttttttttaaattaaaaaagttaaaatatatcgatgaattaaattacaacgttatcgggtaatgagaattcattttgattaaaaactcacttagttgagcaataaaattacattacaaaaaaatttatttttaaatataaaagtgaaaaattgtgactaattataaactatcatttttacgttgcgattaaaacattcgtgacacaaaatattagtcacaaaaatcacaatttattattactaaaattaaattagtaacagtttatacctataaatactatgtttagtcacaaaaattttattgtgattaaaaaattatcactaaaggtgactttttttatagtgttaaaggatcttggaaaagttgtatcccataaaagagctcataaggctcatataatgagctacatagaactcaatttctcatctcgaatttagtcccttaacaactttaataactgttataataacattccacagtaataaattgcaagcttttctccgcaataacctccaacgccaacaaacaagatacaacttcgccacatagcactagcataagggcaaacacttggtatcaacccaaagcaccttccctacatgatttcaagccaccatagtcagcatcattgccccctccctgaccgtcacattacaattatgtttaatctaacctatgggcagaagagtccactcagcgacggtaggagaaggttgaaaatgcgacaaattaaagagagtaattatactttgtataacattgagcaatataatcaataataatatatgctatatcatttcttgtatatgcactctgtcatttcttgctttctacatagtatcaactacgatacatgcatataaaaacacattatcaacttcgatttctaaacaggaatgagtctctaagaaaagtatctccataaaaaaaaaaaaaaaaaaccatgttacaataaagaaaatgatattacatagtttctataattgtttacatatatagattttagattaatagagagctgtatttgagagtcttagacaagaacagataaactagggttgtacttgtctacctttcaacttcaaattatattattatgatcattatttcccaataataagtaaacaaattttgctttgtaaaaagacacgtgtccatttttaattgaaagccaaatatagtaaatgaatagactttatttaatatatcattttctaaatgtatataattttttttttttataattattgctcaatattattgtctcactggtccagtccaatcaaatctttatttattctatatatatttttacttgactaagctatatggtattgtgtggaccacatatattaataatatggctctataattaacagccagatctgcttaattgattaattatattaatattaattaattaatcaattactatactaatatatatataagaaaaaaaaaaaaggaaggaaggtaatccatgtcttaaaagatggactcttaaaatggtcccagcaacaaggaaaagaaaaggttaaaaaggagtgattaatttaatctaattattatatataataaaacagtgattgtgacactacgtacatataaatatgtcacatactttgatataaattgatataaggggcatgagccacagaagaaatgcagagtttgtcattaattaaatagtactgaaaattatggctcaaaaaaataatagtactgaaaacttgtttaaaaaaagaaagaaaaaatagtactgaaaatgagtcttcaagaaaatgaagcaaaattaattatatctctaaaaaaaagtcataataatattaataaagatgggatgagaatcatagaaagtactcgaaggggatcttgaggatccttcttgtcatttatgtggttatgaaaaagaaattatggagcatttttttcttcgttgtaatgttgtttatcattcatggagatcttttgcatggggtttaattctagtaagtgataatggcattaggtgttgagattgggttaagttcttgtggggtttcaaatcaaggggtgtggagataccaacgagttattcttgtatgcgtttattgtggttgaaacattgtggaaggctgtgtttggccttgttcttccacgttgttagactgtcatttcaccttaactctcactagtacgatattatccgctttggactaagctttcatgattttatttttgggcaccttcccgaaagacctcatactgatggattaagtaga

SEQ ID NO: 65654 - DNA, 1053 bp, Cannabis sativa
aatttcagacaaacaaactttacccaaaaaaaaaaacaaataatttaagaaaccatgtatacctctgattctgagctacctttgagcgtgagagagagctatggagatgaggagttccactgagaaaacaaaatcagatctaaatccaaaaaaaaaaccagttaaataaatgtgtaatatagctagacacacacataccagacgaattagagagaaagagagagagagagaccacataccagacgaatctgagagatcgatctcgacagagggcacagtgaattagggatagatctgccggagaagatgaagatgctcttcaccgagaaattcagtaccgaacggaaaaatagaagagattcgggtgaaggagaatatcggctaatacgccaaccccccaaaataatacaatttatccttatatacttttttttactaataatacaggatagattaatagattgtattaaaaattagaataattagcaattttattcttttatttttgactttacttttttttttttttagaaaaatctgttaatattaaaaataagagtcattaataacagcagagtagattgtagaaggaattttcccaactaagtaataatttcattcaatcgaagagcaaatttaactaaagcatgagttgctttattagcatctcttttaacatgagatacttttgctccagaaaaagagaataaaagataagcaatatcatctactaaatcatgaaaatatattataaatctagtagaagacatatgattaacagcataggcatctaaaggggaatctgtcttaaatttgcagctggtgctcaattgcccatttcacactatagaacatagcagcagcctccatttctttgggagaaaagcatccacggataagctttgaaaaactagcaacaatagtgtcatcgtggtcacggattagagctccaacacctatgatagcccctgcttgatcccttgctgcatccatatttagcttgaaaaaatcagcagctggtggctgccatttaggcaaagaccttgcagccac

SEQ ID NO: 65655 - DNA, 761 bp, Cannabis sativa
  modified_base (47)..(53): a, c, t, g, unknown or other
aataattgattgtctctttattgatatttaaatgatagagattacannnnnnnagagttttatttagggcataaagttcaatagcttagactcaacccgtagtcggtgtctagatcttggaatcgtactaagacccgaacttggaaccatttcaagactaggacccaaatccagactcggaccctacacaaaaaatctaaacaagaaccggaatcaggaacctagaatatgaattggacataaaaaaatcggatcttgacgcgaaacccagcacggacccgacctagaccgggaccgatacccagacccaaacctgaacccgaacccagacttccaccaagacctgcgccgcaaaacccgaaacataggacccgtgacctgggtcctgaatcagatcccaaacacgtaccagaacccagactcagacctagacacccaaacccagacccagacccggactcgtatcagaactcggactcgaactcgtgactcggacccagaccgagatcaagagtgagacccaaacctggactaggaccaagaattgaacctagactaggactaaaacccagactgggaccagggacccgatactagaatgtgggacctgagaaccgaaccgtgacctagacccatacaaggccaatacccgagaagagtaccagtaccgaacaaggaccgataaagccaacgagaatgagtcgaatttagtaagcgataagtgatttatagcaatcgatatataataaagcaatataaag

SEQ ID NO: 65656 - DNA, 1596 bp, Cannabis sativa
aaaatttcattgggaagaaagaatcataccaaaaaaaaagaagaaaagaaagaaacgaaagaaaaaccttgcttagagagcgcaatggaagaaaatagcggtatggactctgtttatacccatcccatatatctttatcaatttaggcaaatatcagttagtattgggcacatcgaggaactctgtatcaatgaaatttgggcaatcgatcacaatatcaaaggctgagacgttcgcagcggtgcggttgatccggtaccggagaaaaacaactacatgttataataagcaatagtaatctagtgttaaggggtttgaaaaccaaacgtgtccgaacaaagaaagtgggacacgtggagcaatcccatgactggaacctttcagattaagccacttatatataaaagagtggtagagtgtagcagaatctcaaccacgtcggttgttcatgaatcactgacgagaaagcctgacaataaaaatgggctgcgctacctccatctcaatctcaatctcagcctcaccccaaatctcttacattatttgccctactgagtacccaatgttgcctccttttcttgcaatcccaaagtctagagacaaattcacttgttagctctcctgcttcgaaagccccatcatcgtatgtatgactactgactacaccttcttttccttattattctgtttatttagaggatttctctgttttcattctttatcttattaattggtttttattttgtgtagttgtttgcatcattggattctacctgcgtggtcaaattgatttcgcttttcaaggttggagttttgttcttctttatatagtttgcaattttgtgtggctataaaaaaaaaaattaataatttcattgtgtacatatgcgttttgatttgtgtttccttaaaaaacctggtgtttgaatatttgtatcattaacttgttttcttgttggtcttaagttatggttatatacacgagttgattcttttatcttaataattaggtataaacaaaaatattgttttaagataagtttttgattaattgtatgcttattgatttgatgaatgttgtcgatctactatatttcattgtaaatttagtttgtattatgtctatttttatagtcagtaattggttataggaagcaaagatggttaaaaattggatgtatccacaagataggaagagtaaagaatttattgatggtgtcaaatcctttcttgagctggccaaagaaagcactctagggaggcttgatgaagtacgtgtccatgtggaggctgtaagaatcgtcgtacttctaatttaaaaaccattgagagtcacttgtataggtacgggtttgtacctaattacaaaaggtggatatttcatggcgaagaaattgactatactacaactagtccacctgaggacttcaatgtgatgtttgatgatgacaatctagaagataatgtgggtcaaccaatgtttccaaacaacatttttgaggatgagttacttggtggtgcttgtgaaggtgagagaagtgaatctgaagcaatcaactttgcaaatttgtttgctaaagctcgttcactttcttc

SEQ ID NO: 65657 - DNA, 1114 bp, Cannabis sativa
ataaaaatttggaattttcttttttttttttgaaaaatctgccctgaaaaacgacacgtcgtttttccacatttagtggaaaacgacacattgtacggagtcggactcgaaaaaattaatgctgaaaaacgacatgtcatttttcacataagagaaaacgacacgtcgtatggccttgggttcaaaaactttatactgaaaacgacatgtcattttccacataaggaaaaaacgacacgtcgtatggagtgggctcaaaaactctctactaaaaacaacatgtcatttttcacataagaaaaatgacatgtcgtacggagtcatctcctacctccagtcaggtcacttttgacccgtttacagcacgcgggttcgacagacccgacccaaaacccggccaaaaaacttttttccgacgtccataattcatgaaaccaattctaaaatgatctaaatgaataaattaagagatccatattgatttcaagcatcaaaaacacgtaaacagtagactttaattttataaaacattttcgggtccaatcgtgtttttaagagaaatttttcagattttaatggttttcaaatctttttcatgcacgaaatcactctataattttatatgaatgtgatatagcattaaaaatttgaaatatacccacatataaatgaaaataaaattttcatacatataccgtacatgtatatacatacttatataataattttatttcttaaaaagctataagaaactgatataatagattattctaatcaatttcatttaataaaatcagagtttttattgaaagttatatgcaaacatatataatcaaaatttaagtatttatacgtgtgtatgaatatgtatatgcttatatatataattcattttgatagatagaaaaatattagaattgatatatataacaattctaacaacaatataatcaaaataaaagctcaagataacatctatttgtcttctatgttcttcgacaataatggagacggcactgagctttagactaaaccaaaaagcaatcacaccaagattaatgtcgatgatgctcttttcctgcaagaacgatcttatggttatggtattgttgcc

SEQ ID NO: 65658 - DNA, 630 bp, Cannabis sativa
taattttttattgataatattttactggtacaaaaagtataaatttaataacacatcacgctaaaagcggatcatatatctattttgaaaatatcataacttaaaattttttaaattttatctaaataaaattatttaattgaactatttaaatttcacaaaactattttaaaattcctaataaagttttagagcttctaaagaaataaatagattagttagtggaaaattgaaatgtaactaataatctaaggaaacacttcttattgtcttatagagagaacatgccatcaactattataattaacattcagtattatagctctatcatgctacacttgctattattacatccttttgtaagttcatttgtaataagtaaaattgcaagcatgatcttaaaactaaaagaataatttaaattgatatttactatatatatttgggaattacatgtattattcaatcataatcatcaaaacaacataatacttattatactaaaatgatttaccttgtaataatttggatagggccaccttttatcaactaaagtgtaactaaacaactttaaaaaaacaaaaaaaaaattaatataccaatcactttataaaaattactaaaatatat

SEQ ID NO: 65659 - DNA, 870 bp, Cannabis sativa
aaaagagctcaagaccggctgtctctaaggcatggactttctctcccagcctcgtcacctcagccgtaagctcctcctccttagacttcttctcctcttccagccaacaaagaaccgctcgaagggatgttctttcatcttgaaggctgttcacttctgcagataaggtctcgatggtctcttcaagtcggtcaaaagcctcgagatccttagtcagcacagttatttttttttgggcggtaaaaagcttcttgttgacttcacccagctccatctgaaaagctccaagttccaccctagcgtcctcagcgtccttcttggccaagtccacctccgccctcgtggtgttggacagagccgcgttcctggaagcagcagacttagctcgggagtatgtgtaagccaacttcagaccagcctacgacgagaaaaaactttagaatccgagccaagtaaagaggattaaaggaaactttgaagaaaaacttacccttgttaattccttcaagactcctcccatcagcagctccaaagaagagtcgttgtcagcaccggccagttgctcactaaccttaggaaccaaccggttcatgtagtgggcgagcatctccttgcctttcttggcctctggaagcactggcaaaggaggagtaggagcccgcatctgctaggatccacccttgatcaactcgaatccacccttgatcagctcggatccccctttaggttcctcaggcctgtccgaacttcctcctcgagaatccttagacttagcaacttttggagtggatgggtttgcaacagttagttcctcgaaaaggctaataacctccccgggaggtgccttttcctttgaagaggtcccctcac

SEQ ID NO: 65660 - DNA, 862 bp, Cannabis sativa
ctcatgtaattaattcaaaactataattaattcaaaaccaaaattaagtaattaattcacaattaattacccacaattaaagaaaacgataatgacaccttgaacatgttcaacctacctagtcgcaagcttatcgcctaatggtctcggcctcacgaatacaatcctagcttgtctatttctcatgtaaactccccattagagggaaagagaaactaagcataattcttgtgagcactataaatactcaacaaatccttcagattaagggttgaactatcttgcaatattatttgctcaagcaaatacaaagaacatatatttagtatattcccaaaggcttttaaactaaaatacacaataatatagaatcgtggactaaggctctttaatgccccaaccatgcaaaagactccaagtgttattctatttctctctttgaattatttatttcttcaattcgaatttataataattatttttctaaaaatctcggttagcattttagtacttttagtgagagttaaagaaagcagtgataccatctgaggattacatatactaatcatggtactcacctaacataaatttggtcttcattatattgatcctaatgctaaggttggggatacacaagatccaaaagaggtgaccagtcgctacaaggacaatgtgggaaaactcaaaatcttgacaatcccataatcaaagatgaggaattagatgagaatagttctaaagatctcaaaaatgatgactaggatacaccaaaagatgatcaccaagacgtgcctactgatggttgtgctaaaaagaaggatgatctagacaagtaaggccctgtggtcataatggccaagaa

SEQ ID NO: 65661 - DNA, 1264 bp, Cannabis sativa
  modified_base (971)..(977): a, c, t, g, unknown or other
attctatcttcttctcccactccatgtatgcttcaggatcactctttcctttaaaagcatgatttttcatctttatatttcccaaataattatctacctggttcctagcttctctatcccgaccatacctcttatggttacccgctggcatcccatcaaactcttcatcagaaattatcccttccccatctacttcattatcatccctttggtgaaccctgttcttgtagggcctctgttgggttccctcttctaccctatctaacctcgcatgtatttgttcacactcctctctcatcatcctcctcatttcacccatcaaagcttgaagttgtagatttggaaccgtagatagtgtagttttaataccggtatattcttttggaacttttaacatgattgaattctgcaaaaataatgttagaacagcttaaaaaaagatctcatcacactctctcaagtttttcactcaaaataatttgtcactcaatttcacttgtgttttcactcaaattcgagggcttttatcctcaaataagctcacacctctgcctttttccacttgtattcttctgtaagttctttaaaaactaagcaaacagtacaagagaggaatcaagcagcaattccaaccaacaaaccaaacgaacaccaatgaaaactaaaaaaaattgatgatttttggaatacttgtgcgggttttgggaaacaagcctttagactatggagactaagaaattacaaaaaaaaaaaaaaaaaaaattgaagagaggttttttttttctcttggtttcctttccttttgtttttattttttttcttttttttcttcaagaattttggacttctagcttactaatgacacaaagaaaatgggaaacaaagagataggtttgtgaaataatttgggaaactaatgagaaacaaaaataaggaaatagatttgtgacacaaatagggaaactagaatnnnnnnntaacaaattggagtttttttttttgaattttcgaattttaataataaaaaggaaaattaatgacagagaaaaatttggaaacaagcaaaaatcaagattattgaatttttgatttttttttttaaaatttcagatttttttaagaagaaaagaaaaaaaataagggaaactgatgacagcaaaggcacgatgtttgacataataaaatcatcagaatgtggttctaatagtttcaaatttcacaaagaaaaatagaagagatgacacacgaattaacatgaatatag

SEQ ID NO: 65662 - DNA, 820 bp, Cannabis sativa
gaatatcccaactgatctgttatcttgtttggtagcagagtttgaagtttaataaaacttatgaatatttattcaaaaaaaaaaacaattatatatacttttagggatgagtgctaattacaacctcttagtcaaccttcacgttcgataaaattccgaataatttaccttactgaaaacaaaattcctgatatttgagtttaccatgctcattcaaaaaacatcaaacgtaatttcggcactgtaaactattcgaaatttttcaaaaatttacagtgattatgttgtaagcacaacgaacactcccgtgaaaaaaatttgaaaaaaaatattccgacaaatattttcgggcataaaggtagactaagaggttgtaataagagattgatagtaacactcctcgtactttaggtgcttgatatattttattctaatttatttcagtaattttatttgtaaaatttttgtaaaatttgaaggaatttgaaatatatcaaactttcttttcaacttgttaaaatagtttgaaatttttaaattttatatttaaaataactataacttaaacaattaaactagaaactaaaaaattctagtgaaatagataaaattacatgaatcagtgatccattttaagagtgtatatatagggcagctaatatatatttggctaattaagaattttttctccaaattttgatatgtattaaattatgcccttgaacttttatggtagtaaaaaattcctcctaaactattgagattgttataagaacttttgtctaattttagtaaaaaaattttaacatagataaaagtt

SEQ ID NO: 65663 - DNA, 1885 bp, Cannabis sativa
ggtcgaggggtcgtgcgggtgtgggttcgtgagtttgggagagggaaagaagagagagaatgtagttagagggaatgtgggaagtttgaaatgagaggagtatttttggaagaaaagaaaaaaattggtatattttttctatgtgttataattaggtataatttaacaccattaaacatttttaagcataaaatgtcaaatttcccttcttatatctaaattctgtaattgtcccacaaaaggacaaaagattacatgccacatgtaataactccactttaaatataaatataggtgtcgtatgtccgtacattttgtcggcctttactagagcacgagaaaagaagatggatttgggcctatactatatataatatatgatgtgagtggtcactttggatacaaaagatatattcactgaccgattcaaaaagagttttaattggatacaaaatacaaatataataatttcgcaagagacaaaagtacataatttccaacataaccgcgtcaagcgtaccaagtctaagttttccttgccctatgcctgcctatcatttcactcggcaaatcctgcccctgtatcacataaattgctcatttcctccaaatctacatatctatataaataacttaaatcaaaccaaaccaaaccaaacaagaactagacacaacaactcttaaaaaactaaacaacaacacactgaaacttccaatccaaatgacaccaatgcatgagcaggagctgccaccgggttttcgcttctacccaaccgaagaggagttggtttctttctatctgcgcaacaagctggattcaaaacgcgaggaagtgaatcgtgtcatcaaagtcatagacatttacagcatagaaccatgggatctaccaagtacacaattcagccaattcttttctatatagattgtttgttgtgatacataaacttacatacattttcttgttttttgcagagcattcaggtgagttgtgtcagggagatactgagcagtggttcttctttacaccaagacaagaaagagaagctagagggggtagacccaatcgtactacagcttccggatattggaaggcaactggttcacctagctatgtttactcctcggataacagagttattggggtgaaaaaaacaatggttttctataaaggaaaagctcctacaggaaggaaaaccaagtggaagatgaacgagtatagagccattgaggaagtaaacagctcaaacaacatcactactccaacggtaatgtatagctatataacaatactaactatgaaacaccttccatatctaattgttgctgatcatctctaccatgtcattctttcttttcagttgagacatgaatttagcttgtgccgagtgtacattatatctgggagttttcgagcatttgaccgacgcccaacagaatcaacaagagtcatacaagaacaacaaagggatgaagcaggaccatctaatcagaatgctgcaatgatcgaaagagctcaaagttcgtctgcaacctcaagctcaggagaccttgtagataacccaatggctggagggagtagtactgattgggaaatgaatcagcagcctctttgggatttatgggaacaatttaactggccctaaatgaacccatataccccaacagccacagcaatgtctgctcaaagtttttaacataacaaatcaaacttagatatagtaccagatttattctttctttgttatatacgaaatttgactttattgagtttcaacatgatgtcgcatgtttatgaaatgactaattagcaatttttcctccgacgaactttgacatgtactaaattatgccccttgaattttttttgccattaaaaatttctcct

SEQ ID NO: 65664 - DNA, 995 bp, Cannabis sativa
ttgtagtgtagtttatttttcaaagaaaataagagaatgtgtcacaaaataagaaaaataggaagaaaaaaaagtaaaaagccacctaaactcttattgtgcatttctttatgtatatactagggaatggatccgcgcttcgcgcggttttaataattttttttgaaattatatattttaaaatttatttcttagttattaataaaattaaatctaatacttttcaatttttttaattatttacttatatacatacactaattaatgtttatagaaactaattattaaatgacaaaattataaataattaagaaaaattatcaagtgtataaaaaaatgtaaaaataattttttagatatctattaaatttaatcacttaattgagcaagatttaagtattcaatcacttatataaaataaaagaaaaatactattaatttttggacaaattgaactgatcaataaagaaatgatttacttataaccctaacataatttgtaaatatgtaagatttttacttaaacaaattactaagatgatatattaatattcgatgtatacaaaattatataaaaaaaccacaaactcactaagagtttaataaaataaataaataccacaaaataaaaagtaggatgccaccttattaattaatttgtactttctaaaaaatcaaaaatcaaattgcttgtatgtttagaattttatttgtttttcttttttagaattaggaaagaaaaatattgtgcttacatgtaataaaaatatatagtagaaagatcaagagtttgagaatgatggacaatgatgaatagagatgatagtaactctctttatatttgtttggtattaacttatagataggtataaaattgaaatataaaattattatgttactaattataaaatgtatttttattttctttaaagaatatatgtaaattgattgattttttttttttttgattgtatctctcatcttctcacttttat

SEQ ID NO: 65665 - DNA, 1589 bp, Cannabis sativa
tgttggaattggtcaaatagttaagatttttttaagtacaaatgattagtggtactatagtcctttgagatgtgctttaaaaagttaacataaattcacatgcatgattgtagattttgactttgagttagataattaaaattgtgttatttagtctacaccggccatttatttagagtaaatttaaggttacccaaaaagtttggaataaaatagagtacttttaggaaatgtataacatgcttggacgatgtatcgcttggtactgggtgacaagttgtttgggaggtatttgcctggaataggctttgtgaaatcttgaaattacgaatcaggcgcttcaaagcagcatacgcgcacctagtgctagcgacatgtcgcctggctataagtatgatattgattgaggataaatttaatgacggttcctacaatatataagagtttatatatctatatattgagttagaaagactttagtacttgaattggttcaattcaaaagcttgaaatcccaaaatttgttccatgagtgcaaaagtcacaagcaagtaattatttaggaggaatacaaattttgacaacatttcatcaatgtggcaattaattaaaagattagatttgattttactataaaaatagttaccttgataacattttagttataacataatttttttttgattaaatatgattttttgtcacattaaaaaactacttgtgactaaaacatattatttagatataagttataactaatttatttttagtcgcaacaagtattatgactaaaaccacatttagtcacaataaattatgatttttgcgattaatatatatctttagtcacagatcttttagttacaataaatgacaatttataattagtcacaatttttttatttttaatcacaaattttattgtgactaaaagtaattttttttagcacttctcaacttaattgggtgaccacactacaagaaatgttacttttgccagcacattttttatcctggcaaaagttagtattacgctagtaaaattaaatttacttatgatgtgttggcaaaaggggttggcaaatcaatattggtattagaacttttgccaacataaaatgaaaagtgttggcaaaaataactttgtccagcgcgtaaatgtgttggtaaaagttagattttagccactacaaatgtacgctgataaaactttgacctctttgccagcgcagtttacaaaatccgctggtaaaagttacttttaccagcgcagtagcgaactgtgctggtaaaaatgatatttcttgtagtgccgatcttataacctaatcccttgataagttgtgtttcctaatcactttgttcataacacttgtgcttgaattattagaaatctcaatattgttgccaatagttattatcccatgataaaattgtataaaaatttggattcaaaaattttaacgcgttctaattagaaacgacatgtgtaagcatatcgtaaggtttatctgtttataaatatattgagatcatacatatttatattttaactccgttatttaatcatgtcgtttgtgtttatgttg

SEQ ID NO: 65666 - DNA, 1184 bp, Cannabis sativa
accactcaggtggacaaaatttggaataacaaatatctattgaataagttcattttcaagcaaaataattatgttaattccattaagaattggaagaactcttttgataattttaatactagaactaacaccattaataatacttttaatgcttattactctaaacttcctctttcttataatgataagtgaaattttatttttataattaccaagtgaaattatcaaataatttaaataatgtggaactgtagtaaaattgtttaaacaaaatttaactatgttctatcagatacaaaatctaacagaaaagaaatatactgtaaaaagtaaaattgtagaaaataaaatgacacaatattttatatgtccaccgggccacgcccaaagaataaaatttattagatgaatcttaagagattataaaaccaaattgacttatacaaataaagactctctctttgaatttatcgcaactgttgtaatctattcttcaaatcaaatttttgacgtgtcgagaccttgaactcccttcaaatagtagcacttgcacacttcgtcttaaaagtgactcacttgcaatctttctcccgaagagtgtctataatttgcactttttctcccaaaaagtgtctcacaaacaagacttctcccaaatcttgatgaatgatattcaaggtgtgttaacctgcacaataatttcatcaacaagaaacaatatagaataacacaataatagaatactaagaacttgttggactcaagttcttcacacaacaaagaaactctctctaaatttgaaagtaattttagacatgatacaccaagagagataaaggaaagcaacgtcttgatggtgtatttatacactttagaatccctctaggtcgtgatcaaacaactaagaaacaatcaggtcaataaatagaaaatttttccaaacagaaaagtcagatgctgtttaaatagacagtcagtccattaaaggaagtacattgaatctggatagcttttcaacaaagtttctcaaaacaaataaagaaactttgacaacccttacatacacagttgtatatagtttcttggttaagaaatcatataaaaaaaataaagctaataagtacttttttcccccgaactttgacatgtactaaatcgtgtcccttgaacttttttggccgtta

SEQ ID NO: 65667 - DNA, 2628 bp, Cannabis sativa
ttgtgactaaaaatcacatttagtgacaaaaaatttatgttgtgactaaaaaattatcactaaaagtagctgtttttttgtagtgagtggttatcacataataggattttcctagcgcattaatacacttttaaaattttgtgttttagaaatattttctttttaaatttaatttaaatttttttatcaaatttttttcaattaaagtaaataaaaattaaaaaaaataaaacatgaaaacttaattataattagtaattaacatattaaaccatgtttgttaataaaatccacacagtaggaacccgtgttagcacctaaaacttgtgtatgtgtctatgttagttagttttagttgaaagttattgaggtaatcaatctgtttgaacttttagttaagcattgtaatcttaattacttatatataaacaaaggctttcactggtagaattcaaaatcctcactacacattgtagttaatctattttaactttcgattaggttctgcctgagtcattacttccatctgagcctaagtctagctctcatggctggactttagcttcactggttttcctcaatgcaacataaatttgctgcacttcaagctgtaggaatttggactttgatgccttataggctagatatgcatctcattgggaatagataggttcttcgagtgaaattaaaagctaatggttctttagataaatttaagtctagacttgttgctaaaggctacctacaaacacttggaattgactttgaggaaatattttgtataagggtgaaacctgttactgtttgaattgttctctctctagctgtctcttctcaatggatagtcaaaaaaatttgatgtaagtaatgcttttctcaatggactactgactgaaattgtctttaattatacaacaacctccaggtttgaagatctaactaaacccaatcatgtctgtctattgcatagaactctctatggctttaaacagattcctaaagcatagaatgagaagctcaaaaccaatttatttcagtggggattccaagcttctaagtatgatacctctttgtttatctatggctcatgtcctataataataataatcattttactagtttatgttgatgatattctaataaaaggatcatctaattagattctcatttcgcaactggttcaagatttaaacaagtctttttatcttgaagtcttaggcgatgttcactattttctaagggttgagatttttagaaattcttatggtatgtatttgtctcagactgagtacattactgatctcttagtgaagcttcacatgtaggagcttgtaacactctaatatgtagagatgccatatgtatgtacttttattaattagtttataataataaactaacaatttaaataaaattgtgatttaattaaattattactaattattttgaattacaaaacttatgacatcataaatttttaaagttgcggatcacctttaaaatttacaaaaggtgccactacaatattacatcaaaatacatgtaaaagtcaaaagcgccatcatgcaaaaatctcgacaactcgaaattgctagttggatgagccgatatgtatatttaccgaggaagacttatagctcacgactgtcctaacttgccctttcccttacctgcatcataaagtacccgtgagttataaagactcaacaagaaacgcaatatagcacaaacattacatatcaatacataaacatatccaagtatacacatttatgttagccattttatatgaaaacttgaagtatatataatcatgtataaatatgcagaataaacgaacatatatacgatataactaaatgatcgaaatacctctagccattaattctttgagcttaaatcccacataagctttggatctgcaaagaaaagaaaactgattagtgtgggtaatcgggcttccaagctctctttactctctttaagatttactgcattttcacagaatgagtagtgagctcaggaatcgagaccctatatttatacataggtgagatcttccattaaagtctctgccacaattaattgtcagaatattttgacaattaattctcaaaattaaatcgagtaactaaaatatttggtgaatcaaaactgaccatacatagaatttttaactttatcacatatttaatttgtgattaaatatagtgaatgtgaaaccaatgttatcttcatacgtgtaagttaaattaattaattttgtacacatataaaaaatattctaatattctcctatttggtcagcacttaaatttatctcttaaacctaacgttcctcattacataacaaacatatgaatcatagcgataggtccttattttatgttgagaattatcttttatgtattacgatatatttattacataataatatacttaatgtgacaatatatttaagcgaacaaactctaaatcttatgtttattatgatcctcttacaataattttttaagataaaattaaggtgcatgtgaatataaaaaaatattaaaattagagttttattgaacaattttagttgtataaccaaaaatcgcataagggtaactgaattctatatttact

SEQ ID NO: 65668 - DNA, 1223 bp, Cannabis sativa
cgagctgcacagtatgtttaaaaactgctagttagggtgttacaaagctactcccacgtcaataaataataactcctccaatgcgaacacttccaacaagagaaaaaatgaccatggtggggaccacaacaatactaagaaagggagaactaaccaacctctttacaccatcttcacagagttaactgaaatgccagaaactattttcctcaccaatgagcaaactgtgaattttagagttctagatccgatgaaaggaatcgggaaaaattgagatacctcaaagtattgtcgataccacaaagacattggccacacaaccaacgagggaaaagccttgaaaatagaaattgaagatctcatccgagtctgaccacttgctcgttatgcgtggaacaagtagggggagaactcccaagcacaagggcagacccaaaacaatgcccaatccgcagcaaacaatgcgcaagccccgccacaaggccaaaatatagatatggcaccaccattagaaggagatgatgtcttagtaattgctggaggtccacactttgttggaacaagtagtgggggccaaaagcgctacattaatgaactgaaaagtaataacaatgcacaagttcgaccacctcaacgtcccacaaaacaaccccatacagagagacccattacttttaatgaggaagatagggaccatgtacaaatgccacataatgatcctttggtgataacactcaaattgccaacaagagagtgaggagaatacttgttgacaatggaactggggtcaacttattatacaagtccacccttgacaagatgggactcgagactcgtaatttgaaaccatgccccacatatctatatcgatttacatgcgagggtatagtaagtaatgaaaagataactcttcccctcataatgggagaggccccacaaactgtgacaaaaatgacaaaatttgtcgtcgtggacattccatcagtatacaatgtgataataggaagactaacacttatcgcactagggcagcaacatcagtgagatatttggctgtgaagtttccaacaagccatgggaatgacatagtacgtggggatcagttggcggtaagagaatgcaatagcgttgtgatgaaaggacaaccccaacttgggactcaacttttccaagccacaacctttaaacacgcttgccaaagtggctaggagaagccatgtgga

SEQ ID NO: 65669 - DNA, 842 bp, Cannabis sativa
aacagatagagatgtatcagtgtatctcttttaaggggtgcattatagaatttcccatttttatttttcatctagcatattttatgtatatatttaaattttaaaatcttacttattataattaaaataaatttatgctttaaattttttattaattattgtaaggaaacatttcagtttttatgaaaatagttgtgatgatgcatattaataataacacttaattgttttaaaaaaataacaattaatcatttattttttattgtcaattttatatttactaactctatttattatacacactattccacttatattcgttttttaaatgagtttttatgatgtttttattttaattctatttcagacattatttcttttttcaaaaatatacatgtaatgggtacccgatgagaatccttctcccgtcgagtaatccctaccccgctcccgctttaatttaaacgggtattggggcagaaatggggtgaatttagaaagcgggtatggagtgagagagcaatccccgccctgtttacatccctaatgctaaagggcactcatggtgtctagtatcacttaaggcattgttattgggcaccattggtgctcaacacctttcataagtgacaccctacaattagttagctatattctctaaaccttattttcttaagttatatgaaacttcttacttaattacactaatagtggtatgacactaagaaaagtgataggcaccaataataccttttagcaattctctaccacttattatgaagaatcatatcactaatagtgcaatttaataccaaattttacttattttacttttaataata

SEQ ID NO: 65670 - DNA, 605 bp, Cannabis sativa
tgtttgtgacaaattacaattttaattgtgatgaagaatagaacctaagttaaatgaattatatgcttcattgatttgttgcctaaattagtctatttccatagatctcaaagttttatttaagttaaataaattgcatgcttcgtgaatttactgcttaggtaaaagagttaattattgagcgcttcgccttgattacatacaatagggagattgggataattgactgcttcaactttaattgcgggattaatagtttgattggaacctgaaattacattcatttataggaattaggaatgattgttgagggtggtgaataacctttaactagtttctcatatcgtagtctcaactttgttttgcatttatttctttttatgctatttaattacaactcaacctcccttttaatttctgtttgatagtgaataataaagtaatcatagtcctcgtgtgttcgacccgtacttgcttttatactgaaataactgaaagtattggaaaaaaaatagtaaatttgatacggcatacgacacgcatcaaataccaccaacacttataatgtcagaacaataatcagattgagttgagagagagagaga

SEQ ID NO: 65671 - DNA, 1228 bp, Cannabis sativa
actctattcatggagtgtggaggccgacttgaaagaccctggtgtgaactcttcaacaagttcttctagattagatgttcgttagtgtaatacaaaaagatagcgatgaaactctgataggcaacaagaggtaagaatctctaaactaataattttgtttgtgttatgtataattgtgttgagattcgaggtttatggttcatcttggattcaataatttttattaaatctaattttattctcttcagctgcgactttgatatgaaccctaaaaagatcatctctacaagatggattaaaataataactatctatagattaaggtacgcttccgctatttgagtttttctttttgaattaggtattatttagatctatgactatacacttgtaattatatgtaatatatttatctatagaatcagatattgttattgcatattttatgagtaatgaaaaattctaacaaggcatacattccctattgattatatacaaatacaattgttatgtctttgttcaattttatatttggtatgtcttaagttttttgtgagtattttgtagtcgtaatttttctgttcttagtattgttatgtttttgtttgattttgctttttgttaaaagattgttgactttcacatacagtttgacgaagatttggagtttctgaataagataagtttttcatactctttcttttggtgcaattaatttttgagatttgttagtttgcttagtttattgtttttcaaacatttttcttttaacatttttataggagctcttattgtcatttatacaaattatggggacatgttgatagcatcatagcaatttgcactaaggagattagcagaaagtagattttgtagctgtaactcgcatatgaactgccttttacattctttatgagatgattttttattatttggatatttcttagatgatttttgtaacaccccaactagcataggcgtgttatcgtgattttaaacatattgtccagctcgttgctaatcaacgaggttattgaaaatcgtgatcaattaaaattttcttatttaattaaaaacttaaggtattacatatataatattttgggatcccgtttacaaaatactttataaatgtttgctatacatataatcaagagtttgtcgcccagcaactaatcaacaaaagctcagatgtcccgaggattgtacgctctaggcctaaccgccc

SEQ ID NO: 65672 - DNA, 1571 bp, Cannabis sativa
  modified_base (284)..(291): a, c, t, g, unknown or other
ttgtaagattgtgttcttgtagttgtgtgcggtggcttggttttggtcggtattagttgccgaatttcgataataaggtaaaaatctaaactttagtagtatatatgtatgtattttgtgttttattgactatgtattgtatgtacacatattttgtaattgtatatgtatgtataaaaatattataattatattgtatatacattttttatgtattgtatatgtatatattgaatactttaaactaattgttttgttaaatattgtgaataagaatgagatannnnnnnnttaaaacaaaagtttagaaattaatttttaaaaaattactttataaacaaaattttaaaattaattatattttttatcattttttatcaattttataaataaaagtttagaaattgaatccctactttagccggatcgatttgttggatagagaaaatcatgggatcctatattccaaactctctaatttatctttcttcaaaaaaaaaaaaaaaaaactctctaatttatctcctatattgcctcgatagatgtaattgtatttctcctataaatagcgagatcatatcactgtttagggtagtaaggtcatatcactgattagggatccttctttcacattctaaaagagcaattaccctgcaaaaatgtttgtacgctttttcaaggattattaagatccaaggttaagtatttgaatatttttcttgaaattttcaagttcattatttaatagaataatttttttcatcttttaaacgaaaaatagcctcatgttctttaattttcaattcaagagattcaatttgatgagacatttatgaaaaataacatgtatgaagtaacatgtatccacttttcatacatagccttgtatgaaaaataataagttcttcctctttttctttgcttatttttatcttatttttttgaaaatccccaaatacaagagcaagagaattcaaagtcctaattctattatgaattgaatgcttgaagaacagaaacaactgtctaagattatcaaaattgatgcccatctgcatgtagtttcaagagaaatgggctcggttcacgtcatcaagtcaactccacacaagtgtaaagttgacttgggggcaaatgttaacctgaaaaattttcctgtgacgtggacatcattgtttgacacctgacaagaaagatgtcatctcggagttgagtagtccttagtcatagtagtcgacctgggaggggtacctagccctatgcccatgttgactttgagaacttcggaatgaaagtttggactttgataactcatttccaaattactatcttttactattctgcaagacatggagcaaccaaatccaagccccgatagctgaaagtacacaaactagcactttggaagtcaacttgggcacctagggtttcacccagtgcccaagttgacatcctcaactatgatttcaattttcgggaccttcttagtgcaaataggtcaaactttgcattgggacatgaactagacatactaagaacatatttgaggcatcagaatcagattcagagaa

SEQ ID NO: 65673 - DNA, 1097 bp, Cannabis sativa
  modified_base (618)..(624): a, c, t, g, unknown or other
aataccctgacataagagagtcacatggagagtatcttgaagtgagatgggcaaaatttgtataatgtttaaaaaaagaggaaaatatgataaactttaaaaaaaaaaagtaaaaataaaagagtacaatataaaaagggtatagaatgtaatttattcagcgagagaaaaagagagagatgatgagctaattgggttaggcccaaattcgtggtacccagcccatgcgcatgaacacttgtctacagcaataataacaataaacaaataaatagaggaaattagattctctaccatttttatattgtcctcttttattttcaccctcttttttaatatccatcatttttatctttttcttaaaatattgtaccaattttgctcatgtcaattcaagatactttccatgtgactcctttatgtcaagatattttgggtacaatacatataaaaagatgtatattttaattaaataaaaattaaaggtaaatttagttaattgattaataaagaagtattttttaacttaccctaaatatagggtttttttataaaaaatattagatttttggccaaaatttaaattttactatcacgaattttttttacaaaaatacnnnnnnnttataaaacaaccgtaaaataataaaatagaacaactaaaaaacaacggtggaacaactgtgaaaatttacacagtatttttttttaaaaaaattccgcctaatagtaaaaagttaaaaagttaaaaatttcaacatgtggtgtaaaaccctataaatatacgggaaatattcatccatatgaatcttatttttttaaaaaaaattaccaaattatgcccttttttttggaaaaaaaaaatatacattttgtggaaaaaaaaagggttaagaagtatgcaaaaaaagtttagggtaactagtaataattagttatgttatagagcccgtttggtacgcaagactagattggattaaataggctaatttgtcaaatccagtgtttggatatgttggaagcctggataactaatccagctaatctcatctgtctggactggatgggataaataatctcaggtgagattttttttt

SEQ ID NO: 65674 - DNA, 828 bp, Cannabis sativa
attttcagatatttgttaattatagttctataattaatacattaatttatcttatacttgtattttatatattctctaatatattctcttttaaatacttgcttttggggcataaattctaataatctctcacttgcactaaaagtaagtgcaacacctttcataaatcttatagatgttattcctcattcgactattcacgttgagtcttaaggctttttacataatgcagttactgatttcgaaggccactatattatcaattgacaaatacacagaaattaattttgtatattttacttatttattcttttatttccttcaggttcacttctcttgattaattatttaatattgtagtaatattaaatattaaattttattttcaaaagtttaaaattttaaaaatgattaatcttgaaccctctattcactacagatctaagctttagaaactgtttttaaggccttttagtgtcggttttggtaaaattcactaccgacgctaatttaggcaataccttgctacaaaacaagaatcaatggttagatagttgaacagaatagacatttaattccattgcaataaatattaagatttctaatctcttatgtgttatttgatcattttaagagttttatatttatgttagattattatgtgataattttaaacatacatgcttagtaaattaagatcatgtttaaaataagttctaacagaaaaaaagtcatttttctaaatcgtgcagtaaaaacatcttattattaatttaataaataaatattctccaaaaaagaaagtgaacatcacaacagctagccttt

SEQ ID NO: 65675 - DNA, 1306 bp, Cannabis sativa
  modified_base (1226)..(1253): a, c, t, g, unknown or other
agagagagagagagagagtttagacttagagttcagcttatgacttcatacttcacttaacacttagggttttagggtttagttaaggacctttatataggagagcttaaaactctttaatctggtaaaataagcagatatttacatattaaattagtgaaatacaaatgactgaaatgtcccttaaaatagatattttctctctatttttgtgggctattaaggcccaattggcagtctatcttaatgaccatgcatgaaactatacaccaaagtcctgccaggccaatctctggccggccatgcatctgcagatgtaggctggctagccttatgctgtttaaaagctggctggccggccaatctccttgaggtggctggtctatcattcattatcttgtttgagtgtttggactccctgttaattaaagtgttgagtagatgacttggccttcttattgatagttgtactgccacatggctctgatattgaccacgtagacatgccacgtcaggtgggcgaaaatcgggataacatttacccctcaagtccctgtgcaaatgcatgtgctgatagggactttctagcttagttgagactaatattgccttaactgagtaaatattgatgtatttttagtctttgaaaaaactattcttgactgtctaatctcatttgatgcagtaagttaatttcattgtacttctacatgctttttagttgaacaatgcgtggcaagtgaagaagtcgtcccatagaagtacctaatgtgtgccagtgggtcttctcatccggtatacatctttcataccggcatcttgaacttaggcaaggataaggcatttatgtatttcgagaatagtgatccccttgacctgtctagctcaaggtctgaaggttttgaacaagttaggcccttgatcatgtcgcttattttgtctaattatgcttgcatagaaggatccgttgctgtagggacttggctgatttgctctccttggatgggctacaggctcaaatgtgctagggtttggccggccatattttgggagagtgtatggaggaggtcggccagccttatgtagtgttgctggccttggccaaccactcccaggtaggaaggttgatcttggctgtccaagcttatgttgggcagttgttcatggctagccagccctgttctagctaaggcctggtcgcctatgtgttggatatattttaccannnnnnnnnnnnnnnnnnnnnnnnnnnncattaacatcctaatatgaatttaaaacaatgaaataaacacatacgagttta

SEQ ID NO: 65676 - DNA, 680 bp, Cannabis sativa
tttttttttaatctccacattgggtttgggctatattttgttgtcacatgagacacattcaatttaagtatagatattaatatttgacttttttgaatggtcaggattgaattcttctcaatttacttttgctattcattagaaaagaggatgtgtagatcattttaatggttgtaaactggattgctttggcaaggctaacttggaaagattggttagtgagcttggatatgtgcttcccattgggttttggttgagaccgaaaggagagacattgaaacatggtaagagactgctcacagaacaagatgtggctgatatgttacatgatatgcttattaggaattacaggtttgttgatgtgtacctcattatgccagagaagatctatgaatttgaaaatgagattgttgatgctctagatgaaatactcgaagaggaaccagctgccagtcaacttacaaagcaaagtcaggcccaatttaagcttggtttgggccaaacttcaagccataaaaatagtgaagcccaatttgaacattatttggaccaaacttcaagctatagtgaagcacattatggcattagtgcacttgaagcccaagctgagactgatttgattcaaaccaatgatgaggcaaagcttgaggatgatgatgaatttgttgaagaagagtatg

SEQ ID NO: 65677 - DNA, 2796 bp, Cannabis sativa
ttcacaaatcggacagtagctactagtaatgggcacatgcttcttgacaaaattatctctagtaagaaggttagtgtgcaccacttgcctcataataaaaatgtattttggtgtcgagagcttgcaccaaaaggctttcttatgatcaaagcttgtcccatccgaaatgaggtattcataagcttgcctaatcaaaaatttgtcattagttctagcactgataatagcttcacaagaggtctcttttagccccaagattttcttctaataccaactaacatctgccttcagctcaagtgaacacataacttgatcttttatatacaagttgttcacccattttacccaaaccacatcttgctttgtagtaataattcatagatactttgccaaagtcgttttgttccatttaggaccttctcaaaaatttaaacctccaagctctctcggcaaacacaccaagttccaagaagccatatgaaacctgctctgatcatctttttcctcccaaagaaatctactaattcagtcaatctcttttattattttttgaggtaattgaaatatgctcatccaataacacctgattccaattataacagtgtttattagaagagttttacctttgcaatttcaaataagtgtcggcttgcccaagaatgcaatttaaccatgggtgctatacaaaaaaattattagagttattttgataataaattcataactttggatacttatgttgcaattatcgtgaattttaatcatatttattaaagataaatataaataggtaggttgttaggatatataatattttggtgtatatattattatgtaagtctacaatgtacccccataatgggtattttggtagaatcctatctgtttttgtatctagaaaagcttttttttttcatgatcacatacgttgtttgtatttatttagaattacttgtaaattttcaaaaaaatttgaatactttaaaatgccaaaaaaataagatacacatattttgttgcactcgtgactattttacttataaatgtgataattaactatttaaactttatttttggtattataaactattcaaattctttaaaatttttacaaataaacttaaatagctaaaaaaaaattaactaaaaagtttttttagaaacaaatagaaaatttactagaacaacattttaagtaaatttcctacattattactcttttaacttatatgagtaatttggtgatatttaagtatgagtgtatattgttttttctttctaaatttgttttaaaattttcaatttcaattttcgtattgggatttttctgaaatgtacaaattgtgaggaagaccccaagtgtgggattcaacaggtctagctaggccaatatttgtgttatcttattataacataactatatattttcccttataaataaaaaacaaaagaaaatccaattacgcatggttagtttaatttttaattatttttcctttggtgattcattctctccaaggcaattccagctcgtagataaatagaaggtttcctattgaggatgtgaattgctccctctgtgggacagaagaagaatctattgagcacttgtttctgttttgtaatgtggcctatcacctatggaggtcttctccgtggagtatttacccaactgtgacaatagtatccatatgtgagattgggttaaatttatttgggatcttaaatataaaggcatcaatgcggatgaggtcttcctatatgcatcattaacggtggatgctatctggcgattacgtaacgacaaggtccataataatggcctgattgatgtatttaaatgtattaacaatgttcactcttgttttgcagtttatcatacctctttctttctagtcgtgcttccgcgtcaactggacgcttggcaatttcccccactagactggataaagcttgactgtgacgttagagtggggttggactgcatgtgtgcagcggttgttgctagggaccatcttagtagggtcatctgggtccatacttcttttttggagtttgtcgatgctttgtgtgttcaagcggtggcttgctgcattgccgtggacattgcgaagaagcgaggatctaagtttattattgttgagagtgattcgagggtggttatcaatgctctcaatagggagatatctcgttaagagattgagaaccatgtctcattttgtttgcaatcctctccttattttgttagttgtatcttttcgaatattagtataaattgtaacctgcccataatgtggctaagtagacgtttactcacaaaaaattcagttgtatcccgactacctctatcccagaacaattattttgtaataaccatgaggtctaactgtttataattctaatatatctatgcttttcttcaaaaaaaaaaaaagtttattttaaggtaaataccattttaaattctgtattttacaaaaaaatactaattgtatttcccataatataaataagaccctaaactatttttaatcaaaataaaatataataattattcgattatgacaaaattaattatattttttacatctcttcgtgttaaaaattgttttcaaagtgattatattaaaaaaataaattataaaagattgaactcaaagttctatttatagaatttcaaaaaatacaaaatttattttaccatttaacaaaataaaaaatctattcaataacttttgcaagatgcaaaatagcattcaccgttatttaatggaattgtaaaaaataacaaaagaa

SEQ ID NO: 65678 - DNA, 725 bp, Cannabis sativa
agaaaatcaaacaaggaaaaaaaaggttaagaggttaagaactaataacgacattgagttttttttttttttttagatttcttcactaattattgtaagaaagctagtattgcatgacataagacacctcaacataatgttttaaatgaaagattaaatagattcatacttgaaagagtaagatgcatgttgttaagtgatagaattctggagattttgtgggtagaagctttcttgaaagcttgttactcaatcaacaagtgttccttaacaaccttgaacatgaagacacctaaagaagcttattttggtcatgcttcaaattatgacagattaagggtatttggttgtgttgcctatgcacacataaggcaggataaattggaactttgggaaagtgtatgttttttggttatcttgaaagggttaaaggataaaagttatggtatcttgagccaggtcacaaaaagtatatcataagccgagatgttgtgttcaatgaatcataaatggcctacacgatcaaggaaaccacaataagttccaagctcagaagttgacaaggttaaggtggagcttagtgaggatcgtgaagaacctattgttgaaaatggaacttggcttagtgaagacgaaggccaagtgcaacctaaagcagaagaacctaaaaatggatattcactagagatagaacaaggaggcagataattgttgggttttatgcc

SEQ ID NO: 65679 - DNA, 1538 bp, Cannabis sativa
  modified_base (1395)..(1403): a, c, t, g, unknown or other
actaatcagattgtaaagagttttatatagggcataaaacccaacaattaattatttaatttatcatataagatacttttaatataatacgtcaaatttaaaggataatgccattatttaatttaaaatatatccaatattaaaatttctaaccttataattaaataatatataaatattatagaagttaacaatttttaaaaaactgaccataatttaaaaaattaaataatcaatttttaaatttaagtctcaaaatataaaaaaaattaataagaatctattaaataattaaaatattattaatttaaaatttaaatttaagtttaaataataaaaaacttattttattttgaaattgtggtttgaaaagcaaaaaattcgaaattggtggaaaatatcccccaaaaatcgaatttttgtgcatcatgcacctattgcccaggaaggttgcacgcagccttgagcgcacgaggaaataggagcctgcagcctccctggccgagaaacctcggtcagttgtagggttttgtgggcgagggatgcaacattaggtgtgtgtaaaggcagttacactcgaagcttcaaacaagcttgtcccctttagccgcgcgcggatggctgccttgtccgagtgcctggtgcactcgatgcacctactcgacaccatatgcgtcctatttctcaaaacaccataacttcttcgttttcatcggaattgagttccgtaaaagaaaaaatcgcttaatttttcacaagaaatccaaataaattatatttcagaatgatcataaaattattttcatggaaaaatttcgtaaatcacatacattcatcaaataacacataaacaacgataaacacatcctagtcaacaaatataacatatgcatcattttaaatccatattacatgaaagtaaatcattaccatgactttgaggccagttgttgggaatattttacgagggtctagatttactaacaagtatgtggattaacatcctaaatatgaatatctctaaaacagtgaaactaaacagataagagtctagaaaactatacattcattgcaacaaaattaaatgactccttctgctcaaatctctaatcattgttcctttcagtcacaaagtattatcaagatttgagcctcaatctctttctttccttctggtttggttaccactgtcttactcactatgattgagtactcgacttgctatgtgtgggcatggcactctatcacttagggtttgaatatgatgaccaatgaaggaggcttgaaaataactatagaatgtgtctctcatctactagttgtcagagaatgaaaattagatttggtaggttgaaaatcaagttatcaagcggatgagatgagagcatcatgttnnnnnnnnngtgtttcaactagggcttagggttgaattctatggatttaaaaaaaatatatattgggaagaaaacacattaaggtccaccattaaaatggaccagtttctagttacaattttgccactttatttcaaccactta

SEQ ID NO: 65680 - DNA, 724 bp, Cannabis sativa
aggaaagaattctttacgcatcaacagtgagaggtctcatgtatgttgtggtatacattagaccaaacacctactgctgaagttatgagtagatataagactaatttaggataagaatattggaaggcaatcaaataaaacttaagattaaaaaggacatatatgttagtctttaagggtggtgctttaaatattttaggctacactaactcagatttctagacttgcatcaatactagaaaatctacaatttatgatggtgattactctaagagtagagcaataatttttgcagaagtataaaaacttgtccgaagtctctaactctactaatgacactggatattaaagtggccttgaaggctactagacaattattcagcctaaggaaaattctatgagccttttgcgttattccaatcatggattaactactagcgttatttcgcaatagtatagatatagttgccaaatagtaaagatttcagaaccctaagaggagtaaacatatagataaggaaactcacaatatcaaggattttgtgactaaggaggatgtaatggtggagaaggttgatactgaatacaacgtgtcggatcctattactaagataatactacattgtaaagaccatttagttttaatttagaaattagcaaataattagggttttattatgaaaattatttattaatattgaaattaattatttatgatgattta

SEQ ID NO: 65681 - DNA, 607 bp, Cannabis sativa
gtaaattatcgtcgatgcacaaccaacgaaaaaatcatatattcggtgctaaaaggtgcgtctgagcaaaatcaacgcaaaatttgacccctataatttttttaaataaaatatcatctttagcatcaattttcgttttgttgtcgaagtagcaactgatgcaagaaaactattattagcgtcaattaacaacaaaagtaaaaaagtgatggttgacttttgcgtcagtcaacgagtttgaccaaacacgttgatcgacacaaaaatccatttttgtagtgtgactttattctcggattgatcatgcatttaagaatgaagcctgattagatatgtttcctgatttttttgtgacttttcaataaaaaaaaagtttcaaatcattgctcttgtgttgttactttctactgtgctacaaaatattagaataaagccttttcgattttataactttttgatagaacatgatgattttaagcaactggtttatgataattggtataaaccaatttttggtaggagtttaaaagttgtctatttaaaaactgttttgattaaagcacctcctaaaaatttttaacaaataatccatatgagatgttgaaat

SEQ ID NO: 65682 - DNA, 572 bp, Cannabis sativa
aaaatgttagaataacttgtaaaaactttattttttaggcgaaatagttgatatgtttcgtaagtatataatttttaaattattatcgtttttctttgaacttgagttagatgcagtgtaatgatattttgttttgcatggatcaaagacttttgttcgtaatgttatttttctcggtcaaatgatagcttagattttttaaatgctcacatttagtttaatcatctactctttattatgttcggttatgttagttcatacatatctttttcccgttcaagcttaagtacttttgatattaatatttttcaatggttagttttgcctgaatttccttacaaggaaaaactaaatttcttcccattttaaagaagcgagtttgttaattttgacattggtttgtagttggagattttatgctatttttgtatttagaagtttatgacttgtgatcaattttattaatcgatttatgtttatttttactctttagaaaatttataacatgcttttgatttcatcgatctaaaggtaacaagataatcatgtcatattaaattaaaattaataat

SEQ ID NO: 65683 - DNA, 1166 bp, Cannabis sativa
aatcacgtaatacgcctaaggtagctagggtgttacaaagaagctccatggaggcaactttgaatccatgaaatagatctggaaggaaaataaagccctttcaaaagatcatctacaaagcaccaatccacagtgtcgtacgctttgctcaggtcgatcttcatgatgcatcttgcagagatgttcctccgagtatacccttttaacagatcttgtaagattagtatgttgcgagctagagaccttaatttcttgataaacgccccttggttctcatggataagaatgggaaggactttcgacagtctggtacacatcatcttggatatacatttgtatatggtgttgcagcaggcaataggccgaaaaatcacctgcattttgtggactatcagtcttgggaatgagagaaatagtagtctcattcatctccttagggagagtgccagtctggaaaaaacccaacaccgctttggatatgtcatctcctatctcctcccagaggcctttgaaaaaactagcaccaaaaccatccggccttggacttttcgacgagtggatgccaaacaaagcctctttcacatccttctttttaaacggacgaattagttgaacctgttgctcaatgttcagcttattttcgtgttcaagacagtcaagttccaatcttctagtcgtcgtgctttgcctacccatgaagttacagaagtggttgagaaagtgttcaacaactttgtcatactcgtcaacaacagctccgtcaatactataagaacaaattctataatctgcttttctttttttttttcatgatagagtagaagtagcttgtgttttcatcaccaaactgcaattgctacatttttagtctttgaaataactactcttggctgtctgatctcatttgttgccgtaagttaaccatattatacctctacatgcattttagttgaacactatgtggcaagtgaagaagtgatcccatagaagctatataagccttatgcaggaaaactcctcttcacttttcacttttcactctctcactacaaaaagtaactttgaaaagctcatccttcaccaactctagccaacgtctctgtctcatattcaagtccttctgggtaaagaagtatttcagacttttgtgatcagtgtaaatctca

SEQ ID NO: 65684 - DNA, 1498 bp, Cannabis sativa
ctttccagggcattggcaaggtttaccagtatcggatgtatggagtattcattggaagggaccgatattgaacattaatgtatgtcaatttaattatgtttgtaaggtaagtcaaatttgatttatcatgattatatgaagtactaattattgataggagacatatatacactaatattgccgcaatagttaaaaaaaaattctcaaaaattaaaatctcaagtctcatttcaattttttttaaaaaataaatatttaataaagaaaattaaatatacatgtattgcacgtaacacttaattaaacttaattaaaaagaaaactaattatacgtgcattgcacgtaacatcaatctagtatatatatataaatagatatatttttttgaaaatgaagagattacgtgtctaatttccaaaaaaaaaaaaaaaaaatacaaataagaatatgtattaaaagtttcagttttcatcataaaatttaagtaaaaaaaacaattatcacaaaaatgacatgcccaatcaaattaacaaataatgtatgtttatccattaattcaaaaggaatgtatatatgtataaacacatacttttttttttgggaagggaaaaatcatgtgggctcttgtccaattttttttatttattttttaaaatagatgaaaaacacaaataaaaataagtattagaaggtgtatgaacttttcatcattaattttaaataaaaataataataataaaaaaaaagtcacaaaagtgacatgcccaatcaaataaacactttttacaaatttaaaatataataaaattgattaaaataaatattgaattgccacgtttcaacaaaatagaatcatttttttttttttataaaaaatgcagtgtacaatatattaatgagattaaaaaaatgtaaatttatacttataacagtaaaattgtaaaaaaaaattgggaaacacaataccaagtgtaaattttcctattttattttataggaatagagatataaaaaagataatattaatatgagagttttttaactatttatatgggaattttttttaatatgtattttaaactaaatatttccttattttgattgtttctacttataaacttctcattatgtttgcaaatagagtaattcaaattcataacaaattatttttactatgtactttaaatagaataattcaaacttcttattattataactttatagattgcaatacataattatttttatatcttttaagtatatgtttttagattttttatttatttaatatttttttttattaggggggtgctttcaaagattaaggtgtttggttggaggtaatgaaatggaaagaaaacaatttttgttccattcttttgtttggttacattttgaaatattgaatatcattctaattggatgccctttttggtgaaagcctattctaatgtaaaattagaaaaaattaataaatttttatgcattttaaatttt

SEQ ID NO: 65685 - DNA, 853 bp, Cannabis sativa
  modified_base (27)..(31): a, c, t, g, unknown or other
tattattattattaatattatattatnnnnnttattattattattatatatctaactatataataagaatgtattttgacaagtcgttcctttttgtttaatattttttttttaattttttgtgtgttttttgttaagtaattttttttactattattatgcatgtgtactaaatattatattaatgtgatacttaataatttgttagaatttttttaaagtgcttaatactatagcgatgtggtatccaataattaattagtattttttttattatgtgatatattaatgtgctaaatatcatactaagagcatctccaatggagatacaaataagtagtgtaaagctaaaatatagctcatttaacaaaaaatgtactccaataatttgacaaaaagaaatgtaaatttgccacatagtaaattttgtggcaaatttgacacaacatttgttatgatgtaaaatttacatcacaataaatacgctacttttttatttatatatatgtcatttgtattattttattagtttaattaactatagcattaaattataaagtatttatattattaatttattgtcttacatatttaaataataataaaattgataatttggattttttttttggttattttttttttaaatttttcttatttagttaatagtaaatatataatagtgtagaagactatacaagtatacatatatgctattaatttttttggtgttattttactttttttttatgtatttttgttctaaacattgtctattagtatataatagtagagaaaatcacatgtgcttacatttaaacaatatgactcatcttacattacaaaaaatctt

SEQ ID NO: 65686 - DNA, 1104 bp, Cannabis sativa
aaaccgcaccgcactgcgcggtttagaaaaaattcaaaccgcaaccgcaccgcaaagaatttcaaacgacagtttttttgcggtgtggtgccgtgcaggcggtttggacggtttgatgaacacccctatcaaatactatgtctttataagggtatagagatacagattgggtaagctatgttgatgataggagatctacaaagggtatgtgatgtttttaagaaaccatttagtatcgtggtctgctaaaaagcaatagattgttgcttgttcaattactgaaagtaaatttcgagctctagcaaatgcagttgctgaaattcgatggatctcttctcttctgtctgaacttcaggtgccactcatacagactccagtcctttgggttgacaactaaagtgttactgcgttagctgccaatttagtgtcacgccaaatctaaacacattgagattgaccttcactttgttcgagatcaaatcatttgttcgagatcaaatcattgctaaacaattcagtgtgttatgtgctatcattagatcaagttgttgatgctcttacaaagcctctaattattgatcgttttcactacctcataagcaaactcaaaatagctactttgtcatttcgtttgagaatgtaaaccaataaactaattgtatagttagttactaaagtggtagttaaatgcttagttaattcagttagcatttctgttatataattcttgaatcttcgatcagtataaataaagtctctaagctaaccaattggttaagcttctctggcattttttttctaagctctgcttctccacctataaacttctctctgccattgttaagcttccacagttagaaggggaaacggtggaaagacaaattaaaattgaataaatccactggtcattttggaccgttaagtctcaagtgtttgctctagtaaaagaaaaatcaaaactttttagcacagggatgaaaaagaaaaacacattgagctgttgggtgagttcttatgatcttatcttaaatttagggtcgaaaataaaattctctgaataaatgtggcttttactgctatgcacgatgttttcatatattgaag

SEQ ID NO: 65687 - DNA, 854 bp, Cannabis sativa
gtcatgacctgtggttcgaggtcagggtttggggctcgaggttagggtcagagttaggagttgaaggtgaagggcattgtcagacctaggagaggattaatattacatatgatataattaaaaatatttattttatttattgatttaaaaaaaattaatacagtataatataatattattgtgcaccatacatgctttaatacaatatatagtataatacaattcaacataatattatataacataatataacacaagtgggtgaaccaaacaccccatttgtacattatatttatattacatccttacggtgtgatgaagatacgtaacatgtgaaggcatgtcaattcaatgtaagtaactggcctaataagtctaatgtgatgatttttctttttctctccacttttaatgggtattatttataaatgatatttttaataatattaaataatttaatattaaaaaataactaatttaataaattaaccaattcgatttgcacaatgtatattggattagattagaattattatgtgaactggattgaatctaaaatataaaattcacacttttcagatgtacttaaaacaaaatatacagattgaattaaatgatcacccctaaatatacataaatatatgaaacttaatttatttcaataataaattaacaacttagattggaacttaatttcatatgatctatgctattgattagtattaacttttgtgacacaaattattaaaacaggtgaagttaatgagctcaacagatatattggtatccccacatggagctcaactcaccaacttgttctttttagaccaaaacagtagtgttatggagttctt

SEQ ID NO: 65688 - DNA, 828 bp, Cannabis sativa
ggttatattttcgtcgaatttctaagtttgtatttttcgtcgagttatcttggtttggtttggccaaattatttgggttaggtggtttacaaaatttatgtacaaccctaattaagggtgtttcgccgcaaatattctaatttaataataatttgatgttaatgtattatgacaaaattgtgtatattttttttacatttgtttgtactaaaaattatcttcaagttggttatattaaaaaatttattaaacttgagctcaaaaaactattttatacaattttggtaaatacaaggtctaatttatcatttaataaatggtctaatcaataatttttacaatatacatataaaaaaaagtcaattttaaggataaaaggaaatagtttcatcaatttatgtgaataaatattttgtcgttttcttatgaagaatagactacttaaactctatcattttctatattttcaaattattttaaattgatttaaaaaaaaataaatttttaaaaatttacaaaatattttaaataactacaatatactgtggtattaaaaataaaaactcttgcaacactctctcatgtttggattattgtactgaatgttgtaatataaaatcataatttagatacctgttgttatccacatttctcgattaatgacatgtgcatttcttaaagtctaatatcagccaaattaggcccagtcaagttaatgaatcaacccacctacggagtcaggctacaactccagatctggatgcaagttagcttgcaaacactacaagccggatcactttggttcgggaaaggctatttggttcacaa

SEQ ID NO: 65689 - DNA, 830 bp, Cannabis sativa
  modified_base (417)..(418): a, c, t, g, unknown or other
ttatttgtatttataaactcatatcttaaaagataaataaaagtaattaaaaattcaataaaaatacaaaattattttttaaaaaaaaaaaagttaaaaattagacttaaaaaatggcatgtttatgtcgacttagaaatttagactagacttctaaaccacacccgcttgctagattggcgagaataaaacagttattaagtaattataaaagagacacaacaaatttatagtagttcactctctatattgcgacaataatagagctacatctacttcaagtttttatttctcacgagatagtattacagaaataggctaagtgtcaaaagctataatttctagagagagaagctctcaacttgtgggtagttttgtgaatgtgaaaaataagctaagggagctctccttttatanntgaaggaggcccacaaaaatagaagaaaaatataaatttgaaatttttgatcgtagatgatgatctaatggtaaaaattaacttctaatggcgatagtcatttttcgaagctcagtgggatctgctgcgggtaacccagagcttattttcataactctcttggggtgaaatttgagattaatatctttagaattacgattgaagtgtgatacatgaccttatatagcattagcttcgaagtgcaagttgaattgcgtgaatcagatcaatattgagtgacttataaatattttactaaagtcagttcataacccagcgcccaggttgacattccagtgcctaggttgagatatgacgtcaacctagaccctaagtgtaaaaatatccaagagatgtactttaagatgccaaa

SEQ ID NO: 65690 - DNA, 1616 bp, Cannabis sativa
tgctatagtctcttttcgagtctctcttgcactttgttttttcaggaagtattaatttttagtgatttgcatgcccttgaagttcatggaaatggacctgctctggcccttcaaagtttcaaacatctcagttcttaatttttcatatgggtcttgagattagatgttatgcattgtttacatttaatcctagtgtaaaagaattaatgaaataaacaaagttatttatttctttgcaatttctataggtatgaaatagatgagaggctaaatgatgtggacaagtcaatcttgctgtttgccttaaattttcatccagaaaaagatcgtaaaattggcgttggagctcaagacataaaggtgagctaagttgatctttgctattgtccttgttttgttgaatatccatcttagatgtttcctagcaaaatgtataaatacttatgtttcttcattgataggttgcatatcacaaggagcacgagaatagtcgatgctttatgttggtaagagtcgatggtactgtagaagatttttcataccgcaaatgtgtacgtggcgctctggagatcattgaccctacaaaggcaatgacttaccgaacgaagaaacaaaatacaaaatgggatatgagttagctgacagaaatctaaagatgaacatgcagttataagcaataatctttaggccattcatttcatataaactaagcttctataaataatgttgctctttctaacaaactaggaaactttcattgttttgttttgtgtatattacaatctttccaaagcttctttttgcttctttcactctaactttgtttgccctccatgaagatttgggcaaagaaaggtctagttgaagcagcaaagagaagctggtcaaaggtcaatcctttatttattttgaatgcttgacatttgaataaatctttttctctttatattcacttggtaatgtgccttgtgttttagcactagatttcgctatgaattctcatatcataaagattaaacaatgaaaaatgtagatttatatttttctattttcatgcattaaaataccatttaatctagttttactttagttattgcccccatgtggctactggcttctagatctattaccccatcatgaggagactttatactctactctatgacataacatttctacattaaggtgtttgattacatgtaagtggggttaacttggtttggagactttaatggggctaaccctgaaacaaacaatgaatcaggccagaagttaaaaaaattatatatttttattgaatatttgtattcttccataattttatcagaaagcaatcaaagcagttgttatggaccgttggatcaaaacaacacaagtcaccatgattgttaagttcatcttccccatcacctccccaagccaagttggatttggttgactggtaagtttaaaataagggggttggatcataggtgtcaacatttagcaaccatagatcgtctttttggtattattagctttgttgataatgttttacactcacatggctttctctattatgttatctttgaaattcttttctatcttctagagttgtgtagcagaaaaggtttata

SEQ ID NO: 65691 - DNA, 736 bp, Cannabis sativa
accttgcccataaagggagagtcgctccatgcctataaataaagattcgctccttccccattgttgaccgtccgaattttgctaagtaaaaatatcgaggtcgtaacgaaaggagagaaaaataagagagctcgacaggtaccacgggcaaggggcctcctaacgatgtcgcgctgcaagaggtcggagggatctcttggtgtcgcaccactgagtaagtgttgctatcaccattttgggcaattgacattgtcactatctcagccaagtgacattatcgcttctagagatggaagttacaggaggaagcaagcacttcgagatacgatgaggaattccaaagggaatcaaaggtgcgcctaggaaaggatggatcagagggtacgaccacgatacctgaaaaggctaataaagagtagtggcggaggcgtgcttgtgtcagtatcacatgacactcaaccaacaatgcctccatctcactaccacatgtaatcataataatatatggtcctcacaaggaccacttatagtttattttgtaaacaagaccaatagagcctaactataaatacactatactctaatagagagagttagagccttgtaatttgggagagatattttttgaataaaaaaacatctcacatcttctctctgttatattttgacattaagattattttaaaatttttatccgttattactcaaaatttccaactacaatgtagttgatgag

SEQ ID NO: 65692 - DNA, 933 bp, Cannabis sativa
tcaaagggtcagggtcgaggttcgagtatgagtcgggtctggggttgggaccaggtccaaatttggggctgaggctgagttagatttagggttggagctgggaccgagactagggatcaggtctaaggttggttccgactcgggttgggactgaggccggggtcaagttcatattggtgtctcaaaggattgatgtgttttttatacacagaaaaatagaaataaaattattttttgaaagcattaaccaaaaatgttgtgttttctacatgataacgcttaccacactcatacaaaatcacaatgaaaaatattaagagacatctcaagcactacaaacttatgacatgcatccgaaataggaaatctagaaagttcaaaattacaagaaaaatgaggagtcagaagtggggatgctacttgtagggtggctagagcactataactgatggtgattattgaaatggtgaagtgttaggatcaaatcgttgcaaccctgattgaagttttaggaagcaaacgagatcccatcaacaattgggggttggctttcggaaatagtttcatgtgaacctcaaaagtaactggtcaaaacaaaggaaggaatcgttggtctatttatactaaaaccctcgatttgcacctattcaatctaacaactctgataatctattgaaaagagagaaatgcgctgatttaacgaaccgggaatacaaaggaatgcataaatactcgtgttggaacacgcaacttctccttcacaattatggaaacgattcatatgggtaaaaattatgtcagttgtcacacccatttattataagttccacttgcccatacaaggtgcgtaaaagtcactacacatctatgacctgcacgtgaaacgcacttggaagatggaaagacaatccacgaagggtggtctccctcctt

SEQ ID NO: 65693 - DNA, 969 bp, Cannabis sativa
tcctcctcctataactataaaataataacacaattatctgcacctcaattaatgaatctgactttataaaattgcacactcaaaaagcaatacaccaattaattttcaccatccacatgctttacacaactattaattaagccaagccaacaacttctcagtcataacttttgacaaataacaaaactctttcacacagagagggtattgatcatttaacatagcagagaaataccagatcaagaacatagttgataatggctgaagcttttctcactgttttgtatgaaaagctatttgaaaggatggactctccagcgtttgccaacttcttcctggaaaaaagatcaatttgtgagcagctaagggagttgaaccttaagctaaagacaactagtctactggtcaatgatgccgaagagaggcaactcgaggagccggatgtgaaggaatggttggatgatctcaaacatgtaatttacagagcacaagacatggtgggccacattgactatcaactcctatccaacagccttggacatgaatctaatagtactgatacaactactgtgcttatgaaaatgaagttcttactctcttcaatgactgaatttgacagaactattcaaggtgatcatttgtacaatatttacaatatttctcataaatcatcctacatttaatgtttgttcagcatgaaatttatcagtcaaattataaaactaaagccaaagacaacctcattaaatattggaacttctttttgccttttggaaatgagaacaagggataaagacttgttacatttcatcatgaatatatatacttgctacatatatatacaaatatatttcactggatattatggcctagaaacatatgatttatgataaaagataatcaacttattcatatattcttacatcaaaatatattgggtcaattacaaaaatattattatgagaacaa

SEQ ID NO: 65694 - DNA, 701 bp, Cannabis sativa
aggaaaatacattcaggatttgttaaacaaagctcaaatgacagatgccaaaccagcccctacacctatgacaagtggcttgaaactttcagcatatcaaggagatcccattgacaatcctcagcactatagatctattgttggagctctccaataccttactattactagaccagagatttcatatagtgtaaacaaggtgtgtcaatttatggctaatcctcttcatcatcactggaatgcagtgaagagaattcttcgatacttgagtggcactgtttctcatggtctaactctacagaaaccaactgaacttgatgtcactgccttttgtgacgctgactgggccagtgatcctgacgatcgaagatcgacttctggtttctccatcttctttggttcaaatctggtggcatggcagtgtaagaagcaacatacagtttctagatcgagtaccgaagctgaatatagaagtcttgctcaagttgtctctgaacttacatggatgcactctctgtttactgaacttcacattcagcttcctcgcacccctgttatctggtgtgacaacttgagcaccatactattaactgctaatcctgtccttcatgctcggactaagcatatagaactagatttgtactttgttcgagaaaagctcactcagaaactggtttgtattcagcatgttcctgcagctg

SEQ ID NO: 65695 - DNA, 1957 bp, Cannabis sativa
aacttaatctaaaattaatactaaaagtaacctatcacaaatagtgagtttcaatacgactaccaaaatttaggttgcacttgaacgaacttacaccgtagtctcatttgcatggagatccgacgttcgaacaacactacaaaatctgaagaaaaaaggactctcggcatcaacatacctgcagaaactcaactcactctgcaacacacttgcttctgtgggtgagcctatttcttttccagatcatctaggatacttactaaatggattggggccagaatacaatgcttttgtaactccaatattagtcaatcaggccaacagtggaggaagttcatgctcttttactctgttacgaagcttgcttggatcgacaaacaacagtcgcttccatcaacttccttcaagccaatatagccaacctaccttgtcccaaaaaatgcccaaaaaccccttcaccaccatcccaaatacttccccaataccctcaccacaacccacctcgaccaccatcttattcccaattccgtcaaccctgacctagctataattcttcaccccgtgccccggctccatgggtttcttcttctccttgcccaaacaatcgacaatccaaatgttagatctgttttaaagttggtcgtacaactgcatactgttatcatcaaactaatctccaatatcaaccaaccccaccatctccccgttttatgcctatttcactcaacaacaaccacttctactcctcccctgttacccaaccctcctcttcttcacatgttaattactgatcccgcttggtatatggactccggagtatctcatcactttactctcgatctaaatttgttggaatcggcaactccctatcatggtcaggatcaaattactgtgggtaatggtaaactcgttcctatttctcatgtggttactgcttttttactgtcacctactgttgctcttcttaaattatgtcaggtttactattctcccaatattttcaaaattcttctcagtgtatcttaattatgtcttgataataatacatctgttgaatttcatccatattttttctatgttaaaaatcaagacaaccatcaaatcctccttaaaggccttcttgatcaaggtatctatcgtgtcacacctccttcaagtagtccgcactcctctacttctccctagctgttcttctcatctaagtcctctattgatctatggcactctcgtctaggtcatcccactcaagatgttatctctcgtgtttcttctgatcttaattttttatttccaaaaagagattgtctgtcattttgtaccgcttgtcaattaggaaaatctcatcgtcttatttttccaaactctatatcacgggcttccaaaccctttgaattaatacattctgatatatggggacctacccagattactgcaattactggtgtcaaatattttttgctctttatggacgattttacccgcttttcttggttctatttactcaacacaaaagatgaagcattcaatactttcctcatttttcataatttattttccactcaatttaatagtaaaatacaatttgttcgtaccaactggggaggggaatatcaatctctctctaaattttttactcaacatggcattcgtcgtgatctttcgtgtccccacactccccaacaaaatggtcgggtcaaacgtaaaaattgccatgtagtggaaactggtctcactctcttggcacatgctcatatgcctttacaatattggccttagcacatgctcatatgccttctccagcccctactaacttctctatcaaaaacctcctaattactctctttttcgagttttttggctgccagtgttttccctttcttcgtccttacaacagtcacaaacttgagttttgctcgtctccttgcacattcttaggttacaacagcaaacactaagg

SEQ ID NO: 65696 - DNA, 1198 bp, Cannabis sativa
tttaattttttttttattttctttaatatttatatattatttaattataagatcaaatattttaatattggatatattttaaatttaattgtagtcttatcttttaatttgaaatattgatttgtgtcgtatagtaaaatgaccctataaataaaggcaaagaaagtaaagaaaaattaaaagtgaaaatcttatctcgtcggttcattacaagcggttcattaaaatcacgataatttgcctaatttagtaaactggtacatgaagttacaaaagtatatactggtaaatggcacgtgcattttttacctagtatataaatatttggatattcttttttgctgaataatttgatcggtgaaaaattaatattaataattaattttttttactgaaaaatatttaaaatgtgactataatatttttttactctataatgtgtgtctataattttgtaggcagactcttatataaacttgttgtgtacaagtatattatcagtttgtagaaacttttgggatatgtttagaatttagatgggctcgagatattgaatttcaagtcaaagaatttttctctgaacgattccgtgtatcataatgagctataggtgatctatgtttgacattaaaatcttattcagtatctctctctcaaatgtcatcatcatatatatctatatatatctggatagacaatgagtttttttttatagaagagatcctttctcctatttcaatggtgacacttaattataattttttatctaataaagtagagaaatactaaagggcatcagtggtgcctaacacccttctatgtgtcaatatcgctattggttcaattaagtatcgggtcctacataatttaatataataatttttagggagtatcgctagtcaatcgcaacgcgacatgtcaagaagctgctaggcaccactggtacctaatagcaatgctcaataaagtaatatgtaaagtgatatgtataaaaaataataataaaatatataattataatttttaactaattaataattataatcaattttttttaatataaatctttttataagaaaactaacgtaaccatctacgggtacgtatatatatatttgatgtattaaggacagtgataatatctaacatgtcaattagtggaccattctttaagttatttctttattctaaagtttcc

SEQ ID NO: 65697 - DNA, 817 bp, Cannabis sativa
tcaatatttggttctaaaatgtagtgatgatctttcatttttccctttgcaaaccatagtggaagcctcaaaattaaaaaaaatatatatataaaagaaaatattgatcacataaacatactcttctaattgagaatttatgattagaaagaagtattagtaaaaaaaataaaataacaaataataaaaaattaaaaatcatcaaatataaataataataatgtaaaataaataactactaaaattattttgagtaaatacaaatattttttgtcttaatagggaaaaagaaaatgctctttcgcaccttggatttagttttgtcaacaatttgtttgtgtatttgttaaaaaatcaaagaagatataaaatagaattttaaccctccttaaattttaattaataattataagcatcaaatttattattgaggaaaattttggcggtagaccctttaacggaggcattctattcttcatgggtatccaatctagtactagtatccaaatccaataaaaagtggagagtatgcattgatttcaccaatctgaacaaagcatgtccaaaggactgctttcttctttctagaatcgatcagcttgtagatgccacagctggccatgaaatcttgaacttcatggacgcgtattcaggttacaattaaataaagatgcatccgccagaccaggagcacactagcttcataacaaacttaggcctatattgctacaaagtcatgcccttcggcctgaaaaatgtaggggccacgtattagaggctggtgaacatgatattcaaagatctcattggccgaaac

SEQ ID NO: 65698 - DNA, 950 bp, Cannabis sativa
catctaataattgactaagaataaatgtacgaatttgcactcatcaccttcacattgttttgatgcttcataatgtttcataactgccgacttataggtcatttagttgaagatattgttagtattttttccctatttaatataaatgacctggttagtttatttttattgattatgcttgatgagcaatatttgcatataatggactgtaaccattttaatgaaaacaataattgttgtgatataaaattttaattttaaatattaaattattttaaaaaaataattcataatttttcttatataagttctcactaaatttcattcatttttcacactattttcttacattattctacaaaatttatcaatatcacaaattttcttttcacaaatttcactcatttttcatatcatttactaaacattacaataatctatttagctggctgtgacattatctgaaacttaatttattgatgctaaacatatacaattaactcttaaaatattcttaaattttttttctagattacaatctatgcttatattttttgccaagactcttgaatcacaccatattagcggcacattagcactacattaataaatagtttaaaaaataaacgaaatataataaaaagacatatttactatagttgctataattcaagggaggtttttacagtacaaaaaaagttaataggatgtgattttacaaatttcttaattgaagggaaatatttaatattttaaatttaatgaacgcattccactacccaactatagaatttgtatttaaagtgcgtatcacatggagcaataactagtagatattttaatactacaaaatagtttaatattagttattttttccacaaatgttgcaattttcaatgataacaggggtgagaatctctctttacaacattttttattaattatataaa

SEQ ID NO: 65699 - DNA, 868 bp, Cannabis sativa
taccattaattgtttcaaaacactcaggtggcatttggttggaagaattgaaaacataagaatgagaatgggaataggaataggaatgagaataagaataggaatagaatagaataaaatttaaaatgcattaaaaattgataaaaaaaaattattaatttttttctcgtcatgcattggaattgtctttcctttcatttcaaaatagaatagtcattccactaaaattgtagaaaggccattctattggaatgacatttcaatactttaatatgcaaacaaacaaaagaatagaatgaaaattattttctttcctttttattctatttcattacctccaaccaaataccacctaacaaatttgctataaaaatataaaactaatttcaaataaaatgaaggaataactttatttcttattctttcaaataaagtatttcttgaaatatatatattatttactgaaattttcagaaactaattaaacagagcttcagaatgaattaaaataataactgaaagacaagtaatttttacatggttcaggcattaatgatctccagtccacgagttagttgtattggccttttgggcaagtgtttgtgttataaaccctagctctgcgtcctttttgtttctcttgaagaagaagaagacttgtaggaacttttgtagaggttcggctagcattaaattattcaccctttgtacataaaaagtgggggtattcataggcttacatgtgtgtaagagcattcccttcacccacttagggtttcataccacaactcgctgcaagggcaggagaatactgttggaatttattttaccaggatcttagatctagtcacaagtatgttgtttaaca

SEQ ID NO: 65700 - DNA, 1193 bp, Cannabis sativa
tatgggaatatgtttaagagatttggaagttttagaggtacaattaagaagttaagatatgttttgacgaattaaagaggattgcaagatatagggcatgaatatgacttgaataatcaatggtatgataagtatgaagttatgtgatatctcagatggttagcattatagaagaagtgatcattgaacataactacaaatttatcaagattacagatttgaccactatcataaagtatcacaaaagtaaacaaaagttattgtgtaaaactagataatctcataattaagtcgacttgatttaaagagtattggaggaccaggaaccaaaggagagattagcaaataagatacaatgaagtggtaaaagaatcaagagactacaatagaaatcaaagtctatgccatccgggaaataaagacaagtggaatgagcatactactaaatgagttatattcaataccgattggtggcttaatggatcattaaaattatataaaaggaattttatagggctcaattaattattttcctgcgtcatggaactagtatttatcattgttagagtaataaccacgaaactataataatggaattgtagctttatggaggaaattaagtaaaaaaaaattaacattcaacgaaagaatgggaacaattaaagagaagtttgcataaggtcttctacgcaactccttgttgtttgttatttttgtattgtataatgtgttttcaagtgacatgtaaggatgttcataagagaataaatggttttactcttaatgacatgtaaggatgttcataagagaaggaaaacttttataacattacgagcatgcaattgcagaacttgtgtaattaaggaatgtatgtgtaagttagtatgacggagtatgttttgttattaagtaatatatagaagaataacaatacttaattaagttgtatacattatatgtgttatggattggatgataagacaaatgttaaatacctgcttgttggacccatatggtaaatagggaggcaatgtggtaagtggtgaaagacatgaagactcaacaccccgagtgtttggtaaattaaattttgaggatgaaatttcttttaaggagagtagaatgtaatatccaaattaaaatagtatttaatttttcttgagatattaattgtgaaataataatgatctcat

SEQ ID NO: 65701 - DNA, 1369 bp, Cannabis sativa
gtatgtatatatttagaattgattttttaaagatttttttaattatgtatgttttttatttaattattttttgaaagtatgtatatgcatatgaatttatacttggatttagtttctatgtatgtatgcatgtatgcatgtatgcatgtatgcatttatgcatatatgcatgtatgcatgtatgtatgaatgtatgtatgtatgtatgtatgtatggatgtatgtatgtatgtatgtatgtatatacgtacgtacgtatatgtatgtatgtatgtaggtacgtatgtacgtatgcatatatgtttgtatgtatgtgttgattgaatttaagccaaccgacgcggaatcataaaaaataagaattaaactaaaattgttataatactaataaagaacactagaatttaaagaggtttggcaccaagtgttggtaatagtctactctttcgaacggatacttgatttttgcttcctttaaatatttataccagatgatgagattgagtggactcgaaccttatgaaatcacatgcatgtacactcttaaagtgactctcacgaggaagaactgctctaaaggctttttctattataggatatactctagtgataatagggtcatagtcgtcattcctaacaagaaagagtttaagaaccaattcttttagacaccatggctatatccttgtacacatacaacttttcaaaaaccttgtaagtcctgctacttctattgttcatgatattttttcttttccatgtacttgaactaacttcattgcttctgtgaacaacaatggtgctaaaacctgctccaaatgaggttaagtcaaaacactatcaaatattggtcaattttccatttgggatgagggcatcgagttgtaatctccacgagctgcatttatgggcttgtgaattacttgtagatgatcaatcaaccatggatattaaagcacaaaaatattccacttggtcatctataaaagtccctcccaaggaggaagaacaagatcatgttgcttgagctgcgtttaacaagggtaccgttactcacaaagttgcccaaactactgaaggggatccccgaggtagaataaatcatttttatgggtggtcccaaatttttctcatggctgaaccaaggtgccttgtcaaattttttcatagtcagtagattttgtatatctagaattgcgttgaccttattgctcataggtttgatagttagtatcctgaattctatgtccaagttacttgtaaaagctcatattatggtatcccggaccaatacaactcaaatgactattggggaaaaacttagtatttaagtccaattaatacaacaaatatttgttaaattaccgac

SEQ ID NO: 65702 - DNA, 863 bp, Cannabis sativa
tcatgttgaatttttatcaagcaagctttggcttccgcgaaggaaggctgaagttgcataaaaatttaagctttgacttcacttgaaaataatagaaggaaaatatcacggggggtaggaccgacttcaagcagtccttccattccgtgaaggagggttgaagacgtatcatacccataatgatcttccttgcacaaaaaataacgtgcatgcgagagtcatgttaaatttttatgaagcaagctttggcttctgcgaaggaaagctgaagttacataaaaaattcaagctttaagttcgcttgaaaagatcaaagggagaaagcatcacggggagtaagacagacttcaagcagtccttcaattccaggaaggagggttgaagatgtgccacacccccagtgatccttcttgcatgaataacaacgtgcatgcgagagtcatgttgaatttttaagaagcaagcttcagtttctgcgagggaaggctgaagttttataaaaatttaagattaaacttcacttgaaaagatcaaagggaaagcatcacagggagtaagacatacctcaagcagtccttctattcttggaaggagggttgaagacgtattatacccttagtgatctttcttgcacgaaaaataacgtgcatgcgagagtcatgttgaatttttatgaagcaagcttcggcttcccgagggaagggtgaagttgcatagaaattcaagcttagactttacttgaaaagattagaaggaaagcatcatagggagagagacagatttcaagcagtccttctattccaagaaggacggttgaagacgtatcgtacccctaatgatctttcttgcacaaaaaaaaaaaa

SEQ ID NO: 65703 - DNA, 956 bp, Cannabis sativa
tcagacgagcctgtacctacgcccagtacttatcatatgtcagtgatgcccgtatctacacatcgccaagagaaaaccctacaacggtttcattcagtgccataacctgaaaatttttatattattgacgtcgtatctacatgtcgccaggaggaaaccctacaacggtttcattgtatgccataacctggaaattttcatatcactgatatcgtatctacacgtcaccaagagtatcgaatcacctaatcaagtgagactatacctacgctcggtactcatatgtcactaacgcccgtacctacgcccggtacgtcgctaggagtatcgaaccacctaatcaggtgagtttgtatatcacattcatagcttcatacattaccattgctcaaccaatcaattttttcattatataacaatattaactatacctcaatctcaatattaatcaattcataacactattaattgtattataatataacgtactatgcagtacaatatacttttcttacctttaatccaagttcatacatatcaaccaactcaagtggagaactattctcgatgatctcggccctatgtcatgacaacgataaaccaataagtgtttatcctaaaacactacttaatattcatataagacaatctaggattttctatcaaaccccgcggtaaaaataaactaaaataaaacttatattttggctctaaaatatacaccatattttaaagatcatcgcaagcttcaaaacggtatatagaacgtccacaacggacacctaagtgaaaagttatgagaaaaatacgatttctgatttcctaggaatttctaaaaactatgaaacacgaaaatctcaaatttcgtactcaccgaaacactatcaaaatttatcgtaatcactccaaacttcacagggcacatatataccataaatattaccatccttatgtaa

SEQ ID NO: 65704 - DNA, 653 bp, Cannabis sativa
ctggtctggtcaaaaatgtagtaagcagaaatcgggacttctcttttcgagtaattgcccccgatccttgaaagacgctatagaaaacagtttgaatattggaaccattcgcgatgatgaaaaacatttgggcaatcctttccttttcagccgtagtaaacgaaaggatttcaatttccttaagacgaagcttcatgaaagattggagggttggagacttaaaacgctatccaagatggggagggcggtgtatgtgaactcggttgcacttgctctaccttcgtacaccatgtcaacttttcaactccctatctcttcttgtagagaccttgattctattgtcaaaagattttggtggaatggttcacccgagtgcaagaattattgggctgcaatctcttggaatgctctttgccaacctaaacagagaggagggctgggctttcgccgtttcgaggacatcaaccatgctctcctaaccaaattggcttggcaattggcgagcaaaatggacaaaccgtggtgtcatttgttcaaaagaaagtactttcctagagagtccttttggagtatcagtgagaaaaacaatgatagctgttaggctatttttagcctaagtttcgggtcacattttatagttgtttttcttcttt

SEQ ID NO: 65705 - DNA, 744 bp, Cannabis sativa
atgttgtaagcataacgaacaccgaaataaaaaaaaaataaaaaaagatattgtatcttgtgttttcgaatgtagaagttaacatgaagttgagagtataactcttcttcccatgattattaagagagagaaagaaaaatcaatattttattaaatatagtccacgagcgaggagtggcgtctgctccaccataaccgctgcagaggaaggccacgtctcatgcaaaatcagcagcaaggatccacacttacgttactcatcatctcaagccataattaattatgaataattattatttttattattgaacttttttttttaaacagaaatcttgcattaaataataacactatataggattcggtgcatgaagtaaaatttcttgacgagcagaaggaggtataatctcaatttatactgtactaattttgtgcaccaaagtataattagctaaatcatgggcaacatgattggcaactctctgtaataaatacacatacaaagcatcccatcttgcttcttaacaaataaaattggagctcttcacggtaatacactgggtcaggtaaatctaagatcaaacatcccctaaaattgtaatttcaattatttgagttctattaaagccttcaaatgtggtgccttagaaactggttccgctcgcggtgccaagtcaatatataataaagtatctcccactgcagttaaatatcaggtaattcttcaagaaaaacatctagaaa

SEQ ID NO: 65706 - DNA, 1679 bp, Cannabis sativa
taacataggacatgcgagtccttaccgagtcatcaagtacgctgggttatttagaccaattcattatgtaaagaaatgatctttactaaatcgcaggaaaagactacttaatcatcgcatatatctctatcacggtcacatcatcttgcgagtttgattcaggtgagatttattcttgaggagtcccttcttgacagctcaggaattctcaaggaatgtgagtccacgcgtcactcttatggaagtttgacctcgagtttctaggtgaaaaattcgcactataacaggtatagtttgatgaaaatatacttttaatgaataccctattaaaaaccagagattgtttcgagaggaggggttttgtgtttggaacacaacacccacagcgtatcaaatatcaaaccagtccctccttccctcccttcctccaaaacaaaacccctctttcggcgactcattatagcaaaaatagccactctccacttcactcgcttcccgtttcctctcccccttagggttagggttttgcctttcccctcttcaacccctacaaaccctctactcgcagcttccaatggcgagatacagaagccgtagcagaagctacagccctcgtcgccgcagccgaaccccaccaccgcgtggaagcaagcgctatgaggaagaaccccgtgatagccaacgtgaccgccgggaccgtcgctctcctgctccttccggcttgctcgttcgcaatcttcctcttgacgccaggtatcttcgattctttcaattttttgccccccttttgggtttattcccctcaaacagtacattttgtgtattctgtttgtttctttaatgggtcttgtttaatctttaagcttagaaatttccctgtacgattgctataatgatatgtgcatgtaatcaaaattttgtgtttttgtttctttattcatatgtttgcacaggcctgacgatcttaggattccatttgaacgattcggacctgtgaaggatgtttatctacctaagaattactacactgggtatgattcttgtatattatttaagtggtaaatgttattccttgccatgtttacgagctcccattaaattttgtaaaacgatttatgtgtgaattttcagagaaccgaggggctttggatttgtcaagtaccgttatggtgatgatgctgctgaagcgaagcagcaattgaaccatacaattatcggtgggcgtgagataagaattgtgtttgccgaggagaataggaagactcctcaggaaatgcgcacaaccactcgcccaaggtttcaaagcagtttactttttccctacattattacattttgcagtatactacttttaaaaattttgttcttgactttgctgttccttctattagtagtagtagccgacatggaggaagtaatagacggagaacaccaccgaggtccccaagacgccgatacaattgtcagtttgatatttacttggcattaaatcaatcttgagtagaagaagtttgctgaaagttgaagctatttttatttttcactcttttgctgaattttcataaattttgtctgttccagcttattcgcggtcaccatcacctgttaggtatgactccaggtttggatttatagttaatatttatttcaagtattttaaggattggtatcttgtgtga

SEQ ID NO: 65707 - DNA, 749 bp, Cannabis sativa
ttttttttttttgacaaaatgttaatatttaagaacaactttaagtagaatattgatattaagtttatatttttacgataataattttttattgttagaaaaaataaataattattgaataaaaaaaaatagagcaactataaaatacaaattatggttcaaaccaaatcaatctgtttcttagtggtttgatttggtttgatcattttattggttttgtttggttttgaatttttaaaaaaccgtaatagtggttttgtttgaaaaaaattaaaaatctgaaccaaatccatctgtaaaggaccttacgcataaaataactgtaaaatttggtggtattatatataaggaaaaaaacaaggaatataacatgaactcatgaaatctcattgaaatccttttcgtatagaactagaacatataatttaaatgttaatataatcagttagaaaatattgtaatgaaagctggatatatctgatgatctaggcttttgtgaatggtgattttgcttgagttaggatgtttaattagagcactacaatatacagcgacgtgggctttaattaggaacgaaagtattaaaaacaacatattaatactaaagacattcttaatactaaaggcattaacgacttgtacgtattaattaggaacaatttgtgtttttaggcaagttgaattttttggtgaaaaaaaaaaaaattatttctagaaaaaaagtgtgaaaaatgcaaaaaaaaaaaaaa

SEQ ID NO: 65708 - DNA, 851 bp, Cannabis sativa
atcattttttatgttttatttatacttttataacttaaaagtttttatttacaaaaatatttttttttttaaattttaaaattataaaaatatattttttttcaacaaaaaataagaaatcaacatcacgacaattataaattaactacaaataaattataaaataatttaaaaaaacaacatcataacaaaaattataatcaaagaatgcatatagtagtctagaatttgaaattgaaatagagtacaattgaaggcttaagacatcttttttatgggtagaacaattgtcacgtgtcattctatcatcaactttaaattattagagttaatccacattagacttaataaaagaatttaggtgaattattattattattattattgagttcatatataacttaacttgaagcccaggccaggactcttattaataatattttaaaatctataataataaaataaattaattaattaataaaacagtaagcaattaagtaatcattatatgaagagataagttccaaagttttgtgttgtgtcataattaaatttggaaggttgatgagtttcattatgaataattatgacccgttagttctgatgtttcccttttttatttttttattttttttattagagaaatgctaaaaaaatactaatgatgtttaataccgtctttcgtgtcaatattattattggtgtaattaagtatcgaatcttgtatagtttaatatgtaatataggagaaagtaccaagtattacaggtgcaataacaatgctcataatattatcatcatttatatataatttaggaaattttttatctctttcagtatttaaaaaaaaa

SEQ ID NO: 65709 - DNA, 590 bp, Cannabis sativa
cgaggtctggtcgaggtcggggtccaattgcagaatcgaggtccaaaatattaatgaaagagattaaaaataaattatattaaaaatatgttaaataaatttttaaaactgaattatttttttttgttttttaaattttcatttttattttaaaattgaaatagttttaccaaacatgtattttcaaaatatttttacttttctagtttaattaaaatatgatttcatactttacttttattaaaattaatattcaaataattaattattatttattgcacgtgtttaaaattaaaaacaattatatacacatagtatgatgttttatttattattatttatttacatttttgcttaatgcacaattgaatagcaatttttttgcattcttaataattcaaaataatctgaaaatttttgtgtgaggtcaaaaaaaaaaaaactatatcgatcaacaattatgaaaagaaaatacaacaatttgcaattaatatatattcatgtatatatactatatacacacatatatataggccaataacatttcatatactctaaccaaatcttatttattttttttaatcagttat

SEQ ID NO: 65710 - DNA, 684 bp, Cannabis sativa
  modified_base (45)..(46): a, c, t, g, unknown or other
tgtagctataaatattttttttatgataaataagcccccacaaannaaaaattctgggtccgtcactgcctgcgagcttatttatttagaatatgaatgaacaagctgtgacttatcaagtcgcgtacgtggctataattaagtcaagaacggacaagactgttcttcatttatatttctttaaacatttatcttaatttaattttgtcatatattgtgaaaacagtctgatctaactggttatgcaattctaaaagatacttgctttttatataaagaggtgactcaaattaaataaactaagttgaaataatttccaaaagtgaagtaagtagaccaaactctgactgaatcactataattttcttgtcttttctatatttctatttttgttttaatctatttcgtagcttatacttttagtactcactattctaagtgagtactcgcataactgctagtgagtgttcttattgtgcttgaatactcacattatttgaagtttcgattgagctatttatttatctaattatgattttgtctctaatttgtatatattgtcagtagtttgagaaacgatttcttattgaattcttgatcgatcttccatggtttgtagtttttatgttgagttgttattttatctagcaataattatgtctctaatttgtagatattgtcagt

SEQ ID NO: 65711 - DNA, 1158 bp, Cannabis sativa
gacgtcgctggataaccagagatcggagtaatcggcttgaagctcaaaggtgtggattttgggctgagcttggtcaaagtggagaaccgttcagccaaatcgagagacccagaaatggcagcaatcacgttcagatttttctgatagagaagataacgactcgaaatacaaagcatttggtatttgataacgagggagcatagaacgccatcttcacatatatatacaaagccccaagcgaacatgaacacgtggaggcatgtggattcaccacgtggcttttacacgaccaagtgtcaccgttgagattgtggtttcatcacagcatgcgtcatcctcgagttatatggagattcgacggtggtgattatagttgggtcaaacttgagctcttcaaggcatgtgaacattatttagtacttttttttaaagggaagtttccactattattataaatcaatataatgttttaattcaacttttgctaaattataagtatggttaatatttttcttaacatgaaaaataaaacagtttaaaaaaaaaacaacaaacctttaaaattaaatttaaaaaacaagataaaaaaaaacaacaaacctttaaaatgtttggtatagaattcaaaatatcaaacattcgtaatcgtagcgcatccatttcaatataggtgctatataattgttcttgtagcgcctaattgagattataaaaaaaaaaaaaaaaagttttagcttccattttattcgaacaaaaacatccttataccgactttgaaaggacagtgataacacggtcgtggtgatctcgaacaataaaacccacacccaaaatttttaatgcagactctagggctacatcttcaaccctgcattatttagcggcttccatgggacaccttcagctggattactggctattgtcaaagtctaaacaagaataggattgcacacagaatttccatggagtgaacgtcgatgagataagtaacatttctccatatagtttaaagaaaaaatagtattgtgtgctttttctgttctagttccaccatgtaaaactctatttctctctgtccatatcgcccacacggtataaataataagctcgaaatcggtttgagaatgtaaagagaaaggtggattagataatcaccat

SEQ ID NO: 65712 - DNA, 1178 bp, Cannabis sativa
gttgctgtcaccattctcaatccatgccagtttagccttctgttgcagaaaagaagagtaatctttctgcaccttaattaagacttctcgagcctccttttctttgctatgaatttccccattcaaaggctgctgttgtagtgagtcttgccatttatccagatcagtttttgctttaatcagtgcactatgaaggtcagagaagccctccttattaatctcctttagcttcactttaaactgcttcaggttggacaccacttgatacatctttgagcctcttatcgaagtcctttagatttccttcacagctaattcatactttggatgtgacttccacattcgaaagtatttcaatggcttctttcccctcaccaaaccaggatggagtgttaaaatactagaagaatggtcaaagataccttcattaaggaatacaacttctgcatacttatatctatttatccaagcttgattggaaagaatcctatcaatcttggaatagattctatcctctccaggctgtttattcgtccatgtaaaaaaattcccactagacttgacatcctctaacccccaagagttgacacactgaagaaagtcagaatcaggataggatttgactcttaaaccaattctttcttccttagccaatatgtcattaaagtctcccgtgagtaaacacttctctgaagtattaagctccctcaaatccttccataaagttctcctttccgatcaattattagcagcataaatcacagttaagaaactattaaaaccatcaatagttgacatttttaaatgcattagttgactagtacatttaataatatcaacaatgaatctcaaaggattccaagctattacaattttcccacttgaatgccatgctatattggaagaaaagaaccaaccctgaaacacatttgagtataagactccaagctttggagccttaactctcgtctcgagaagaccaacaaaatcaacattttgggcattaataaattgcttaatcagctgttgtttatgttgattattggctcctcggacgttccaacataatagttcatccattggaaagagagggtactcccccctctcttgttttaatgtccattttagcacaattaccctctgtatcaagattgttctctattatctgttctgtcaag

SEQ ID NO: 65713 - DNA, 781 bp, Cannabis sativa
tttgggaggacaaaaatagagagaggaagtgaccttggaggttacaactattgattttcaaagagtttttttcttctatctttatttttatgtttttaattagtcttaatcaattatttagaatgataatgaggagctaaactcatatttggggtttttagtagattttaatgtaattttagttttttttttttttttttcaatttttatgtgaatctgtttcatttgtgtttaatgcttataactacttgatcaccaattatttgtttatgatttcacgcaaaatttaaaaagtgagtattgattatgttatagagaaatagacataaatttcgatattggacaaaagtacctatatggtctgtgtagtaattaagatttatttgcttcatgcaaattatatgtgtaatttaccacataagtgtagaattttgtcgtataatttagattctatatgtcctataagaaagtagattaaattttaatctcctatcacataaaatttaaagaataattagattgtattttatcatagaaagttgatgtaattgaaattaaatttcctatatttctaaatcattgttatttatttttattatttttgttactttcaaatatcaaattaattatttgctgaataaaaacaaatatttaattatttgatacttagttacaatttttgtaagatcgactttactcatgtgaatttattactcaaaatcaatatgtatacttgcgtgttagaatttttacaataatttttaaaaatataaaaaaaaaa

SEQ ID NO: 65714 - DNA, 838 bp, Cannabis sativa
tttcttggacaacttcaatacacaagccatagtgatctctagcaatgaaaccatacccaaaacccttgccattgtcaaaagtggctccgtcccattaactttaatccattcttcatcagatttagtccataactgctctccatcacaattgttatgacccgtagcagtgggaaaagatttacgagaatcttttgcagttttctattgaaccaaagtaagtttagctaacgtaaccatacaagcaatagtaggtgcctttttattctacactagatctcttctatgccttcataatgaccagtacaacatgcccactagagagatttcagcacctgtccaagaatcacagccttcgtgaaaccaagtcgcaaagataacgtcaactatctcgtcttgaaccaaaaacttccctccaacactgttgagaaaatgaacaagtgactgtcacatgaagtataggttcagggaaagctttacaatcagaacacactaaatccaaattaacatgtttactcttaagttggagattagttggtagagaaccaacacatccactccacaacatatcaccaactttcggaggggatcctgtcaaatcactttcaaaagtcaactaaaggggtcatcaatccatctaccaccagaaagttgcaggaacttgtaagctgatttcacagagtaaacttcgtgccttttttggaccaaaaccaacaatcacttgtacaagaaaagctaagaggcagctgaagcactaaatctccatctctctcattcaagatatcatttaaaatctcctcatcccagctacactcaccaacactcataagagaattcacat

SEQ ID NO: 65715 - DNA, 657 bp, Cannabis sativa
ataactaaaagagatatgctaaaaggcactaatggtacttagcatcctcttatgtgtcagtatcgctattagtctaattaagtatcaagtctcatatagtttaatataatagtttttaaggagtatcgctagtcaatcgcaacgcaacatatcaaaaaggtgctagacagtagacactactggtgcctaatagcgctctaactaaaacaatggaatgagcaaaattcagcattggtaatagagaattttttacaacaaaaaaaaaaaaaaaatcaaaaatacaataataattcagggccgggccaaacattctatttggtgtattaattaaatttgaaattctattcaaaaatgtttatattaaatttgaagttatttccctttcaacaaaattatttatttatttttgtaggattccaaatctccaactttgaccatctcctttatagaagagattctacacattcacatacaacacaatatatactgtcaaccaaaataaaataataacaacacatacaatacgttgtaagccaatctataataatcacaacatacaataatatttaatattatgtacataaaaaaatatatacatatttataaaatgtggtcaaccaaatataatcccttgagacacagggctggactcacata

SEQ ID NO: 65716 - DNA, 714 bp, Cannabis sativa
attagataagggtttggcaatattagagatccaggaatgaactctgattagttgttatcagttgagaattcaggaaatgagtatttctagtttagttatggatgcccggtatgagcaatattgcctctatcgtataggttacaataattcactttataacggtgattcactgttagtgatttggaaatttaaaagttgtgttagtttaagggaaattgataccaattataataagtggagatgaacaagattcaagttgataataaggtggaaattcttcatagttaagtgaacaaaaccgatgaggaattgtaagaggttaagggagtgattcaaattagatttaattaacgaaggaatgaaagcaagaaatacaatgaggaacgacaaagacgcatctactttctattaatccaccatgagcttacctcggagttaagcattcttaacttggggtaatctcaagatgggaaatctttcatgaagccatctcaaaaagcatataagtaaggacagtacgctagaaagattagtattaagatgcagaatcagtagttgttccaaaaattataaggagaaagagatgtgttaataagtagagatttataaggtatcgagatgagtatatagtgaatagaaataaggaatgctctaactgagtatctatcaagaatgaatacttaagttgttactaagttaagtgagtagattagc

SEQ ID NO: 65717 - DNA, 929 bp, Cannabis sativa
aaagttaccccagcatctggtggcccgaggctgagcaagcattgtaagaaacatcatcctggagagtccaacaagggtacatgctttcagtttggcatggtggggaatttcaagaaagattgccctcagccaaagaaagaagagcagaagccagacgccaaacccgtacctggtcaggtgttttccatcactcaagctgatgctgcaactagcccttctgtggtgacaggtcagcttcctatcaagaactcttttcatattgtgttatttgatttgggagctacacactcatatgtggctacacaggtaattgatcttttgggtaggccctatgattttcttgatagatggtttggaaccctaatgcctagcggggagttggttatctccaacaggcgtattacgtctatgccaattaggatcgaagatagggagttaagtgctaaccttataaagttggaattaacagagtttgaaattatacttgggatggattttctgtccaagtattcggccagtacagattgcaagcgaaaaatggtgacttttcaaccagaaggtgaagatccatttgtttatgttgaatcggttcaggggtctcggatcctaattatttcaatgttaagagctagggatctactacacagtggatctgtaggatttttagcagttgtgattgactccagcagacctgaaacatttgggcccgaggtagtcaaattgttaaagattttctcgacgtatttcctgaggagttgctgggattatggccacaacaagaaatacactttgtgattgatttggcacctgggctaacctatttcaaaagcttcgtataagatggcaccagcagaactcaaggaacttaagttacatctttaggggatgcttgatttagggtttacccgacccagtgtatcgccctaggg

SEQ ID NO: 65718 - DNA, 755 bp, Cannabis sativa
tcgattggatgactgaaattgattggatcggatcggatagtaaaatctaacatccatcatatgattgatcggatctggatggacctaaaaatattagatgtgatccaatgaacacccctagttccaggtagctggccaaaacgtgatggtcgactagcgaagtttggattggtcacgacaggtggcacttggaaattaagatctgcagccataggtctcgtggttcagctgaattcccatgtcttgtgatagccatgcaaaatggaggtcaagaaaaatatgaaagcttcttgaatgagaattttgggctctcaataaaagcactaaaaggttgactgtagatttagccaaccgacgtagagtctgactacgatcggatttttcttatgacagtcacgtgagaataataataaatgtaaaggacacaaagattgatggaagttcgacccttttgttcaagtaaagacctactccccttttattgtattcaactttgagataataccaagcagattacaacctgaaaccttgtaatttttagttaagctttcttcaatattacaataagaatgtgttttgcaggtgagaaatataagaaaagagagaaaatttattacttagtttttctgagtgtatttacatcgtacctccaggttgaagtcatgaccttttttatagtattagggtttataagttttacgtaaaaatattcttagagaataggaagtttcaatgtaatgttgtgtaagttatat

SEQ ID NO: 65719 - DNA, 1220 bp, Cannabis sativa
tgcgcggtggttgcatcagacgaaggtttcaatcagacgatagttgcagggtagttggccaaaggttgcatcagacaaaagttttaatgagatgaaaattgctgggtagttggccgaaggttgcatcagacgaaataactgttagtaaaatgtttatgtaactgtaatacaactattgtgatacattaaaaatcagaacaatattttcacgtacgtataactctatctacgtgtctttttatgatttaatatgaacaaattcaccattaaaaatttgaaaaacgacgaaaatacaccaggataaatattttactatagtattgacgtaattttttttggattatacttgagttagattgtttgggaactccagttcaactttttgagatatgcctttcatggatttaaaaattgaagttaggacattagttttatgcaaattaaaatggatttacggttaaattttagtttcgtagtagtttttctagactttttttttcatgaatttgaatcagcccctgttttgattgattctaattgtcttctcaggtgaagtccccggaattaatggtggttctctttcttgttgaacttttgtttcggttgtgttggattgttgcgtggttgcgcaatggttgcgcgatagttgcccaaaaagcatggatcttgggttgaatgtgtgtaagtggtatttgtgtaatttttttttatttgggctgtatatttgtttgtttggccaactgaaagtatttcattattacttttttattattaaaactgaaaaaatcccttcttttaatttgagaagaaaaaaaaaatgaatttcataatttacttttattaatggaaagttttttttttcttttgcaattaattgacaacaataatgttgttttttttttttgtttttttgaaaaaaaatggtcacattaaaacttcaagagtaaacctagtgggagaaacctcaagaggaaaaagagtgccagatgtagcgtgcgattcaagatggcacgatacaagctaggtgatgcccacaaggtagccaagtggtggcacatgttggtgtgcatgctgatgcttagtttgtacggtagtaatattttcgtaaatatcttcaatattgtccagatcgggacgggacttggtattcgctttatatttgggtctacgaatacaatagtgcaatctgatttgagaaactgtgtgatttggtatatggt

SEQ ID NO: 65720 - DNA, 5025 bp, Cannabis sativa
aagttagtttaaataagatgcaatgtatcaacaatagacaacaactagtattttgaaagaaaaacataaaagtgggttagtttccataccttctagacagtagagcaaccaaaaagagcatgtactagggtctatttagtgcaatggcagcagcagcaaactgagttgggaatgattcgcttgtgatgaagcttcgatctagttgggagaacatcgttgtaagctcgccaagcaaagtatttgatctttgacggaatagggaggagccaataggatttctacatttttgttgctcaaaggaatctgaaggagaaggttcattttgtgtagctaaggtatgagcatggtgatatcatgagtttattgtgtagtgtccatgagatgtaaaaggccataaaaaggaatctagtgattgggtattagggagagggatagagagtatggcctagtaaatatcattgggaaatagtgtatgaagcttgatgacatcccatgcaccattggaagcaattagactagaaacagaacagttccgataggaaggattactaagatatgccagcttaccacaccccgaaatccaggtatcagtataaattgaaatggatgtactgtctccaacttttttcctaattccagacatgagaagctccttgccccatgaaattctagtccaaaccagctagggatgatgacccttaccagtatttagaaaagtagaatgagaaaaatggcgagccttgagtagagaggccaccaaagaatgaggtgattgagtaaggcgccaagcttgcttggcaagcatagcttgggtgaaggctttcatagacccaaaactaaggccaccatggaacttggatttgtaaagagaagaccaagctacccaatgagttttctatttttgattggttccaccccactaaaaattagccatcatggactcaagtttagagtgaaagaaaagggaagcttgaagcaagacatggcataagacgagattgcttgaacctccgatttgagtatatttcctttcccccttttgagaagaaggtggagttccacctattcaaatgagcccaaacacgatcatagaggtaattgaaggcctcctttttagatctcttaaaagattgaggaagtcccaggtacttctctattttagcacggatggggacgttaaggatattggtaatggacattttgatattctcgtcagtagtaggagagaaatagagtgaggatttggaaagttaacaagttttccaaacgccagactataatcatgcagtaaatccttgatggtggtggccacaataggagaagtagcactgaaaaagaagatttccatcatcgaatatgagatgagagataaggggagcagtgcgagtgatcttgatgccaagtgcatgctttcgaggaattcttcgactggttgcctgagcaatgattgaggataatccctcagagcatagaagaaaaagatatggtgatagagggtcaccctgaagaataccaagagtgggaaggagattctcatggacttggttgttgacagagaaagaaaagtaggtcgaggatacacaagacattatgaactcaatgaaattaacaggaaaagtaaacttttccatcactttgcaaagaaaagtccattcaactcagtcaaaagcttttaccatataaggtttaagagtcatccaatcaactttacctgaggttctacaggctagggtgtgagttacctcctgaccaataatgatgttatcagagattagtttgtcaggtaagaaagcactcagagtgggagaatgattttggaaaggataggtttgagcctgttgataagagttggagagatgattttatacaaggtggtacataggcttattggacgataatcaaggagagtgttaggatgagatttcttcagaataagcacaataatggttttgttgatcaaagtaatgtttgttgtgccatttaggaagctaagagcagcggcagtcacgtcccccaataatgtgccaattagacttatgaaaagagccattaaagccatcaatacccaaagccttatcattagctaaaaaggtagctttcttgactttgtcaactgtgtagggggcattcagaaggttataatcatcatgggtgataattagagtaatttcagagataactttgtccatgagagagggatttggaagatggctagtgaaaagctaagagaagtattcttcaacagtgtccacaatggcttgattactggaggcaacagattcatcaacatggacaaaggagcatattttattcgtcaaccatcgagaagaagccacataatgaaagtaacgggtattcttatcactaagtaatgagtactccttgtagagaagatgatcaagagaactttgcaattgacgacaagaactaaggcattgatcattgggttagggaatgctctgaactagacgtagctaagtttgggcctcgcagatttgttgagtaattggcgagcctaagattttcttccaagattgaagattgaattctcactgagagagcttgtgagtgatattggcaattagatcagtgtaatgctcagtgggaacatagcactaggcattacaaatacaatcttcaaaggctacttcactaatcaaagttttgtcaaaatagaatcgagagggtcgacgacagttcttcgctctgcgcccataaggagaaaggattagagcacaatgatcacagccaaagtaatctctgtgttaaagaggagcccgagggaacaatgagtcccaagtgaagtttgagatgctccaatttaaacactcctagatatgagtacgctgagaatgcctgttggtccaattgtagggacttccatgtctagaaatgggatgaagagtaaaagagtaaaagagtctaagaaagatctaaagtgaggcgaaggaccatgattagaagtgctcccaattttatcaacggttgttaggaagtcattaagtcctccatcagcagccatggggtggtgctaactgtatcaccaatgcgttgcaataattgccaagtatgagtgcgatgagaatgattaggagcaccataaaaaccagtaaaagtaaaagaataattattagaaaacttgttgtaacagtgagaattacttatattgaacgaaagcaaggttacatcgatatcattagtctaaagaaaaatcaagccacgactaaggccaactctagggacttcaagatcattaggaaacataagcttattaataaacctatttacagcacctatggggagtttagtctccataatatacaaaagggttggtttatattgcttcactaacaatgagagatttcaaaatgctcggccgctccctaaaccccaagcattccaactaatgaaactcatgggtcccagcaggtgcgttgggcatcactcgcctcaatagagctagcttcgtcaagagaatgagcgatgttgcggttgtgcttcagtatctttctaaattcaacttcattgatgctagatggatgattaaaagtaaacttcgtatttgtttgagcttgaggaacattgtgcgcaggctgtggagaggctcctatcgtgaactgaagtggttgagaaccaactaaatcactaagtatggtggaaaagacccaagaaatgagaacactatgccagtcaggaaaaataacagtggaaaaaggaggcccgaacgaaggttgataagtgggaatgggagctaagagttgctccgcagtggtgatcatggggaagtgagacttggatgggattggcagcctcgataacaggaggttgcccatgagcaaaagctatggaattgggccaagtactcaggggattggagagaggctgctgtacagaaacagtcgttgtgggaggagtagtataaaagggtcccatagcaaaggcaccaacagtaatcgtgtgtggttgacccaggtattgaaccccataggcaaacgtaggggcattgaaatttcccaaggaattgaaaagagagttatcagctcgagccagaggcatatttgacaaaggaataggatgataaatgtgtgggtaaagagtagtgggggtattcgctatctagacgagatttgatgtgattggaaccatggcaccaagtgtatgatcataccgcaataagggcaaaatagaagaggcatcacattggctaaaaacttgctgcaatgattcactatatggctgagacatccacaatagtgatagaatcagggagattttttaagcaaaactcaagccagacaagagatgccatacccatggaattgaaagtataggcctcttcgaagtggttgagtgacattaatttcaattctgacccaaaggtaagggccccaagattccttcaaagaagcagtgtcaacttcaatgaacctacccaaaatgaccctaagtttataggtcatcgccttagaatgatgaagaaatgcaatcccatagacttggatccaaaaggtggtaaaggttaacatgtctgcagtgacaataaaacctgattcgagaggggtcatgacataagtttataatcaaagtgccacggttggccaatcaagacgcacctttcatcaccaaagcaactgaattcaacagtgtaaagctaggagttttttccaagattaaactattaccgttgagtcaaattttagtcaacatgagccaaaaataggacaatatttgtgaattaataaaataaaataaagcaagaagcaacatcatagatttatagaggttcgatctcaaattatttggtaataacttacttcttttcttagtattatttgtgaaataactaagatcaactgaactagagccaacagagtttcttgattatccattaagaattacaataagatattttagtgatatttatactctttagaaagtttgaaattcagatccccaaaacagcgaatgagctgttggaaattattttaccaggatcttagatcttctcacaagtatgttgtttaa

SEQ ID NO: 65721 - DNA, 789 bp, Cannabis sativa
taatgaaaattacagctgatttattaaaaaatatataatcataacttatcattaatttttgaataaattatgcaaatttattaataattagttaaagtaatagcatgtaatttaattaggacatttttggagacacgattaagattataataaaaaaaaaaacaaaccaaataattagctgtctaattcacatatcgttcgacaaaaaaactaaaatattaaaattaaaaagatattgcaacattacaattaattttaaaaacacttatattcatcagttaacttatcactaattaatctatgtatttatataatttttcatcacaattatatatgttgacgcagtaagaattcgtcaacgaaataacaagaacttaagataatgtttcaagatcttaatagaaaaacactcaaagtaaatactattctcttcactatttagaaaaaattacagtttaattaattaatactttttctgccagagagttccttttacaatgagttcaataactctatttatagctattcacactttacaaccttaccaaattcctaaatcttaggacgtcaagtcactttcacacctggtaacataatatctcaagtagtttgatatatcagacatcttaagttacactaaactgtctattttacttgtacctcggatgaaatgaaccttgtctcctatactactaatatttatagggtagtcactatcttgttcgtgatccctaacttaaacatttgtagcctcgatatcttctctttgcttccatttgtatgagtaga

SEQ ID NO: 65722 - DNA, 1177 bp, Cannabis sativa
aatttgtaacacttggttgttttgtgtatttattttcatgatattttattttattttattacttagcaatattgttctttgattattttaaatttttagttgcattacaattgtaacaattgcatgtttatagagtattaaacttaaataaatggtgatatttagcttatgcgtatttttcttcatatttttaagttaatataaaaatctaggtgtgtaattggatatccaattaaaaaactgatccaatctaattagtatttgaattagattagattggattttgaggtctaattggattggattggatgatgattttccaaatccaattgctaattggataagatcagatgagggaaaaaaatgttagattggatctgatgtccacccttaattagcatctctacgaacatgagagacaactccaaaaaagaaaaaaaaaaaaaaaaaaaaaagaatgaaaggccaacaacttctacaataatatatgtaaaagtagataatataggtgagggttgattgattgtcgtggaaactttaagcgcattcgtttctgtttcattgataggcaactgtaattgtgaggcccaaaggagactgtgaaaaagagccaaagcttccatctcataaaccttataacaccctgtgagaggttttgtataagcaacgaacacacggccaaatttatttcgaataatagctttgacacctgaaattctaccagcaatatttacagttgcatcaatgctaagctttaggcttcctctagcaaggggcttccaagattcatgaggggcaaggacagcagtttgaggaatgaaaattggatcagctgatgaatgagttgctctatattgcagcagaaaagagggaagatttacagcaggtcgacacgattttcgtgtatcactttactccttttagtccatattgaccacatgacgcaaagaattgattccatttcaactttagaaacatagtgacatatggactaagtagtctccttgaaccatagaattagccgtgtgaaagtcaaaatagaattacgagtgtccccaaacagctttcgcatacttacaaccaaacagtacgtgtccaatagactcccaagcatgtgagcataagaaataattagcagttgtgataaattttattttgactaattttgtagctactg

SEQ ID NO: 65723 - DNA, 632 bp, Cannabis sativa
aaaattgaacttgtctttggtacagaaaagtttgccaatttaacaagcttcacaaaaagaaatgtctgaacattttatttgaggactaagcctatttacaacaatttttaggactctagatgaggggtgaccaagtctccaattccaaagctgagagttattggtagcaatttgtgtgttcttagtgcaattgaaagctcctagtgcgccaagaagatgagaagttgcagaagtaggggaaacatgcagactttagaaagatccaggttatacaaccctcctttaagagtaccccaaagaagtacttggctcgtattcttgttcttaataagacatgaatcaaaatcaaaaagcaagattatgttattatccgttgtgatttttgaaatgcttaacaaatttttagtaatggcaggggcataaagaatgccttttaagactaaagaattattagaaacatttgttggaattgaagtggaaccaattttagagatagggatagtagatccattacgaactgtgatcttggctttgcctttgtaatcaatagttgttgaaagatgttacgtgtctaaagtcatatgatgtgtggctccactattgatataccagccattgtcatcggttgaggg

SEQ ID NO: 65724 - DNA, 3259 bp, Cannabis sativa
tataacatcgtaagtatttttgctaaatacaatcaatcatttggcttttttattattattattaataattaatatttttcttatattttcatccaggttgggattccagttgctgctggaatgttgcttccagttactggaacagtgctcactccatcaattgctggggctctaatgggtttgagttccattggagtgacagctaattcattgcttctgagattaagattttccgaaaggcagaaacaaatacacggatcatctgcgaacatcaaaacttacataaattctgatcttgagaaccaaaacaagaaagtgaagcatcctattcctgaagctggatggaaaggggcatgatgacaatataatatttgcatattctttacccaatcgtcaatggacagcacagaagtggatatccaaatcattttagatggcactatcgattcagaagaggtaactttagtgaattgagaaaccctttttttagtgccagtgccaagcagctgaagtggataaacagatgaaacccaaccattttagagaaaatgagaatctaacatctgatttctcacataagatctaaataaaagattagttagaacaaattcattataaacttagtagattagaaccatttgaataaataggtttgtgcacatagtttcaggactgttaattatttttctgtactttagttccacttgcacccaagtctttacatcattgcttcagaaatggcccacctttgttttcgtcaaatatttatattagcagttatgtactcatatttgtaacagttttaggccattggaataaattatttctttagtaaatgtttatctctttataatttttatgtcaattaaagaatttatctaaagaaaaatagtgttcttggccatgacactacaattaaactaaaataaagcttgtaagacataatatacttgtgcaaatctctctttcataatcaaataaaaccaacatataattccattttcaagacaggtaaaaaaaaaaaacaagaaacgtaatcaaatcatgtgtcaataatacagtgactgtatatagtctatggatgttgttgttgtcatctcgtatggtgttgtatcattcatgcctatacataataataataagtcacatgtgagggtacattttgttaatatatgcctatcaacaatttgagagtgaacagatatataatgtcttgataaattgtaagctcacatatctttggcatggtaagtacaaaccccaatcatccaatctacactagacgggcgcctcgggagaaataatactacaaaacttctctattgttggatccaaagggccagaggaaaccaattgactcagatttttcttgaattgcatcaacaattgaaatacaccaccacatgaagtcctcttcaaccctaatctttctgtgtcttcgactttgggacggtttttaagtcgagggtggatttcattttggtagcaagaaaactgttcatcaaaccatgtatgtcatgccaacctgcattaagtgagagtggggtacgctcaaattggcgattcccctcctacaattctttctcaaaaaagcatagaagtaatttatgatcagcttctttatgaaccaggaatccttcctggctctgatatcgccatgaccaagaagataaacaactccagattctttagccttgtgtataaaagacaattctctttcgagactctgttctgctgtcaaaggcgggtctgcggaaggtgctggattcacctcttctgatgtgcttgcttcattggtaggtctgtctgtgtctctaaagtcagcaagaagaggaacaccaagtgagtagacacttccattgggagctatgagaaccctagaacatgatgtctcatccgctgaatctgaatcacaatccccatcactctctaatgatcgttcttgagcttcacgacgaatgaatttctcaaggctctcgatcagtagctgctcaaatgtctgatggttttctttgcggacatccttgtaaccatacctaagtcaatgataaataaaatacgtgaagcagagaaatacaaaaggatgagcaaggatgaaaaggagaaaaaaatagaagtgggttaatgagttacgcattgataatcttagctagttttgtcagggtatgacattgtcgttgatcagctttcagaaatttaataaggcaatggttgtgatggttcaaccacttagcatcaattagtcaagcccagccataaaggctatggtgggctccataatatgatgcattttctctctcatttgctaagtgaagaaaagtaggaagagacctatcatgtttagctcgagttgtctggttcttttccttttttatttggaaaaaaataaacattgaattgtattacaagaggagttactcgatggaatcatgctcagaatgcttcttgctttcaagggaggtcttacacgaccattgtgatatgttcttagcatttaaaaagtatagatagatgggatcttaacataataaggattgggcatgttaccttgcaatgcaacgaaagatgtgatagctttttgggcagactcgccggaaaagaaatctttcactttgaggaacaacaggaactggtacatacttgatgcaaacaaatataaccattgagtgaattgcagggagagtagtcagaaaatggccaaatattgctggtatacccttcaccagctcgttatataacaacccaatgccaggagctctcattgtcccaaggttggaacccaattgccgcatcaaatccatagacagcttttgctttacttcagtttcatacttgagcttgctcccataattccagatagacattatgaaaaacataattacagcaaagaccaagataatccaacttccatctcccacactccacaaaactgaagagaaaaagaccaattccaatccaaggaaaaatgtaataaaacttaacactatgacaatgttgatctgccaaataagcagcataacaatggttactaatatcgttgtcatcatcattactcccaactcagcaattcctgcaaaacagaacaagttttagaatggttaaattcttgtatgaaaaacaaaatgagcaataggaaacaccaatgatgttaatgtaaatgaacgttgctaagcctaaaagaaatttagagatcgagtgcatgcattaaatgctagatataatctaaacccaaatgctattctcacaaagatgataaaca

SEQ ID NO: 65725 - DNA, 1042 bp, Cannabis sativa
tttttttttattactatcccaattactattataaacataaacaatatatataaatattaaaaaaatgttattactgtagcaaaactgcatacatgtcatggtgcagccttttatggaaaagttcattgagaatctgattttttttttttttttgcagcaataactttcattcaaaaagaaaatataatgccatacaaccaagaattcctaacaaaaggaatcttatatcaatatttttagaaaattctacaatattcccttttgaaagagatgtattaatacatctccatttgttttcataaccgaaataattttttactcaatttttttctcatagtcatgtaagttatagttatttaagacatcctacaaaattttaataaattcaaacttcacttcacttcacttctaactttacattccatactccctatttctatccatactaatgagggtctaatagtggtccgataattgcttgatgctacctatttttttttaatgtttttgtatataaaaaaatagtagcatcaggacaccatcagattatcattagactagattctacatttatagatgttaagctcattatgaaagcatcagaccactatcggattaccatcagatcatatcttacatttaaaggtagcatcaggccaccattagacattcgccttcaatctttactcgttttaacaatagaaaagtattgagccaccatcgagcctcgtaaaaaaattatataaaagtaattaaaattataaaaaatacataattttaataattattcagtaaaaataaaatgtaatattcaaattttaacagtttcaatgatttttttatataattttatataaaacattattacaaaattatataaaaatattgaagctataaaagaacacataactttagtaattgtatcattaactataaaaataaaatgtaaaaaaatagagtacaaatttgagtatgtataaaaaaataggttgaccagaataaagtatgacacaaatctaagcataacacgaattttagcatg

SEQ ID NO: 65726 - DNA, 769 bp, Cannabis sativa
gttgttctggtgttattgtggtgtttctgtctttgggtgtagaagatggagacctcgttttttatttttggtatttacaatataaaagaaaaaaaagtcccaaggcagtataaaagttattttttccgtgtggcagtatttttataaaaattaggtcaaactctaatatttttgtaagtttccctctttttttctaagcatttattaattaccaaatcccttctatcataagttcacaatcttttttgtttcattttaggtttgttttagagcacccacaacaacttttttaaaatagaaaaattttaaaaaaatttaaagaactatactaaaaataaaatatgcgacagtagatactctaaactgcttctttattttaatttttttttttaaaatacactgtgcatgctctacatttatagaatattattcattgctctatgttaagcaaaaatttcacatttagagtattaaaaataaatacaaaacaaaatttcatctatgccaaatttacagcataagagttaattaatttaagttcgacccatccaagattataaaaataatctcttaattacaatcttttgcttaaaggaaatatcttttgattccaattacgatgatattaaatgatttgaaataatttagggaaatttagaattgccgctgaactcagtcaatttaattaaccgatctgcctacataccttctttatgaaggatcaagccacttgtagttcagaatgaagtatttttgaatttgaatataa

SEQ ID NO: 65727 - DNA, 1336 bp, Cannabis sativa
gacgaggatgattgggaattgcctaatgacataaagaacatgacagttggagtgcttgttgagaagaaaccaatagggcgacccaagaaaaaaaaaggttggaaggattaagtcaaaccaaactgcttgtaatagtgaaaagattgtgataaaatgaacctgtagcaagtgtggtgtaaggggcacaacataagtcttgcacctacagaggttaaaaattcttgttgaattttagtaatcgtattgttatgtattatgctgttacgtattcttgttgaattcctgtagactttgttaaacattatcatttgtggcatgaacaggttctcatttacttactgcaacattttcctctaaaaaattggttggtcccatgctggttcgatgtggggcctgatgccatcatagatatcaataccactattggacacatattaggctagcatcgggcaagcatcaggccaacaaaagttttgaaaaaagcaagttataattagccacattgacaccatcaggctatatatcgaaccgacatcggaccatatatctgacctaacaaaaaagctttgaaatatgtatttacaatctagccaatataaaccatcaaaccttacattggagccatcagaccatcatcgggcctaacagaaaactttgataagtttaatttagccataccttaaaactttataacatctaaaagtcaatattttaacatagcaagtcccaatacagtaaaaggaaagttgtgacaaaataaataataaaaagaatacatagttcattctaggttttggtaaataaatctaccactcatatgcatctaaagggcggtattttatcgtcatttactagatcgaatggcagatcaagaattttataatcgatatactctgtaacgtacattccccaattgccactgcattagtatataaacaacaagtaaattatgatcatacttatcaatgtattaatgtacttagtaaaagtattacctcgtgtttgtctgtgatacaattgctctgtcctcaatgagttcccaatcaaatggtctgacttgacttttgaaggttgtcatttgaggaaccatgaccatgtagtgggtgtcagttatacgagatttgtccataaatgatgtgaatattccacagaaatcctccatcttcttcaaagaaccagaggtgattgagctaatacttgaattgaagacgaataacttccataagtctaaatttacctctagagtcacccaatgtttttaagcctccaagaagatggacatcactacaaattaggcttttagtgacactatatagtaacacgcataaaagtgtgg

SEQ ID NO: 65728 - DNA, 604 bp, Cannabis sativa
taacgtaagttataggtagcttttcctttcattaacatttattaagtcatgatgaacaataacttgattaaccttacatgttttgcagtgaccataaggagatgttacaatcattggttctaagaaatcataaaaataaacaaaaatgggttgcagaccagcatcgtcaaaatttcattgggtggttaatgaataccattctagcaaagttgaacgaaccgaatcatggagtatctgatgtgtctagtcgtattttccttggacaaaattttgtagtagcaaagcatgaagcgtacattgtaaggggtaaacattttcatatatagtcaagagatgatgctcgagaggttcaaaatagtggcatatgtatcgtcgaagaaaccatgcatcttgcaagtgcaaaagatagaaaccttattttaggtaccatgacatatgatgaggttattgaagaaatataggagctcaattttgcattctaaattccaccttttgaatgttcttgggttgacaacaatgttggagttaaaattgacgagcttaattttactttggttgatttaagtaagaaaggaagcaagaatgatccattcattatggctag

SEQ ID NO: 65729 - DNA, 1634 bp, Cannabis sativa
cagttcaatttgattggttaattacagtaattaaaaagaagagtatctcatcaatgtcttattaagaatatttggtttgggcattgataatgccagttattttcacaagcttattactttctcctacttctaaagactctaaatactgagatggggtgttgcaatgaaaaatgataataataataataataataatcagttcaatttgattggttaattgcagtaattaaaaacaagactatctcatcaatctgttaaagaatatttcatttaaccactgataaagcaagctcttttcacaaactccaaattctgagaattaaaaacaaatgataaatctgaatggaatttcaaaataataataagcagtagaatttgattgggtaattagtaatgaaaaaggagtatttgatttcagaatagtggagatattttgttacctcaacaatggtagcaccgtaagttgaggccggagaagagagggcgaggccggcgccgaggagaggagagtggggataatgaatagaggcgtgtagtgtaattgggaatttgggagagcaataacaatccaaatgcctaaaaatgaaaccctcctctcctccccaattaaggtatggtaacttgtatatgaatttttaatgttttaggcaaaatatatatattaaaagaaaaaaaaaaaattaggtgatgcaaattccttttccacttttttttttcttttttttttttgttttgataatctcgagaaccacgtgttagttataggagtttatatttcagtttacgttaattgggttatcgataattacctcaaaaatttttatcacacatatgacactacctacaacaaggactaagcttatgtggtgggtttcgaatcctgattcaaacaagaaaatatgtcaataaagataataacaattggttttaggcaaaattattagtaattggaattgagtaattacaatttaattattaattagaggtaattataatatattattttttaaaaataattaagcaatgtatttggtttattaaattatgtaattattaacttatttactcaaacatcaaatttagaattgatatacaattattacttaacatttaaatacaatgtattgtaagctgcttaataataacacagttattttcaaacgcactcaaaaaaaataataattatatattgtaattgataattaaaataaaaaatttcggtacttaatatttaaaaacaaaaaataatttttaatagttaatatttaaaataaatttttaattattacacttaattttgatgggatcttaagaattagtgaatataattgaaactcctcaattacttctagttatacatgttacatttttcaattcttacgactctagatgtaattacataatattaatatttttacataattaatgttagtatactcattggacaaacataaaaataagaatttacttaattattattcaaatacacattgtattttaaaataaagtacaactacgctcatatgtaattacatagttacttttaaacgtaattgtgtaattatttttcaatcttttaaatatatatatctattctatataaagtgtgtctatataactaaattcttggttta

SEQ ID NO: 65730 - DNA, 940 bp, Cannabis sativa
ggggatcaaacgttttggggaaaaaggtaagttatgccctaggtttacagggccttgcgagattctcgagaaggttagattggtagcttaccatctagtctttcctccagcactttcagcagtccataacgtatttcatgtctttatgttatggaaatacgttttggatcccactcatgtgctgagttatgaaaacctagaacttcagtcggatttatcatacgaagagcaaccagtttacattttagatagaaaagataaggtccttcgaaacaagaccatagctttggtcaaggtgctctagagaaatagtaaggtggaggaagccacgtgggagttggattccgatatgaggactcaatttctagagttgttcaggttagattttgaggacaaaatccttttactagggtttaatactgaaattagacttttaattatgatttataaacttatggagatatatttgaattcgaggtgtgttatttatgttatatatgaaattttatatttctcatattttatactcgacaatattggatcgcgacgtttggccgataaaattacattttcttgcaagttaatattttagcaatagcagggcaatttagttagacatttagtgtctggattaggcgaggtattggtaatggaccattttacccctaggccactttactatttaagttttatgtgagggattttagtcattttagattttgagggttaggtggctccctcttttgttggcagctggccacttagatattaattgaattaagaagtttctttagttggaaaatagacaaaaatagaaaatttgacattttttggctctctctatcttacttcggatcagctgggaaccaggggaaatcaattttatttctacaattcaagggggaatttgtaacgccctaatgctaaggcacgctacagt

SEQ ID NO: 65731 - DNA, 905 bp, Cannabis sativa
aacaaattttaaagaaacattatttaaagacgagattaaggcccgacaatcacaaacaagtaattcaaactaagaaggcattgaaattgagctattaatagcttgaaccaccaccaaagcatcagtttctattactacattggaccattgttttctctctatccaacttaaggcctccttaatcccaattgtctcggcaatttcaggcttaaccaccccaaaccgagatgcaaaaatagcttcaagaaggattccgttcgtgtcacgagccacacacctaaagccaaacttgttttgttcctgaaaaatagcaccgtcaacattaatcttgaccatttgtgaacttggtttcaggttgcctatatttttagttattatgaaataatataaaacattggtcttcaataccctaattactcgtttgaaaccgtagattggttttacttatcgttcgctttatcaggcaacgacagtgacatacgtagctcatgaatgacgagtggtaatggtactttatgaggcattgggattgtctggtcttgtagacgtttaattgttatgtattgttgaatatatgttgaatggtgagtatgtatgctgtatcaagatgttattacttgtattttgcattgtgtgtgatttaatagctttttttgctgagtctctgtgactcacggatgctttgtggtgcaggtaaagggaagggtaaagcagagcaaccatgagttagagattttccagtagtgtacatatcaatcgcagtgtcacggctactagtggacaagatccacccttttggcagtgttttgaaatgtaatcttattttgtaaattaaattttagagcagaatgtaaaagtttatacaggggatttccataatcaacgacagttttatgtttaataac

SEQ ID NO: 65732 - DNA, 614 bp, Cannabis sativa
ttcaaggtgctcaaagttcgagggaaaaaaaatcttaattagcctataaataaataagtatacttacagtctatagataccctgccccattttttaaaaaaaaaattaaatttatgctaggggtttccattttaatggtttttttttttttgaatataataaccaatttattgctgagatcagttaaacaatacattggttattaaataaggaggaaatacttccaaccaagaaacctcattttctatctgtagtgcatatcatactaacttatgtgttgcggtattaccatttcgcattatatgtagtagacatatactcagaaagacaaataacaaggacctaataaatctaaaaaacaactccaatcaaagacaccttcagaaaaaaaaaaggactgaatagacagcaacttcaacaattaatttgttacaacatatcgctttttaatcaaaagttagactcaaaatgtgtttacagaaatagcttttggtatttttgtaaaaaaaaaagataattatttgtttctaattgtgttttgcaaatatttgtatgaattgctgcatgtattttcataaggctaattagaattttcgtcccctgaactttgacat

SEQ ID NO: 65733 - DNA, 998 bp, Cannabis sativa
taacattgagacatgcaatttttacgtcaattttagaaagagttttagggatctacttgataagctcctctttcacgaatacttttcattctacttgaaaaaagtagaggagtgaattaagtttatacaattggtttttatatatctttgagtgatggtagaccaattaaagtagatttaacctcttgtggagatgatcattcaagagatataaattgttgacaccatgacttggaattaaatcataaacttctttgtgtgggggtgattcaagttgtgttagttttgatagtgatgaatccactcatagatgtttttatatgctcagaaagattctccatcttttgtagaaattgttgagtgctctgtattgtttcatggaagctttgccgaaactataagatattttgtagaatctgcaaagttattggctgctataatttgaatcagctcagcagtagttggtgtttcactatatagtgcaacatgactaggttgtagataatgaggcacataagtttgagtatatttgttacctttcttctaaaattgaatggtgttacttgccagagcctctatcaaatattcaatagatgaaccttgattatgtggttgtgaaagacgatcgtagtaatttggctcaatatattgattattttcaccatataatgtattagaataatccccccatcgtaaagtgtaattatcatagtagagatcatattgatacacttataacatggatcaatatattgttgatattacattgccatgttttcaacacaagaccttaaatttgaaacaacaactagaagaaaatattagtataaaggaaaaaaaaatgaataaaatagtccacgataacgatgctaaaaaatttgatgcatgttgtttactataataaatttattattttttttatttcaatattaccatttacttcaatacaacataaatataagtcaaattcatgttgactattatcaatttattattca

SEQ ID NO: 65734 - DNA, 1033 bp, Cannabis sativa
ggacagaaatgttagacattttatgtgaatagatgaaatatataaatatgtatataaaataggaaatacaataaacatatacactatataactatagaatcgaaatacgtatagtcattaaattttgagcttccatttcacacaagttttgatttgtaaataaggaaactgattagcgtgggtaatcgagcttccaagctctctctactctctttagatggatttattatattttcacagaatgagtaatgagctcggggactgatatcatatatttatataggtgagacattccatcaaaagtctctgccacattaattatcagaatattttgacaattaatttaagatattaaatcgagaaatcaaatatttgataaatcgtaatctgaccatatatagaacatcaattaattaattgtgtctaaattcaataaaatataaaatattcatatatcttaaattaatttgttgattctattcttaaaatagaaattattttaatattctccccacttggctagcatttagatttatcacttaaactcaacgattatccttgctatataacaaacatatgaatcgtggcgatatgtcctcattatatggtgagtattatcttttatgtattacgatatatttattacataacaatgtggcaatgtacttaagtgaatcctcttacgataattttcttagatgaaattaaggtgcacataaaaatatgagaaaatattgaaattagagttttattgaataagtttagttgtaccaaaaaaaactgcataaggggtaactgaatcccatatttactttattatccttgaatttgtgttatggtatgcatttaatcaaggatattgtgatcacccaattcagtatcgcgtgctttgtgacagtcagggccccgtgatctaaaggaaaaagaccgagagctgtacaatcccacattgcctggggaaggtcatgtgtgatgatcctgagactgtgtaggtatgggactgcacagtttaagagggcttaaatggattgat

SEQ ID NO: 65735 - DNA, 698 bp, Cannabis sativa
agccattctaaagagggacattcaagcctttaggatgtgactatgtttcaataataaatataaaaaaaagttatttagggtttttattcctcgaattatgatttatgtattattatatttgctaaacattttagcttgttacaaatagttcttgaactattcgcagtattataaattggaccttctatcaagttttgtcacgtgtgataaataaaataatgacataactgcttaattaattgtcatatcaacattacatatataatttaacattaaaaaataaaaattatacattttaaaaaaatctttcaattaaaaaaaatcaaattattttcttaaaattaattacaaatgtgatattgacatagcactaatgtggcaattagctaagcaacaatgtcatcattttatatgtcatgtgacaaaaagaccaatttacaacactgtaaatagttcataaatcatttttaacgggctgaaaagttcaaacggcacaatgacatagtttgaggataacagttttaaataacctacaaatgacaaaaataaccatgtattttttaaaataatacaaataggacattaagctcaattttcgacaattttttttaaataaccaagtaaagatcatttctaggacgaacaggtgtagaaaacgtaactagttttgtcataacacatttatatcagcttattgt

SEQ ID NO: 65736 - DNA, 3039 bp, Cannabis sativa
ttattattattattatttcgtggatgaacattattataattattattattattttgataaaataaatgcaattaaattttcaaattttataatttattacatatattattatttctatatcatattgatcatattgttattattattattattaatattaattaattaacataatcagtaattattgtatgtaattgtatatacagcttccgaagaagcttaatttgcatgtctgatattctcttaacaaaagagtgactcatctacttaatatcatgttttcaatatgaatcaaaacagccgattaattaattgaatgaccaaacaaacaagactatatataatagttaattaaggttaattcactatgtaaaaactttatttatatgcatgtcagtatatacctgtacacatatacatatacactatattattcatagatacaattaattaatgagtaggaaataataataatttccaatattatttattttcaaaaaaattaaatgaaaatataataataatgttggtagattgttattatttcccaacatctcaacattaattaattaaagctactttctttcttatgggagagacttaatcacacaaatactctaaaagtctttatctctcccatatggaagaaagttggctttgattaatatgttgggagacaacattgacacttgtagtttaaactacaaactttcaaagtcagctggtaatttaaagtcatttcaatcatgttatatcacttctctctcccctcatatgctatacaatttcttttcttattttgtggtggttattttattcaattaataattattataagtcttaatgatgttataatttttcttttatttttatctctagctatcaattaattgaaactttataaattgaagaaatgaaaaactgccactacctcacaaagtttcatgcactactacaattatattttttattttcagttttcatctttaataaattaaaaattcgaagataaactattttaatacccatatcattgcttttttagtgaaattttaattatatttttggtctttgttaataaccgaagtaaaaaagggtttaattttttttttataatagtagagattttgtaggaggacgtttgtcttcggtaattcccaaaataccgtggagccctttgttttcggtattttgggagttaccaaagacaaatgtgtgtatattccaatatcatgcgagaccctttagtttattacaccccctttgtagaaaccccttaacccatgacacacgaccctctcgttcaaaccctcaagacccacgaccctcgctcaaaccctctttccgatcgctatagctacccctgacgaggatgacgacgaaggcaaactgaagagaaaaatagtctatgtcttcggtttttataaaataatcgaagacgtagcccccatttacgtcttcggtattttaaaacatatgtcatcgcctcaaatgacttcagtagtgaatttttaataaaaaccgaagataaactggcttaaaaactaaagaaaaatgccctttttctagttgtgatgttagattatatatattggaaataaaagccattcctatgtttttcaatatgtaatttgcaaacctttctttggccacatgatcaaattctagagagagagagagaaaattagaacattgaagaagatagatgatcatgatgttaactggtgagatttgggtctctaaaatgttataataatgtgcattgggagattctaatagattttagtattattatctctcaaagtggttcaataaaatctataataatattatctctcaaagtggttcactaatctattttcgtagtattattagcaatatatatcatgatcataaataacatccattaattatcataattaataacatgttcttaaaaatattaaaataaatatatatgataattcatataagacatgatctatatattatattagctatattaaaattgatatatataataaatataactaattattacataataaatgaacatattaataaatacaattaggtgacaagggagtaaccagcaccaatcatataagtagaaagtaaatgattggctgcctgagatggatgaaaagcatcccaaaaaatatgatctgatgcattcgaacatgttccaattgataatgaattacacagtaatgctgtttctaccatccctaatccacaacaaccctttctcgtttcataaaaccctacaaaaaatacatatgattattatgtttaattatgtatcaattatatatataaaattaaataaaaaaaattataaatttattattacgtacgtactattttcgataggattgttgataagattgtacaagggttggtatatatccaatacaagcaaattcaggtcaggtaacctgttccttaacatttgtgaggtggaatttaatcttgtgttaaaatagatagcatcataattgagtctatccacacattgattattgtttccaaatccaaataatgtaatggctccaggcaaacaccctagaggtcccaatgaagccactccaatttttcttgctcccattgaatgtaaattctatatatataaatcataattatcacaccataattaaaaaaatatattataatcaattataattgtgagtgtgtaatactatacaaaatcttacatacattttagtcgcaacaaaatttgtaattaaaactgaacaagttataactaattataaaaattatttatattgttaattacaaaaatcacaattttttgtaactaattgtgttaacttgtattaaaatattatattttagttactagtaattttttgttgtgactaaaataaatatcattaaaaatattatgttgtgactaaaaggagtgtcttttgtatatatgttaagagttagttagcataagttagttatttttactgtctttctgttttttctgttatttgttctgttacaagaattagttggcttgtatgccaaatc

SEQ ID NO: 65737 - DNA, 612 bp, Cannabis sativa
gtgtttcaaactcgtactagtttcctgccaaaatttgacctgtaattacagaactagctaattgatcagcccaagggcttcaatctttttccttttaaagttactcatatttcctattaacttttaaaaataccatataataaagcccaatagtttctcttcctaaagcctactaaattttgtgggccgagactacttttacaaaataaatttgattaatggcgaaggggttgtttgatttcacaacctaaaaactgttttcaattttaaaaaacagaaaacaattttttaaaaactgataggagtcgtttggcaaaaatttttaaaaattgagttttaaaaaactagaaaactgaaaaaacatcaaaatgttgttttcaatttttaaaaacaattttattttgtctaacatattatattttaaatttttactcacatactcggatcctagatccaaatcaaactcggacccaaataggttcatgtcatggtatggtgttaattatattgattttttttaatatgaaaaaaatttaaaaatagttttaaaaaaatttgtgccaaacaccattaaatttttaaaatgacaaaaaaactgttttctattctcac

SEQ ID NO: 65738 - DNA, 829 bp, Cannabis sativa
aagaataatttaaaagaaacataattccataatctatccacgtggatgcgctaaactttaatttctttaaatgctgggaaactttcagccaacggccgtacatgatctctatcgcaaattcacataagtacaaaagaaacataaaagctaacccacatttcccattatattaaaaacacaaataaattagaggcaagagggattgaatcttgcactacagaactgagtgtagtacgatttagttgtgttttaccaagtaacgaaggtgcattttcagggtaacaaatacagaaactggaacataaatgatcccaatcatatttgcccccatttcaaaccccattttcctacataaatttacaagttaattttttttaaaaaaaatgcaataaaatcgaaatgtccaatgcccaaacgaaacattgccaaacaaaaaacaaatacataacagttcagcagaaagatggaacaactgaagtcgaacgccaacacaatcagtactaaccaagtgatttcacagaaaaatagagcaaggttttaaaacaagaaattacctccttagcggagagctcggatgcataagggaggacaaagttgacagtgagctttgaaggcatggtagatggagtgggagggcgaggcttcatgaaggcaagaggagtcttgggtgggtcgatgttagggatcactttgttccagctctccacaaaggacgcgtcaatggctggagccgccgaaacttcggtcgagaagggccgagctcgggctgagagaaagggccgggaaagaactctggtagcttggcgaaacatggtggctccggctgggg

SEQ ID NO: 65739 - DNA, 601 bp, Cannabis sativa
caaggtaaggagaatgtggttgctaatgccctttctcacaggtatgccataatctttactcttgattctaagttacttgattttgaacacattacggaactttatcctgttgaccatgattttggggaaatttatggaacttgtgaaaaatgtggtgaggggaagttttataggcatgagggttcttgtcttgggagtataggttgtgtgtgcctaattgttctttatgagatttgttagttcaggaatcccacggaggagggttgatgggacattttggagttgctaagaccttagttgtattgcaagaacacttcttttggcccaacatgaaaagagatattgagcgaatttgtggtagatgtgtcacttgtaagcaagctaaatcgagggttcaaccaaatggtctttacacacccctacctattcctagttcaccatgggttgatatctcaatggattttgtgttgggtttacataggagtaaacgtgggacggactcaatttttgtggtggtagacagattttctaagatggcttattttaggaaaatttacttctaagtacattaattgtaatttaattttaaaaatatggtagg

SEQ ID NO: 65740 - DNA, 872 bp, Cannabis sativa
agtgttgcacctctagggcaaatttgcctacccctcactattgggcaagctccaaagagcataattgtaatggcacaatttttgatattggacattctttcagcctttaatgtcatgttaggctgaccaaatttatatgacctaaaggttgttacgtcgatattttattcatcccttaagtttccaatgaagaatggggttgggtgcctgagaggaaatcaacaagttgcacgggaatgttacaatcttgccctaaccaaggctaaaaggaagtatcctctagtcagagttcggacaagggaaaagacattgccaaatagggaaccgcccaaggcggggatgaagatgtggatccccgacttggggaaccaaatacaaatgttggcccaatggaagaactagaagaaatcagaatcaacccaaatgttccgaccaggaaagtcaaaatagaaaaaggtttgttgctcgaagtaaaatcagcatcgataaaatttttgagagcaaacctggacatttttgcatggtcacatggttggaatcgatccttctatgatttcacatgtattaatcctaatttttggcctgttcaataaaaaagaagattgttggacaaagaatgagccctagcgctgaaagaagaggtagaaaagctgtgcagcaataattttataattgaagctttctactcggcctgggttgctaatcccatactagtacccaagccaaacaaaaaatagcgagtatgtattgactttgccgacctcaacaaggcgtacccaaaggactgctttccacttccaagaatagatcaacttgttgacgcaatagtaggacacgaaatattaagtttcatggacgcctattcggggtac

SEQ ID NO: 65741 - DNA, 941 bp, Cannabis sativa
tacactgaagcacacattaattttaattttctttttctttcttgacattttatttctctctctcaatgcatgtgtactgaccattttttttttctttttttctctttcaaaaaatatcatcatatatataattgtactcttattctttttttcatgccatcaaattctttcatctttttggacacatgtgttgtagaacatttaatatttattaaaaaaaaattaatattaaaatatttatcttttaattttatttttttaatttaaaaagttttttttgctacatttataattttttggtcttaaaaattacattgctgcaatctactctttaatgtgatcattttaatatgtgagaagcatatatttgttttactatcatcgaaaaagatgagcagagtcaaaagtaacattttaatttcataattgttaacgcaaattttcattaaccaaatttgagcctgaatagtgataaacttgcacagaaatataaaaatagtaaagaaataaaaagaaaatgatgaacacgaaggttttttacgtgatcttgcagttaaaattctacatactccacgagtcaatcttattagatttctgatactgttcttggaccttttttttcttatgaattttttcttcccttttgtagtctaacttgcctctatttataattacatagtcagacagttaattacagagttgactgtaatctttacaacaattatcccttgaaatcgtgaggtttgattatatattacgtattacaaatgcggttattatttgaatatcacacagttgtgattatatacttttactgggtcaagataatcgtgtattaaatactttttaaatcacaatgtcctcggatgtctcgacaggaactcagtaccaatgaccttgatatcgagctggagcttttcccctatctctctgaggttgat

SEQ ID NO: 65742 - DNA, 1118 bp, Cannabis sativa
gaacatgatgctctcactcatccacttgatgctttcaaccaaaccaaatctagttttcattctctgagaactagtagatgagagagttcctttctcagttatttcaaacctccttcattgttcatccaattcgaaccttgagtgatagagtgtcatgcccacacatatcaagtcaagtactcaatcatagtgactaagacggtggtaaccaacccgaaggagagaaagagatccaggttcaattcttgataatgctctgcgacagaaaggaatcaagggctagagattagaacggaatgagtcattatattccgctgcaactaatgtaaggttttctaattccttatgtgtttaatttcattgttttagagatattcatatttaggatgctaatcaatatacttattaataaatctagatcctagtaaaatattcccaacaaataaaaatacctatgaattgtgtaccattacctttgaggaatagcaaatataaattcattccttctgacaaagccttatattctgaggccatcaacaaccaagctttgcaagcagacacaagtttatacctgcgaacctcctaatactatgtcccccagaagatataggtttgcaaacaaaatttcagaccataagtgataaaaaccgacctcactccatggatctagtccaccaaaagtgtcttaacacattaatctaactcacttaaaattttggtggggagcataaacacaaataaagataaatcggggtagcttggacaacactcttaatgagtgttgttctaccaggttgtgataaaagcttagccttccatcccttatttttcaaatgacattatccacaacaaaatgaaaattcttgtaaactcttactttgagcaaaaagaagattaccaagaaaaacttcatcatttgccatcaatgaacatcccatactattcaaaatcatcatcttcatatttggatcacagttctcagaaactaggagctattgttgaactaccacctcgaccaaagacaatagcaagataaggcatccaacacctcaatattgcttgaatttactttaacaaaaataaaagtgtcattgatatatataatgtgggagatggaa

SEQ ID NO: 65743 - DNA, 1213 bp, Cannabis sativa
ttttttttttaaagaaataaaaaactcaaatttctactaaaataacatacatttaataatgtgggtattatggttttactttattactaattattttatttttattttaaaatgggagcctttagtagtggaggcctaaaccgattgcatatagtaatactaaaataatttgcacacgtccaaaattaatggagcgaagtctcatcatcacaacaatactccaaccttttcatcactacaattaattcctctgttgcttgctagctacagtatcttagtcgataatgatctttataaggtacgaacgatcgagagggttactaagaaagttaccatacaacactctgcttaactaataatatcgaaacaaatgttatcgtacgtcacatgtgtcactagcttatacatgtgtatatcataatcaatcatcattatgataatattatatatagggaaactctactgtaggatcaatagtttttaccccatcgtacagggaagaaaattgtccaatcacaagtcaaaaaattttaatagtatatatatctttataaaacataaatagcaaattatctccattcaaaaaaaaaaaaaaatagcagattatcttcatgtagtggctggagaccacagttgcttttcaatctttctacgcgcacaaaggtaggtgagtcacacatttggccaaggaatcggcgtgaggtgcacttgcatttttgaaagatttgagctccctttttttcaaagtttggtattttcataaatccctttgctctcaaaattgaagatttggtcggtcatgtatttgatagtttagaattggctgcagaattcattactttatattctaacacagttggatttgatttaagaaaagggcatcacaggccaaactcagatggcgcaactcaaaactatacaccaggttcgtggttcgcaatgggaactgtggggtctccgttggtttgccgtggggtcgtcatggggttgccgtgtggtcgccgtggagtcgccctccgattgcctaggctggctgcagagaaatattctaatagaaagagtgtgggtttgttgcaaagatcaattaacagtattgtaatagagagagaaaattaagagtctcttttctaaatattaatattttttgttttttaaaataaatattacattcaggggtgatatgagttatcgttaaatttttaagacgattatt

SEQ ID NO: 65744 - DNA, 1403 bp, Cannabis sativa
cacctagggctcgggtcgtgacaggaggacctcaagaagtactacaaatgaccagatcatatgaatgatactctccagtagtagttctattaactcattagtaagagttagtttaaaagagctagtactcatgtccttttagcatggtctcttatctctctttaatggcctctaattggcatgttaggtgagggtagcaacttgacttctagaagaggacttttttattttttaaacttgtagaatcaacttatgtaggttgcacaaaaataaagaccaattgatgaataaaaacagtgttttaggtcaaatatattgtgtcaaaataactttctaacaagattaacttcttaaagttattcttttttcaattctacatctttacactcagaagaacccttagaaaattctcaagaaaggtctatgaaacttggtgaattgcaagtgaccaagagagcttaggtctgcgtgctcacttggggcacacccacacatcaaaacatgcaaatcaagctaggaagctaatctacatcaagactacactaaatcaaatggtataaatttactttagtcttgttaaagtgatttgcatagcacactagagtttataagtacaaattttggcccactcactacttgtacgaaaagttttctcacccgatggttcaaaaatttttttgattgactttctaaatcacaattcatttaactaagagaacgaaattggaatttctaaaataggataatcaagtagagagttatggtcgttttagtgcaaaaaatggactttttcccactgcgtgaaaagaggttaaccagttctaaagaggttaaaaagtttacctgaaactggtctatcagtttggaaattggtgaactggtttgcccactgcagtctcgttttccgcgtccgacggctataaacggctatttttcaccccaacactatataaactcaattttcactcaaaaaattaagttgactgagcatttatatcatatacctaacctattcaagtgagattaatgagctcccaagtttaaaatccaacaaacacttttcacacactttgagccaaaatttgtgtttattcattttaagtgtgctagcttatcactctaggtttctattgtattatcatatttgtagagtggattttcttataaatttcgaacaaattttcatattgtgattgaggtgaggttggcaccagtattgtaaaaaacccagttatagtgagattgtcactacaacaatgcaagaaagagattaatagtccttggttgtgcgaaactattgtaagaggcttggaaacacctttgtgaaaatttttccggttgtaagggttagtcaagcccgttaacttggctcgatattggaactcaaagctaggtccatagct

SEQ ID NO: 65745 - DNA, 1095 bp, Cannabis sativa
tcattattcattcagaaatgctagagggcatcggtggtacctatcactctcttatgtgttaatattgatattggtccaatcaagtatcaggtttcatataattgaatataataatttttaaagaatatcgctagtcaatcgcaacaggacatatagaggaagtgctagacaccattgtgcctaatagcaatgcccttatttgttatattaaaataaggaaaggtacgttacaattgcatcacattcagtaaaatatttcttttcttggtttgaaaataaaaaaaaaaacttgctgcgctccatttaccttacttattggtaacagcagttaccagtagtaccactatcttttttgtgatagtacctaagactcgataaaaaattaaagataaattgaggaatattattttttattcattaattaaaaataatttttatatattttattaaaaaatatttattttcgtgaatggatttcattatctaatatatatttttattttctatcacataatttacattaatgtaaggggtataatagacatcatttataaaaattgatacatcttaaagaatatagaagtagaattaaaacaaaaataaagtataagtatacaatgtaattttttcaatttacactagttttaattttttttttacacagttttaaatttggcattttaattatgactttttttttgtttttaaacttcatggtatttactatattacatgtaaatttaattttcaaaactcatatttaatctttagataaattgttcactaaaaattattcatcaagaaactagtttcgatcatttagaaattaatttttacatcataaaattatttttaattatatagaaaaaaatttatatatgaatttttaaattttttactcatttgacgataatcggttagagcaaaattcaccgaagattctttcttaaaaaaactcgtttttcacttttttattataaaactagtttcttcataaaaaaaactagttttaatataactagaagtaaaatttatatatgagttttttaattttttttatagtattcttttttatttatgatgatttattctatc

SEQ ID NO: 65746 - DNA, 595 bp, Cannabis sativa
aagaagagtttacaaatcaataagaaaagatgaaaaaatctcagtctaaactaaaagaaacttttccttataccatggtgcttcaagtgagcttgccaattttttcaagtcttctatttattttttttccccaacactaatcacacgcataatcccaaatcgtctacaataatttaggattaaaaaacaaatctttcattagtaaatatcttaatttacctcaatgtctttctaagactaaaagaaactttttctctttttttattaaaaaaagacgtttaattaattaagcttacacctcgcggtcattacaaaagaggttcataggagtggacgagatagcaagtcgcccaatccagttgtgggcaaatgcccacttggtcacattatgagccataaatttacaatttctagcagtaatacaaaataaacaaccaataaaggaagagacgactcttttacaaaataagaaataattctccaactcccatctgggatcaatatcgttgaaggagttgattactactttagaatcgctttcaaccaagataaacttgtggtcgtaatcctatgccacttcaagagccaaacaaac

SEQ ID NO: 65747 - DNA, 925 bp, Cannabis sativa
aagagaattgtaacattaggtatttttgccttcaaaaataaatattaggtatttaagtgtataaaatctgaaacattaggtatttatgacgcaatttatcctattttttttatacgcattataagaaactgtttaaactgattaattttcagtactgtaaattatttaaaaaaatttcaaaatttttttcaaatttgcaaatgatcctaaataactacaacatacatatatgatcatgaaaaaaaaattgagctaaaaagttataccaaaacaaatagggatctactacaaaaaatttatatactatatacatgactcaatgcccaaaattaaggttggttcaatgtagatgtaaaacaataatattgaaataaattaatagtctgaggtagctactgtctcgagatgcttcaagctacatcacgcatatatttatattgtacttttataaatattttttcaaaagaaaaaaaccactcttaggaccacgaggactctcctttagaaattggaatataatatatggtaattaattaaaaggaaaattatcttacatattattttttttattatttttactgtttgctatagttgttatatgtgattgctatgtaaattggatttttataaaaatacaaaaaaaataatttaaaatataaacataaaaaaaacccaaaattaaaatatatagctagtgtcatttatttattgaaaatattacattgctaactttatcacatataatattagcagatgctataaatcaatattgtaatcattagaaggaacttgacttttcttccaaattatttttaaatcacaaaagcaaaagggaaggaataagaaatataaatatcatcaattaatggagctttgtaatatttgttcttcttcattggaactttctttcttcctagaagaaaaa

SEQ ID NO: 65748 - DNA, 1547 bp, Cannabis sativa
atagtagtgtaatctggaggttagggatgaaagtctgatgtagtctgatgcaggcccaatgcctttctgttattgaaatgagcaaagttgaagaccgatggtggtccgatgctacctataaatgtaggacatggtccgatggtggtatgatgcttatctgttgttgaaattagtaaaggttgaagacatagttccgatgatacccatttttatgtataataacatgaaaaaaataagaaaaataggtagcattgggccactatcggatctacattgggcctacatcgaacctacgtcttcaacctttgctcatttcaataacagcaaagcattggacctacatcagaccaccataggaccttcatccctaatctccatattacactattatcgtacctaccatcagaccactctcgtaccccattgtaccatatacaaaaaaatcatagaaaacgcagattttaccaaaattcgattttttaccaaacaataaacaaaaaatacaaagaaatcacagatcgtttaaatggataatttagggtttaaatggataatatttttaaaaaataaaactaaccttccacattctcggttcgtgggtggttatcgatggttggggaaacttcgtgggtggtactcgatggttagagaacttcgttggtggtgcgaggtggttgggctgcttcatgggtgaccctcgaggttgaaatttggtgcattttagtttagggaagaaggagaagagagcgagagataaaagaaggaagagagatgagttggggtttaaaaatggagagggcatttttgaaataaggggaaagttgacatattcccccaatattagtacacataagttaatctatgcatatataattaaatttttttataattagtgtttgattattttaataatattttacaatttgaatttgttaaatataaattagttgaataaaataataaaaaataataatattttatatcaaaataaaaaaaaaatagatagctaattacgggtgcgggtgcgtttagtaatacttttttaattaagttttttttttgttcttaaaattaaaataatgaaaatatttttctaaatcatgttctataatacttttttactttttaattttttaatttaagaatctaaattttaaaaacaaaaaaaatcatttacaatttttttaaacagtttttttaatcaatattttggacttcattctcaacttaaaccttaaaaactgaactcaaatctaaccctgaacatggactcgcctcctgtcttgacttcgaactgagttttgacccgacttaaataaaatcaacaaataaaaataataatgaaatttacagaatatattttatttttcattttaaaattaaaaaacaagttatagaacatatttttacttttcaaaaacaaaattttaaaaataaaaatttcacttatattttggaaaaaaaaaacagaaaaattccaaaaagggtaaaatattacaaaaatacagtgggccggcccaatcaacatttgtacagcccacattgaa

SEQ ID NO: 65749 - DNA, 1080 bp, Cannabis sativa
tttacatttaattcatgtgggacaatgttctccaatattcctacctcaaggtggtagctatttttactcaccaatcttgaatcaccttggctaaccatctggatatcgaaagcccgctaaggatatggttctgataccatgttgagaattatgggattctatctcaaaaccaattggtgatgagtagagtagtccatgttcttatatataactcaatatttttacatttaattcatgtaggacaatattctcaataactcttaacatctagaataggagagatatagaatatagacgcttaagagagaataaataacacatatcaaagtacgtaaagacacattatagaaaataatgggcacatatcaaagtaagaccttgttagattgacaactaagagttaaaaagaggataaataaaagagatagtaatcaaaaattaaacacaagaatgaacagaagctaaatgattctgaaaaaaactgatcacaaattagccaaaaaggtcaaaacaatagttcatttgatggagtaatatttttttatcatttttcacctcataactaaataatttaactattctaatgtgagttgtgtaattaggggattcaaaatatctccacacaataggaccaacaagttggaaaagttgtccagatactgagtactgtagagaaggaagtgagttaattaattaattaattgaatatacatatatagccggcctagttgtttattggatccatcaaattcatgttatgtataggtgagtgagagatattgtgtcttctttctttttggcagaaagaaaggtatatcatatcctttttctctctttatttaggaaataatagacattgtcctattctaagtcagtcacatcacatgtaatatattttctttatagaggaagatgctttgaatgatgttcttgtcaccaaaggccatgtcaatattccaaataacttcatatgtactcaaatcatttaatgcaaagtgtgatttttttttttttttgaaattagcgtgatgtcattaaataaaatagaaattagacctcacggtcattacataataggtt

SEQ ID NO: 65750 - DNA, 756 bp, Cannabis sativa
ttttttcaaaaatattgtgtaattttatactgtggtattaagtttccactgttgttctacggtttttttagttgttttactgttgtttttagttgttttgttttgtgttctattgttgttttataaaaatataatatttttgaaaagatttccgtatgacatttttatgtaaaaattaatctaaattctagtatttttttttttttttgtaagttttcctcaaaaaaaaaaaatccaatcctcaatggcttacttgaatttggcaaggcccatactcttggaactgaccaaggcccaccaggccgaaacacttgtccgaatgttccaattgaaacattgttactattgctaagtactattcttcttctgtattatgctctctaagaaacaaaattactaccagaatcccaaatcccagctctgtataaatctcccaaccacattaactgataattaaattgcattagcttttaattaaattacattagttgaacatagaaaaatgatggaatgaaatatatatgaaaagccaattctttcagagtatctctatttaagtgatgcagatattaaatatagttcactttgttaaaagtctattaatctatttcaatagtgtactaaattgtgatgcaaatatctcacataagaaaaagtaattcaaatttagatcacaatatagcatgatacaaaatttgaatcacaataaatactataattttatatttgttataaatattaataagtatgtggatg

SEQ ID NO: 65751 - DNA, 939 bp, Cannabis sativa
ttttcgtcgtcttctctgtgacaattgatttcttctaaaattgtttgaaagatacataatgattgtgtaataagccatctcctccatttcagctttctctcctgatttctcggtaagtaacttctcatctttgatgactttggagacttttctgatgcactaggatccctttctgactttctctacatagtgtggagtctctcgttccatcatcaaaacttcttctccaattcggaatcttgccattgatgacattgattgttgcagtggaaagaatcttgattctgcgatcttgatcgataacctagctttgatttgtgggaaattttaactattgtgtaggatcaaactaacttcaaatgaatcaacaaacaattagcaatgacaaaattaaccaaacaaaataaatcaaagaatgggaaaagtaacagagtataataaagactacagaatcaaaaataaaaaaatgcaagaaaatcatagaaaaacaataccaagaattatactggttcaagtctgatagatcaatgtaatctacgactctactactgttttggaacaccaccgaaaattcctttattgattgagcaagaacacaattacaatacagttaacaacaattttttgtttgaattctctcaagcttcttcatctacagttctcctttacaaaccccaaaacccaatcctctcttttctctgtactctctctctttacatctcaatcaaagctctctcaaagaacttgtttactctgtttctggtgtttcgtgttatctttcaaatgaagaggatggttgtatttatagattgacgatatgaatcccaaaaggcagtgacttcagataactaaatagttaatttagttaagacttaaccgacttaactaactgtttacaatgagatctccaagtctgctattggcatcaagctctctctg

SEQ ID NO: 65752 - DNA, 3362 bp, Cannabis sativa
gtgggttgtctaggacgagctagaggagcagaagccactagagacgtcttgtaatcgaccaagaaactttttgcaaaattaataattccatgggcctgatcgtgaggttgtcctttgagcgctttgttcctgttaaaccagataaaccaagtggtgcagaggaaaaattctacgtcttctttggttagagaagagtaaatcatatgagctacatcatgaaacataatctcagaagagcaagaaaaaaatataaggataaaatagcgtacctttccagactcttcgaatgctcttacagtagaacaatgcgtgagacacagattcttccatgtttccacaacggtgacagcaaggggatgggataattttcctaaaggctaggtttttggcagtggggagggttgagttagtggcacgaaaagcaaaatgcttcaccttggcagggatttggagatgccacagatttttccaccaaggtgaaggggaggaagaagaagggatatcagaaggtgtgagagaagagaaactgaggtgataacctgatcggaccgagtaaacacctgatttggaaggctcccaaatcaactaatctctagaaggggtaaggggaaggggaatggaaaggatgtcctcaaccacatggatcgggtaatgtctatgcagcttagctttgtcccaagtcatggtaggggtgataaacgaagcaaccttatcagggataggagaaagggggtaatctaacgggaacccgggatccaatgatcatgggtcgtggatgtgttctgcccattgccgattttagaaataatacctttgtgcagcaactcttttccccaacaaatgctatgccaaacaaaggagggtgagtgcccgagagagctattaaggaaagaggagtttgggtaatatctagtagacaagattttagacaccattgagtttggttgtttcaagatgcgccatgcttgtttagcaagcatagcctgattgaagtggaccatggatcggaagcctaagccaccatcctttttagatttatagagctttttccagctttgccagtgagctttgggatggttattttcgttgaaaccccaccagaagttagccattatagactcaagggagtggcaggtagctacaggaatgcgaaagcaggccatggtgtaggtggggatggcctgaatgaccgacttgaggagagtttctttgcctcctttggaaaaaaccttattcttccagttgtgaaggtggccccaaactttgtcatgaagataatggaagagttacttttctgttcgcccaatgtgctggggaaggcccaaatatttttcgaaggaagggcagacagggatgcgcatgtaattggaaatcaaagtttgatcccgaagaccaacattcggggagaagtacagtgaagacttatggaaattcactttttgcacggtggccctttcatacacatcaagaacttctttgatgacgttacaagagttgatagaagcttcacagaaaaggaagttatcatcagcaaaaaggaggtgggagatagccggagcctgcctagcaactttaaaccctgggagagacctatttctttcctgctgatgcaggagggaggaataaccctcagcacaaagcaggaagaggtaaggggaaagtggatcaccttggcgtatatcccgggaaggggtgacgtttcctaaaactttaccatttatattgaattgaaaagtggtagttgagatacaggcaaagaccagtttgatgaaccggaaagggaattggaatttgcggagaatggctaaaatgaaggcccactccactctgtcaaaagctttggtgccatccagcccgatttccctttagatttaagcttgattgagtgcgcaacttcctgggcaataataacattatccgagataagcctacccgggaggaaagcactctgattgggcgagatcagggaattgaggacgagtttaaacctattagcaatagctttcgaaatgattttgtaaattatgttgcaaagactaatagaccgaaagtctgaaatggaaatgggttgtttaactttggggatgagtgtgatgagagtggtgttcagaggagcgatatccccattgccattgaggaagctaagcgcttggctgagaatatcattccttacataaggctagtttgctttataaaagttggagttaaagccatcaagcccaggggctttgtccaaaggcagttggaaaaaagccttcccaatttcctcagcggaaaactcttcgtccagaagagatcgatccgcatcaaatagagtgcagctgatgccttctagagccctctgtgtatcttcctccgaaggattcgtagaggtgaagagtaggccaaaatgggactcaatttcatgaatgatgtcctcctcatcagagatagtacctccgcttgccgagagaagattctgaattttgttgattttctttctatgggaggcgaagcggtggaagaattttgtgtttttgtccccctgggccaaccattgggtacgagctcgttgtttccaataagtttcttctttgtacaggagggcatccaggttggattggagatcttttatttttacaatagcttgatcatcccaaagggtgggggaacgagcggtctctaggtccttctcgagcttactaatgtgctttttgaaattgaattcttttttgtgattccaagagttaagacttctagcacacgcagtgtgggttgcaataagcttagggatggcctcttggtgagacgtggaactagtccaggacagatcgaaaatttggggccaattagggtcttttagccaaacattctcaaagtgaaactgtttgctcttatcattcggcttatggccctgggtggggaggtgactagttccaaagcccgatggtcagagccaaagaaacccaaacatgggtaagaatggcatccgggaaagtatcagtgcaagaattattaactatcccccaatctaaccgctcttggatatttttaggagagggcacattgttgttccaagtgagcagaggacccttatggtcaagcggggaaagattaaaagcgtccagcagctgcatgaaatcggaagaggggaccctatcggggttgcctccttttttgtcttgagaaaaaaggaaagcattgaaatccccaatgataagccacgggtctcgatgattatccctaccaatcctattcaaaattttccaagtgtgcggtttgagcgaatctaccggcaagccgtaaaaacaagtaagatgaaagaactcattaggaacagcacatgaaacatagtaattaaaatgactgatagattgggagag

SEQ ID NO: 65753 - DNA, 1561 bp, Cannabis sativa
  modified_base (32)..(59): a, c, t, g, unknown or other
aaatgaacacaaaggttttttacgtggttttnnnnnnnnnnnnnnnnnnnnnnnnnnnntcaatcttattagatttttgatggtttttcagggcctttcttcttatgattattttttcgcccccttttcagtataacttgcctgtacttataatcacatagtaggtagttaattacatagttcattgtaatctttacaacaattatcccctaaaaacaggagatttgattacatcccacgtaatatgaatgcggttaatatttgaaaatcacatagctgtgattagcccgcttttactaggtcaaggtaaacgtatatttaatatgctacagatcgtatcatctgggtcctctcgctaggaacatggcaaaaaccaccctggtagcgagctggagcttttcccacgtcttcccaaggttgatataatcctcatcttctaatacgtagcaaggtttatgcctcgccttgtacacttgaagttgcatggtttctcgttaatgcacacattaacagtttgtatctttttatctcgctaacaccattcagtcaaccaagttataaatatactctgtgaatttcacttttaacgggttattccatttcaaatatgattactattatgtgtgttgatccgtattctccccagtctgacacatgtccttctctgatgtgctagctgaattttgggtataacagatttgtcaacaagttaatcatagcaatttaaatcaaataaataataagtttgttaaaaaaaaagttttgaatcaaacggtttaaatgaaacaaacacaacatgtaacaatatgtgaagttgagatatttattaattatcgaattaaattatcatttaaataaccaactaattttgaaaatttagagttgttgaaagcaacctaaaatatcttctcaaaattttaaattcaaactaattttaaaaatatctaggtttatttaaattatttaatcaaattaaattaaatatctaataagataaatgatatgaaaataaccaactagaaatttttcatatcatttttttatcttataatttaatagaattaaaataacaaaataaaccaactttaaaatagatatggttatgcaaatattattttataataaaaaaataaatgataattttctaaattatatgtcaacatatctcacattaagccctttttcaaatttcaacaaaaatatctaagttatttatatatttaaaatattatttataaatatctgataagtaacatgatatattattgtcataaatatcacttttctaacttatcatttatcaataataaaatatttcataaaataaccaatttatgaatttaaaaatattacgggtaggaaatctataaaagtatctaggttaattttaaatttataattatctaatttatcatataagatagttttaatatagctgttgcctcggattttttccaaaatacatgacagcggctgtgtctgacacgtggatttcaagaacgcctcacccacaaacattggctaagtaacgtatggatagaaaagtgcatctcagggagtg

SEQ ID NO: 65754 - DNA, 959 bp, Cannabis sativa
aacattatccctgtaaatttttaaaaattttcaaatagtttacagtgtcgaaaatacgtttgaagttttttgaacacgcgtggtatactagaatatattaggaattctgtttttggtattgtaaactattcaaaaatttacagggatgatagtgtaactataacggataccgctataaaaaaaatattttgacatgtgatttcaaacgtgaaaaatgactaagaagttataattagcactcttctaataataattgatttgttttgttacaaactggaaaaaaaatatatatatatatatatatattggaaaaataatgttcaaatgttacagctatagtagttgtaactaaactaatcaaactaatcaatgatacgatcatgtgatggagaaacgtcagtggaaaaagaaaaggccagcctcgcaaatttattggccatgcccccaccttacaattccaatgctaatatgtacgaacactaaaacagataaggtggattagatattttcttcaaaaatatcttctgtactatgaccaattcaaatcacccaacaaatacaaaataaatcctctaaggtgaggcaaatttgcatatacttctcaattctcataataaaaattatcagaagaaataagcttttagaaacaacactactactcaataatactcattggcaatggaaagctcaacaagaaggcctaataggagtgacgttcacctgtcactagaggaagaaggagaaattgaggctaaaaccagagattattttgatggaattattccaaaacgacacactaagcctcagaggagtgaatactcttcaaaatacgtggatgctattgctagtgctaacaccaccaataatcactctaatattcctgaatacgtcgagtttcaacgtctcgagaatgatcaacaggtaatttccatccgtttacattattcttaatacatgta

SEQ ID NO: 65755 - DNA, 693 bp, Cannabis sativa
agacactttcattgcattgctcgtatatgtcgatgatatcgtaattacaggccccaaccttaccatcctgcaacaacttcaagaatctctacatcattaattcaaactcaagactctcggcaatctcaaatattttcttggttttgaaattgctcgaaccaaagacaacctcttcctttaccaacgaaagtacaccctacaactacttgaagaaaccggttacattggtagcaaaccagctaaagcccctatggaccctcgacacaaacttgatgaccaagaaggagagcccctcaccaatccatccaactatagacagctcattggcaaactcctctatctgactttatcacggccagatattacatatgcagtcaatgtcctaagtcaattcatggcatctcctcgcactccacacttacaggccttgcatcatctcattcgatacataaaaggcagcccaggacaagggattttgtactctgcacattcatccttacatctccgaggattctcagattcggattgagcctcgtgccccatcacaagacagtccaccactggcttttgcatcttcttaggggattgtctcatctcctggaaaacgaagaaataacccataatatcacgcagttcagccgaggccgagtatcatgctctcgctgccacaacaagtgaaatcacttggcttca

SEQ ID NO: 65756 - DNA, 775 bp, Cannabis sativa
aaaaacataggattcagataaaaagtattgaaagctgataattaaagagacattttaaagtcaaaaactttatcaaaagccagacacgaacgtatggtgcatcaaaaactttaaatacaagcttcaagttccttcattattagactagaaagtagataaaatgaatgaagcagaggaaaaaaaaaaagccaaaaggaaactaagtgaaaagaagaaaatttcattatgtcaatcacatatataatatacatacattaattatatgaaataagtttatccacttttactatctgtccttttactagtcatagaattagaacacaccatgcatggatagtgcaattatttggcattcccaataaacaaaggccagtaatgagtatatgcgacataatatttctgaggtaattattgtaccgaaccttcttttgctctataataagctaccatagctcaaatttgcaataaagtagaatatttttataactgtgcaaagttttgttcaacattaaaaagaaaaaaataaaactttagtatatggtcggattggttaaggtgggtccttccttatccttgctactggcatgaaataaaaaagaaaacttataaaataacatcatctcttcctttattttttttttttttgttaatccttttgaaatacaaatccatccaataccaatcatttctaagtatttaaaatcttaacagtttaagctgaagataatggtgaggtatcaatatcattgacaaaatataagaaagtagagagtag

SEQ ID NO: 65757 - DNA, 1576 bp, Cannabis sativa
  modified_base (659)..(666): a, c, t, g, unknown or other
cttaggtatttatctgctactcgggagaaaacttaagtatttttgccgcaaattactcttattaaaaatgcttatgaactattgagattgttgattctaagaatttttgtctaaatttctcttacttcattcttattctccttatcttactataactgtcattagaggtgttcatcaaaccgctcaaaccgcttaaatcgctcgcactgtaaaaaacaatgcggtttgaaattctttacggtgcggtcgcggtatgaatttttcttaaaccgcgcagtgtagtacggtttgcagttttgaattgttaatgtacggctcaaaccgcaccgcatattataaaaataccaatttttacatttatttaggtccaactagtgaaggcccaacctaagcccataattattgtattgttgaaacttgaattttttttttatatttattttcaagtcttatggtatatttgacaagagttgcttaaactttgttgtatttgtgatagttacaaaaatactagaattttggttaacttttaaaaaaatactgtcatacggaaatattttcaaaaatactgtgtttttgtaaaacaccagtaaaacacaaatcagaattcaaaacaatagtagaacaactaaaaaacactagtagaacaccagtgaaannnnnnnncagtatactgcagtatgaaacttgtaaaaaaacacagtaaaaattgatagtatatatactctaaaatggctattttaatatatcgatatccgaattttttttgtcattttttatatataattgtgtattttgtatttatttaagactattaagactatttataaaaaaaaaaaattaaataatttatactgtagaaataagatttaaataattgtttaccacacgtttaaaaataataatcacaataggtgcaaaaaaatattctaatcatattttcaattttgtacactgtttgaaattttttaaaagtttacgtgtagtctaaatagctataatgaatacgattataaaaaataatttgactaaaaaactctcttggatgctaaatcaaataaaaagaatatcatatcaacttttttaggggatgtactataaaattaccttatatacaaatatacatataggactggacatcgggcgggttgatcagattttgggttctcaggttttgagtttaaaaaattgtatccggacccgacctgtgaaatggtttgggtttgcaggtttcgggctcgcaggttcacgagtctacaggttcgggtcgactgagttggttgggtcacgggttgactcggtcaactcattatttcttttaaaaaaaatcaaattttatgtgatttttttatatatatattaaattaaacatttaagttataaacttataacactataatctatattcgttagactaaaataaaataaaaaatgaattaatttcaaatctaaaatacaaaagtcatatatactatattgttatttttaatatattatctgtataataaaaataaaatgattaaattttagatttttttaatatattatatatgtaataaaaataaaaaaataaaaa

SEQ ID NO: 65758 - DNA, 608 bp, Cannabis sativa
ttaccttcgacatctcggaggtagtcgggtctcacagtggtcgtctgtgtaggcggtgaggggtaggcgatctgtgtaggtggtgaggggtaggttcaattttggtgagggtgagatgttgagagagaaccaagagagatagaggaagagagagagttgaggtttgaaaatgagaggggtatttttgagtttattataaagtgaccatattttttaaattttgaaatgcattagtttaggcatagaattttaaggtattttaggaatattttttcaaatatactgtagttatttaaaagaaataattacacaaactatttttttttttttttgtgacctggtcatgactattttttttttctaacaaaaaaaagactatttttttaatattattcattgcatctatcataaatatgacgtgagtgtatataaatataaaaagttatatttatgtctatgtatctttctatttatatatataaaaatatatatgtataagctttaccagaggtttccaaaaatgactattattcttcctacatccataaaatatattttctccatggctacttctcttctttgtgtaatagtaccctttatctcaataa

SEQ ID NO: 65759 - DNA, 1699 bp, Cannabis sativa
tttttcttctatcaataagcaacaatctcccttttaagactattttaatcaaatcatcaatataggaaatccttaacatatataagtgttctgattccaccaaatgaagtaaactgtcgtcgcacagcagcacaagcaacctactacaagaaatgtcacttttgccaacacatttttgcgctgacaaaagtttggtattgtgttggcaaaacgaattctacttttgatgtgttggcaaatcaacgttggtattagaaattttgccaccgcaaaatgaaaagtgctagcaaaaataatcccaacacgtaaatgcgttagtaaaagttagatttttgccactacaaatgtgcgatggtaaaactttgacctttttaccagtgcaatttgtgagatgcgctgataaaaattacttttaccaatgcagtacaaaaactgtgcgctgtcaaaagtgatatttcttgtagtgaccactccaacatcagaaagtacacacactatctctttgcaaaaatccatgacagctagttcgactaattatttggccaaatggccacaccaaggcaagactaaatcaccgccacaattttcttagagaattgaccctcaaagaaaagatgggcacacttggcaaagttgaaacgtaacaggagtacttcttgtcctcaagtgatctctaattaacaaatgattatgagaggcttgccaaagaataaatttatatttttgtgtgaataacctacaccaaatcaccttataattatccacctttcaatgagtgagaaaaacattgtagaatttattactaacccaaaatctctccccattcccaacctccaaaattgcatttcgagaaaagtggtttttgagattgagaagcttgcgccaataccagctcacatatccgtttctcccacttacccaaacgtcttgttactttaagtagatggaatcaatcaattttacaaagagcatcttgctttgtggttaaagcccacacagatcgaaaaattgaagctttattaattccacttggttccatcacgaaaccccaagcctccataacacttacgcttaaaaacaagatcccaagaagcaaggcattttattagaattctctttcacaccccacagaaagtgcttgcaaagcttgtcgatcagttgccttgacaactttttggatcggagagcataaaaattctcatccaataacaacagatgcctagcaacactgactgaatcagttgcactctaccagaaaatgagaggtgaagggtagcccaattatgaagcttcaatttaatctcttcatcaagaaaaggatcacaatcttctgccttctattttgttggcctcattggaataccaagatagttaatagagaaataaccctctgcaaaatgtattgtatctcgaatttcttgtttagtcattccatcaatcccaccaaagtaaatatgagacctatttggattagctttgaggccaaattgcaactactaaatataaggtatcctgcatcctcctcgaaaccactttttgcatatatcgcaaccactccaaaatctttacaatatttattctcctccaccatcgttgtgctcatcttcatcctctcgaaattttcttttacaagcttcagattgcttttcacttgacggtcctcgaaaatttctttgaattgcaagctttggatttcttt

SEQ ID NO: 65760 - DNA, 1034 bp, Cannabis sativa
atgtccagtctagtgctcaccatcacatacattaaacatcctaaaactactgcatagggtacatccttcatttcttatttctcttttatactgttcaaacactgttcctttgacaaaacaaaatgttcgcctaacagaactaatgtactctttgcatcttccatgttgaacttttaaataactttcttgatgtacgtagactgtttcaagctaatgttcccttcgttttagttccttgaaacttcaatacaaagtatcttttgaactggtccaagctccttcatatagatttgtgatgctagcactaaataggcaatcagttgtggtaacctttaactttggctcctttgcaatcttgttctttttacgcaggtagtatatcaatatgctggaaaaagagaaacagttaaatatttaaaaaaaaaaacaactaagaaacaacacaaaaataaacataatgaaaatatgcaaacacatcaaaaacaaatgaaaaaaacaacttactgaagaagttaaaaagttatcatgataactaagtttgtaaaaccacatattgtgttatcaacttcctcaacaccaaaccgaaatggaggagatatcttgtccttgtcctttagatatacattagttgtttttctgaaacaaggtaacaaaaaatataaaattagcaacaaaaaatctaaagttaataaaattacacaaaggaataataaaaaaaaaatatgttgatttcttcgatcggagaccctggcttaaccaaacatcaaaagcagcctccaaagttggctcaacgggttcaccaatcttatcaacaagtggacataatccatgcacatatttcaccattttaaaatcaaaattattaggagaattagacattgaatctaatttaacattagaagaacctagttcaataatgggagactttaacacaacccctttcttcctgtccctctctccaggaattaagattggtgtctcctcaaaaacaacaatgtcacggacatcaatttgaaccaaaccttacaaaccag

SEQ ID NO: 65761 - DNA, 1040 bp, Cannabis sativa
  modified_base (45)..(66): a, c, t, g, unknown or other
caggctctcagcatgtcctccaatatctgaattgtcctttcggannnnnnnnnnnnnnnnnnnnnnaatgctgtactgaattttagctttgtacccatggctggctgaagactttcctaaaactttgaatcaaatccctttccaatatgatggacttttgagccccatgcaatcttactatttccttcacataaagttctacatactggtccagtgtatacattattttcacagataagaaatgtgccaacttggtaaactgatccacaaccacccatgttgaatcaaacatacatgtggtttaggtagtccaaccataaaatccatggtgacatcctctcatttccattcaggaagagtcaaaggctgcaacaactttgtagttctttgatgcacaagcttgatctgctaacaagtgaggcgctgagagacatactccaccacatcatttttcatactgcaccaccagtagggttttaagtcttaaaaattttttgtgctaccaggatgtaatgaatagggtgtagtatgagcttcctcgagaatttcttttctaaattctacactactcggaatacaaacttgagttttataaagtaacattccattatttgacactgtaaaatccttagcttcaccaacttgaacttcttctcaggtcttaatcaactctggatctattaactaggcagctttaattttacctaacaaattcgattacaacatcaatttattaagcttgcgcacaacaaactcaatacccaatctaaccatgtcatctgccaaccgaggtgaaatcataatcatgttggatacttgcccaggacccttcctacttagggcatcgaccactacattggcctttccaagatgataaaggattttggaatcgtaatccttaaccgattccagccaccacctctatcccctatcatcaaaaaacaccttagaccttatctgaatgcatcacaataagctataaatttctcctaatctgacagtagtgctagtactcaagttgtgataaatcgttgttttag

SEQ ID NO: 65762 - DNA, 934 bp, Cannabis sativa
ttctcaaggtacgtatgggttttcaaaaaatctgaaactttctcaaaatttaaagagtttaaagaaatagtagaaggagaagtcggcaagaaaatccaatgcttccgaacacacaacggtgacgaataaaccttaaataatttttctgagtatcttcaagaatgccgcatacgccatcaattcacatgtgcaaatatgccacaacagaatggagtagctaagaggaaaaattgccatcttgcagaaacatgtcgaagcatgttacatttgaagaatgttccagggagattttgggctgaaagtatgaagacagccacccatgtaatcaatatgcttcgccaggctaagttagggttggttttaccctttcaaaaattatggggttgtaaacctacagtaagtcactttcgagtatttggctatgtgtgctacgtattcgtgccaagccacctacgtagcaaatttgataagaaggtgatacaatgtatctttgtgggatacgaaagccaacagaaagggtggagatgttgcgaccctacaattggaaagtgttatgcattaaggaatgtagtcttcgatgaggcatcatcatggtggtcatcgcaaaagaaaacattaccagattctaaagaaatggaagatgaattgcaaagaaaaattgcggagcgaattgttgagctaccaccaactcaagatacagatgaagaataaaacaccgaggatgaggcaccttagaatctatggcaaacaggggtgcatcaaagagaaggacatgatgatagccaaccagaacttcggagatcaacaagagagcaaaagccaaatccaagatatgctaatgctactgtagctgaaaaagaatagttcagagaactagagtcatatgaagaggcataccaaaactgttaactcaaacttttcgatctccttgttt

SEQ ID NO: 65763 - DNA, 1057 bp, Cannabis sativa
  modified_base (1025)..(1025): a, c, t, g, unknown or other
tacccggtgtttccccttacggatcacgggactactgattgtcacaggttcaccatttttcagtggtaacttaattatttttgtaactttcatactcctcctatgaaggattcgggtagcacattggttattattgtaaccttcgtgatggagctaaatttcattgacacatgctccatactcaagccacacacttggttgtcaaggctcgagttcaaaatgtaacttgctccaagtctttatgtaactcctaggttggagcccaaaccttcttgatccatgatggagctctgaccttattgatttgtgatgggtcccttaccttcttgattgatcacggagctctcggactatctttaataagagatgtaaaagttgtgctatatttagtacaaaaagtagttttatggtaaattcacactaaattttaactttgtgttccaatgcacaattataaaattttgatgtaaactttaatatctaattaatgttttattaaaaaaaataaaatttaataattttataatcaattttattattattttaatatgtaatacaataaaaaataatataaatattttataatttaatgtgatagttaaatatactaaaaaaaataatagaaatacataaatgtaaatgaaaaagtagtacatttattgtggtgcaaattttacatcataccaaatattgtgccaaaattaataacttgctgtcaggtttggcacaaaataagtaatctatgttgacagttaactatgataaatagatgacacctgaaatttactaataataattcaataggttagaaagtttacctttgattgagtttggagagtgtgcaaataaaatgatagttgagagagtttagcattaaaaaattattaatttttttttttggctaattagtaatttttcccctaaactttgacatgtctatatcgtacctctcaaacttttttggtcgttaaaaattcctctcgaactattgagattgttaagtttaaggacttttgtctaatttnattcaattttattgtttcagtgattatttatg

SEQ ID NO: 65764 - DNA, 759 bp, Cannabis sativa
tttttttttttttgagtaagatttgatttcagataaagggttttagctttgtaataataataataataatttgaaaggcgaataatgattcatcattaattctcattctccctcctcatcaactatatatatggtaaagttaaaagcatgaggtaataagtttagaggtgatttgtgaaatatgttttgtttgtttagaatgtcttttttttttgaatcaatttgtttagaatgtcttaaatgaagacaaatggataaaatttgtaaacgtgcaaatgagtcattcatgacaacgaaaagtgaatcgtttgtttctacatatttcttcatcccagcccactggcccactggcccactggcccaacccaacacactcttctcctacactaaataaattatatctagttatctaccaatcaaaaatgcatttaaaagagtggctttaaacaaatttgtggaataactacttaaaattttgaatgtacccaatttagtaataataaattttgaaaaaaaaaaattatatggggtactgtttttttttataattgtattatttttactatgatatgcttaaaatttcttttttattgtttatttttaagcagtataaaagtttttaaatttcctttttgtcattttatcagcttatgatgatgtgtttaatttttatttttttttaccaaaactatatttatttattaaaataattttataatacatattttttaactaaagaagcatttttaagatgtgtga

SEQ ID NO: 65765 - DNA, 1266 bp, Cannabis sativa
  modified_base (694)..(694): a, c, t, g, unknown or other
  modified_base (885)..(892): a, c, t, g, unknown or other
  modified_base (1233)..(1240): a, c, t, g, unknown or other
aggtgagttttgggaaagcgaacatcgaatcgaccaggacctccttcaacttttgcacgaggaccatccttgtctttgttctagcccacctttttttagggaaagacattctccctcaactcttgtacccagccatagaatgatggctcgtgccaagaaaacaacgtgtttggctcacgcatttgatcctcaactagatcggcacaccactttgcccagtgccaaacaggatccaaccgtccaggaggaggcggatcatgaaggggacgctgaggtctaggagattgaggagcaggacgatgtacgtcctagcagttcctccgaggcggaggaagaggcggaggttgaacccccaaactatggggtgtacaatgaggctggggagccagtcgatactgacggagacgtcttggttgagggtgtgggttacgtcagtgaggagcatactgctgcggttcctcacagaaggcaaggttccttgggtgccaggtgggtaagccctccgaccagggttattgaggcgcgactgcggactctcgaccagggcggatacctgggcgaattggactgctacattcccgcccataataatcaggccacaaaccttgaaagggggatgtgcgcttggtcgggtgcccatgcctagcaaggggcattgatgcctttgcatcaatacttcaagaatgtcgcgganttcttcggcctttgcccagcccagttcactcctaatggcattaagtatctgtctgcccacttcgtcctctacgcctcccagaagtggggtatgccttctcctcatgaagttagttggttcattgatttgaagtccaaccctaagcaaggcaggtcggggtacttctatttctctcaaccagacttcaagtnnnnnnnngggcaccgatgattcggccatcagcaaaattaggcgttttattgatgagtacttcctggtggatggcgcaggcatcactcgcactcggttccagcagattctgacatatcaccgtcctcctctcactcttgctctacaggatagagcttagaagctttctcgactgccgggggaagatcggaatatcatccagttaacctccgaggataattttatataagggacttcattcccaaaccaatgaaggggaggaagaggaaatctgatgctggacgggttgaacgagctcattcaaagaatgaacttattcaactcaagcgcgaagctaagttgaagggagnnnnnnnngccaagcagtatgctcaggagccctt

SEQ ID NO: 65766 - DNA, 1137 bp, Cannabis sativa
tttctatatccaattttttctttactttctttaaatttgttattatttatttttttatttaattggttgtgggaaatatgtatcaacaataatttattttattttattgttaattatgtgaagaaaagatatatttttaataaatattaaataaatttatattaaaaagtaataaattcaaaataactaatataattctttttttttatatagatttgattggattagatttaagttattttgtggatttaattagatcaagaatatgaaatttatatttagtgtggatcaaataaattatgagtaaatagtgcgaactaaattggatgaataatccccaaaccacaaagtagagtccattaaaaaagccaaagttagccaacacatgaacaactttgtcactagacttcatggaataaaaaataggcccttaacaagcctaaatctatgatagatttaaaaccagttcctcataaatcgagatgtcaaactatatcagcaatttgaattaaaattgcttgcactgaatgaaggacatcagtaaaccatattaggaattgttgattgaggattttatattttaatatgttgctgactattttattcataacttatgatcttaaatctcttgtgtcgttactaaatcacaatctcatgtataaatatggaatttttttatatttatatactataaattatttaataataatttaatcatcaaatataataaaattgttcaatttatttaacaattaaaatgtcttcatacttttttaaggcataacctttaatatgaggaactggttttgaatctatcagagatttaggcttgttagggcctattttttattccatgaagtctagtaacaaagttgttcatgtgttggctaactttggcttttctaatggactctactttgtggtttggggattattcatccaatttagttcgcattatttactcataattcatctgattcacactaaatataaatttcatattctggatctaattaaatctataaaataacttaaatctaatccaatcaaatctataaaaatacgaattagatcagttattttgaatttattactttttaatataaatttatttaatatttattaaaaatatatctt

SEQ ID NO: 65767 - DNA, 1083 bp, Cannabis sativa
gtgatgatatttttgttgattaggttgaatttggaatgattgattttctgaagtattttcgattgtgtcaatttttaataggatttattatttgattatgttggcttcgaatgtgtatttgaagaagagaaaaaaatgctttgattgatgaaaaatttaaccatgtttttgtttaatccatggattcggtaagagttcattcttgttctgtaagattactagagcagcatgggaatgaaatactgacattctagtttaactcaatgaattcgtggattttatgtttgggtttatgtttggggggagagtttgaattttatgctgtatttctcttgtggttggagaagatgtcttaattcatttaatttaatttttatgtttccctgtttgtcattaatgcttatgcaagaaaatatgaatatctggcatttcagtttcaaaccaaagatatatttggagacactctgagctttcttctcatataatttttggtattctaacaactataaagtattaagttattttttctttaattgaagggtaaaacttttgctacaaaccgtgatcttttttcttttgtggttatgaacattattcatccactccttccattgaattgcatatttgacaattttgtatggctttgtatattatttcttgaattccttatacattgttgtgtttgttcttatttaaattgatatatgtaacaggtagaaactccacttttaacatggattctttactgttctagaattttttgcattaaaattggtttcgttgttgagtgacagtatggctttagccttaaccaatctttcgtggtggtcattgagtgggaagcattaagagtcaagactatgcaatgggtcttccttgagttcttcacctgagttaggtacttgggaatccgatgctctaagtttcctttggttaaaaggtccaatgtgtcctcatgattgagaaaggtgaagcgaaaatggcatagttgggaagagaggaaaatcgatcgggaatatgatgttgtcattgtgccgtttgatggtggatgtgtttcttgttctgaatctgacaactcagatt

SEQ ID NO: 65768 - DNA, 1115 bp, Cannabis sativa
atccaaacatcgactatgggtcaggtccatgacacgggtccagatcaggatcccggtctcgggtcccaatctagttccacttcgggtccaggtgctggtgggtcctagttcagggtccgggtctagggtcacgtctttggtctcgatgccagttctaaagcctaggtcccaggtccaagtccccatctaggtccgagtcctaggtcccggttggggttcaagtcctagtccgagtttgggttcgagtttttgatcccggtccgggtctagatatgggttggagtaccgagtttgagtccagatccaagttcgggtctgagtctcgggtttcaatcagtgtctgggttctgaggcccaggtctagatcccccatccaagttttggtcctaggtcttagtccgggtccatgtttgggtttgggtcctagtccagttctgatttcgatttcgtgtttgggttcgggttcgggtcctggtctgggtcggggtctgagtcctggtccaagtccaaggtcgggtctcggtccatgtccggatcccggtctgggtctgggttttgcgctagctccaagtccaagtcttgggtacaagtccaggtttgggtctaggtttcggtctgaatccaggtcctaagtttcaatcccggtctgggcatgggtttgggttcgagtctaggtcagtatccagatccatttttaggtcagagtctgggtctaagatcgtctcccatgttaaagtccgacctgatcccggacccggaactagaatcagacccggacatggactagaacccagacatgggaccataacaggaccaaaaccaaaaaccaaactaagacgaccaggacccgaacccaaatccatacccagacctagaccaagacccagactgggatccagacgcgatctaagacctggaatcggaatcggaccaggtctgcaactagaacccaaacctgagaaaggaataacacccaaacctaaacccaaactcagaccagaagcgatacttggacttggacccgaacctggacttgcgacttgcgacctaaaccaacaccgggactcagacctagacccagacccaaacccaaaaactgttgggaattattttac

SEQ ID NO: 65769 - DNA, 1404 bp, Cannabis sativa
gtgtgagcttatccatacagttatacactcttcgaataaaaatcttttttctaaaataatttatccctctttggaatttttttttctctccctctttctaggatgaagttgaagaatacctctttatatatatatatattaattaaatttatctctaaataaaaattaattatcaaatatacatgtttttatgagtattaactatacccaaattatcctcacacactcacataactaagacataatttcaaacataatagatttgtattctttgtaaattgatgtgtaggtttgtaaaaaagtttggccagaattttgattagagaataatgcaaattatcgtgaagtgatagaggtaaaattgatcgaatgattgaaaaaagaagtaaacataataaattttaaaagagacggtaaaaattacaggtatcaagttaaaagagttatgttatgcaatttccttctctttctatgtgtctctctctccctcctggaagtctcactttttttcttgatttttttgtgatctccctacttttttactttgcaagtggttttcttatttttttttaagaaaaaaattgtttgttatatattaatttcatgttaaaggactccatttctctttagcaatcattcaacatcgtactaaaaataaagtgaaaataaataaaaatatatataaaaaaagctatggcgtgattatttttagctaataactgaggctgaaagccataaaattaatcgacaatctgcatatacgacttttatttggctaataattgttgttataggatcttttttggctacggtttctttttagccctttagcgactcctgcaataccaacggttgtgaatttttttttttaaattacctataaataaggatagaaaaatattctgcttctaatggccattttttttagtagtgagtggtcactttgtaaaggtggtgtcttgcgattggttagcgacattttataaaaactatcatatattaaattatattagactcaatatttaattgtactaataaagatatgattgaaagtgtgaagcactaggaattcatgtgcattttaccatttctctatactctatttaataaaactatagagactttcattccaaccaaaaaaaaaaaaaaaaaaaactagacttatttgcatgcgatttataatagaaactaaaaggctctcgtggtaaaaatactttaattataagaccaatttttatttatgttaaattttaaaatattattgtacaatgcgtaatttcctatttaaaatattatgcattagggaaatattatttacaccccaaaattttttaaaagcacttcattttaataattttaatttaatataaaatttatatttttagttatactaaattttttcaa

SEQ ID NO: 65770 - DNA, 651 bp, Cannabis sativa
tctagggatttcaagaaacagttccaggctgctagggatagacgacctgaagcggcctcgctaaccaatataaagcaacagcccggcgagaaacttaaggcaaatttaagtcattttagcatgactactactagggttagaaatttggatgatagtacacaacttacagcccttcaagcgggaatctctactgatccatcaactactgagggcgagctgtgggacgacttacaaggtcgtccaataaggaacatcacggagttcaatgaaagggctcaggtatttgttggaaaagaagaagcccaaaaagaaatgaatttgttgaagataggcttgggaggcaaactcgacaacgtttcaacaagtactgtctcaacaagaatcgataactcggggctttttggctcgaagagaaaggacgattctaaggaaccattaaaggataaaaagaaacagaagaagcacgataagtacgtgccaatgtatactatttatactgagcttaatgaaatttgggagaatatatacctcgctcatgagacaaaggctgccttcggcaagcccgagcccatgaggcatgcgaggaacaaacgagatcctaacaagtattgtaaattccataaggatattaagcacacgaccgaggaatgt

SEQ ID NO: 65771 - DNA, 1115 bp, Cannabis sativa
tccggctattcaaagtaaaagcaaaccttaataaaaaccttagaaataaaaacttttctctctacaccttatgtgatttcggactgtgccgaactgtgcgcttgctctggtaatttttaccaaattcgttagctctatttacaaacaatggaacaaacctcagagatgggaactaagcttacggaagtaaccatgacgcaagaagagataggcatcggaggggaaccattggaaccccaggggatttatcggaagcagggaaacaaactcagggggcaggggatgtagatgaaatgaggcagcagtttcttgagtccatgaccctcaatttagaggcagacgtggagctaagtgcagaagtcacaataaaaggagtgttggccaaaacttttggaagaagaacagtggcaaggggtcgtgtgaaagaaattttatcaaagatttggaaacttgagggtgcttggcggttgaagacaatgaaacctggcttgtggggaatattttttaatgagaatgataaaaaagaggtactcaaaaaaagacctaggttggtcaatggagttctgctgaatatcgttcaatggcctgaggatggttgctgggagggtgttgatatgaataaagccaggtattgggtggaggctcatggattaccgacgccatatctcacttgggagaatactgatgtgattgcgagaaaggtgggggagtacattgactttgatagagctccgagggccacaatcgcaaggagaggcttcctaaagtttcaagtcgatatccttctaaaccaaagattagtggcaggtttctacctaaacatatcgagggatagaaaagaatgggtgcaatttaagtaccataaacttccagcaatatgttttcattgtgggcatttagctcactgttatgggaaatgcgatcgaccattggaatatgcgtatcctcccattggaaaggcagttcccttatatggagcatggattaaggttggagtgccgataaagaactgctttgacccggctattccgaggatgaaagtccctgaaatcaaactgtcgtacgccgtcgagaagccgccggaggaaggcaggggaaagggtaagatggtcatg

SEQ ID NO: 65772 - DNA, 617 bp, Cannabis sativa
aatcgaatcacaaacagtaataatcgtattatatcttaacatgctatgtggtatgaatgtcttttcttacctcaaattcctattcaggtgtgccgaccaacttgagcagagaatagacgacaatcccgagccctatgtcacaacaacggtaaatcgattaacaacatagtctaacccgttctaggtcttaaactcaaaactcaaagttttcctattgataaatagtgtggaaatatcctaaatactgagaaaacaccaaaaataggatttcgggataaagtccctaaaaaaaggtagaccgtttctaagaaaacggtctgccattttttgtaggaaaccaacactttgagttttaaacttcacaaactctttcaaactcaaaaaggatcaaccaaaatctctataacagtctaataacatccatatatcaaaaagcacagctcaaacaacccaataatatcactaaacaaaatctaccattagagctcaagcttgaagctctcaacccaaaccttcaacaaaacacctaaagcaactccttataactcaaatataagataaaagtataatctaacctataggaagctatacagaaacaaaacacttaaaacacacac

SEQ ID NO: 65773 - DNA, 995 bp, Cannabis sativa
aaaaaaaaatcaaacctcaccgataattgctgttatatatataatatattcttaaattgtgtgtcaaattaaattaatcccatcttatttttcttttgtctctttttattaagtttaagtggtttatatagtttatacagtgtttgtactctttatgtccagattcattgtatcactcatgttagttgtccctgactgctttagtagttatttccatcggtattctcatgaatacctaatgaacatttttgccacgtgacactatataaacttcttctgtaactttggattcaattaataaaaatgtttaggtgggcgtttggttgggaggaataaaaaggaataaaaatataggaataggaatgtccgtgagaattagaataggaatggaattgaataaaatttaaaatatatacaaaaattgattaaaaaaattattaaattttttcaaattttgcattggatttggaatgacctttccttctattttaaaatggaatagtcattccactagtaaagccattctattaaaatgatattccaatactttaaaatacaaccaaataaaagaataaaacgaaaattgtttcattttcattctattctatttcattacatccaatcaaacagttcttgtttcattcttttctcttttcgcaatacttttcaattcattttatgtttggcttattttctctatctctcctcaataatttattcttttttttttttttactttgtgactatatatttttggcggttttttttttagatacaatattgttgtaaattatgttgtattttattttgttagaatataacagttagttattctgttagtggttactttcggttagatttgttatagttacttaggtgtcaaacagttgtaatctttttattctcttgattctctgtattgtattacaacaagtataaataaaagcacactcaatctggtttagattgagcattcatttcattcaattcacttc

SEQ ID NO: 65774 - DNA, 816 bp, Cannabis sativa
  modified_base (462)..(464): a, c, t, g, unknown or other
aagttcagaggacataatttggtatatgtaaaaattcgggaggaaaaaaatactaattagcctaaatataattatttaataaaaattgttagtttaaccattttttagttgaaattaattgttaaaattaatactattaaattaattaattaattttttcctttttttagaaaaaaaaataattttaaatatctaaatttaaattatttattaaaatataacttagaaaattattttttatataaatcttaatttaaatttaaataaaatattattttaattaattaatcatatttctttcttatactaaatgtgactatttaacgaaaattattggtttcacaattattttattattattatttttccgttaaagttaacagttaaaactaacaacattaaatcaatcaattaattattttttttgaaaaaaaaataattttaaatatctaaatttaattnnnttattaaaatataacttaaataataattttttttaaataaatcttaatgtaaatttagctaagacgttaatttaactaattaatcattcttctttgttatattaaatgtgtttatctaacggaaattattagtttaacattttttattaaagttaacgattaagactaagactgttaaatcaatcaattatacattttttttaagaacaaaaatagttttaaatgtctaaatataatttatttattaaaatataacttaaataatttttttgtataaatcttaatttaaatttgaattagatgttaattaaattaattaatcatactctataacaaatttattagttatatt

SEQ ID NO: 65775 - DNA, 626 bp, Cannabis sativa
  modified_base (292)..(292): a, c, t, g, unknown or other
tggactaacttgttcagcctcttggccgaccacctgagtcacgtcagcatctctttgagcgggattttgagcgcgggttccgggctgtacgattggcgcatcatgtgggtcgtccaatcctctcctcctgttcagattgtttctgagatcatgaactgttcccagtcaatcaaatatagaaacacctggttgtctcaatgactggttggtttggccaattggctggtttgcaccattaacttggttggaatatttaggtatgacttctcctgatgaattgctagacagggtntgtccgcctaccgcttggcccacaagtggaacctgtgaccggagattggacggtttaccatttatagtcttagaggtgttcaccgctggatcttcgtctgtctcgcccagggggatgacggttacgggctgttgtccggtagccttataggattgtcgtatcaacacagtcgcctatctggtctgatcgccaatggctgattgttgggcccttatgtttccatctccttgtccctccattcagtgaacatgcgcctttgctcttcgaatgcgagatttactgcagcacggagttcctcctgatcgtgatgcagggtgtgttgggttttatgccc

SEQ ID NO: 65776 - DNA, 6217 bp, Cannabis sativa
tgctagttagggtgttacaaggttggccttacctgttatcatgctgctcgcaagctgtgccaaggcattagtagttgtattttcttcccttagaattttcttgagggtataacccttgaattgtgcaagcaggtcttggatcttactgagataagccatcattttttctccatgagccatgtactcccatgagacttgatttgccacaaactgtgaatcactgcagacttcaatgtattcagcacgtaccttctgagcaagctttagtccagctacgagtgcttcatattcttttttttgttggaggctttgaacccaaatttaattgctccgtgcagaggatgccccccaagtatgatgagggaaattcctgcaccagaaagttgatcggtggatgatccatctacaagtaacatctagatggatttgtgtaaattttcctctggcagggactcttgatctggtcctttgtctggctcgggattatcttttaaattgtttgcttctttgcccgtgaatctaccacaaactctaccaaagcatgcccttttactattgtgcagggttgaaaaattatttcatactaacccaactctacaacccatttgagtaaccgtccagaagcatcaggcttttgcaaaacttggcataagggttggtcggtatacacccaaataggatgagcttggaaatagggccttaactttcttgtggctaagatcagatagtaagttagcttttcaattaaaggatgtcgactttctgcctcaactagtcttttgctaatatagtagattggattctaaacattgttcttttctcttataagaatggtgcttacagcatattcagtgactgccaggtatatccctaattcttctccatctaaagtttttgagagtatgagaggttttgtgaattgctttttagttcttggaaagcattttcacattcctctgtccattcaaacttcttattacctcggaggatgttgaagaaaggaacacatttgtttgtcaatttataaatgaatctgctaagagcgactatccgactagttaggcttcgcattgcctttacttttcttggcaacttcatatctaggagggattatattttctctaggttggcttttattcctcgagcatcaacattaaatctaagaaacttgcttgagttgactgcaaaggaacactttaagggattgagtttcatgttgtagtttttgagaatattgaagcattcatccagatcctctatgtgcccccaacctttctagatttaacaagcatgtcatcgacatatacttccatgtttcgtccgattagatctttaaacattttgtttactaacctttggtaggtagctcgcgcatttttaagaccaaacgacattaatttatagaagtatagacccatgtttgttcagaagcttgtttgttcttgttcaagtggatgcattctggtctgattgtacctcgaataggcatccataaagcttaagattacatctccagttgttgcatccacaagttgatcaattcttgggagtggaaaatagtctttgggacactccttattgaggtcggtgaagtcaatacatactcgccatgtttttttttggcttgggtactagtacggggttagccacccaagctgggtagaaagctataataataaacttgtttatgcagaacctttcttcctcttcttttagtgcatgcacatgttttttgtccagtaaccttctcttctactagatggaatggaagtctggatcaatatttagggcatgagacatgacattggggtcaatgccgacttcatgtgaccaggaaaaaatgtcaaagttttctcttggaaattttattaaggctaatttatttcaagaaacaaacctttactaatttgagcttcttggtcgggatggctagatcgatctccacttcttctaactcttctactggcctaacatttgcatttgattccccaagttgggaatccatgtctttgtccccagcttgggctaattactattgagcaatgcctttccctttctctgaactctggttggaatcattttcctttttgaccttagacagagtaaggttgtagcattcccatgaaatcctttaatttccctttagacagcccactccacttttagtttgaacttaacgcatatgtggaataccgacgtgacaactttcaagtcatatagggttggtcagcctaacatgacgttaaaggcttaagggacattaatcaccaagaactgtgccattaccgttaagctctttggtgcttgtcctactgtaagtggtaagaaaattagtctaagtggcgctacactctggccgaagaacccgtagactagtttggtgcaaggaatcaagtctttaagctacaaccccactttttcatatgttgtcttgaatagaatatttgaggaagctccattgtctaccatagtctgtgccaccattttgtttgcaatctacacctcaatgagcaaagggtcgttatgtggaaaaatgacatggctagcatatgcttcggtgaatgttattatttgttctccaacatgtggtactttaggttttctctcctccacgaccagaattgtatctttttcttcatactgcaagtctcgggcatacttttctctagttttgcttgagtctccagcaacgtgtgggccctcaatgatcacgtgaagatgcacgtccactagtggaggcatcaattggctttggtttttatcttccagggcggtcctttgttggtcttgaaatattttggtaagcgtgggttattttttctaatcaggaactcaatctcctgtttcaaattgtgacattcatttgtgtcatggctgtagtccacatgaaaatgacgctgtgtctcttttgctcatgtcctttttcatgggagaaggtttcttgtatggcaccgtagactaggtagttgcatagattgtttctatatcatttgttaggactgagaaagtagtgaattttgaagcattttccttgggatgctgtttaaagttgctgttaaacttgcttttcttcccattaccctgtctattgccattgtttgacctctttccattttgattcaaactgctaggatgctgggcagatgtagcggttgtagtggtgagttgctgatttttcttctgtcccactgtatctacacgtcgtactgtctctttgagcttaatgaatccatctgttccatctataaattctgccatcgaccccatagttaatctgttgatatcctttcacagttctcctagaggcttaatgcccccagtattggggcaatcatccttcctcagttagccccttaacttttgttgcttcagtcatgaacctgctaatgtaggtccttagaggttctcttcgcatttgttagttctaccaagtcttcaaggtgtgagggaagctgacaagaggaggataaatgtgcatagaattcgaatgaaaaggaaatcaatcaattaaactttcctagaggtaatttgaaataccataactggggggcctttgatagtgttgctagaaaatttttgcaccatacattgcctcttaccccctacagatccatttgcatctcaaagtatttcaagtgagagagaggatcttcttttcccgtgtacatcttccatactagcatttttaattttgggggtaagtcaagagcattggtttcaggtgagaagggtgatcctcttgcccggttgacttcgagatctgtgagtttcgggccagtcagcccttatacgaggctcttaagctgatgtatttgtgcttgcacaagtggatgaacttggtcatgctattgatcgacctgtgtcacattaagatctctttgaactggatcttgggcatagttatttggctggacgggttgtggaatgttttgcttgtacagtcctcttttgcgattcaagtcatgcacggtacctaatcgttcgaacactaacgtaccgagaggtatttgggtttgacaagtcagattgagaggttatcttgatacctctgtctgagtatagttatttaactgagtacctcctccagggggtggtctggcaggatacagttgtctatcatttggcccatagttttggcttgtggccttggattggatgcttgaccattataattttatgcaatatgaccaactgcatgttcttctatcctgctcaaggggatgctagaattagtcactggttgctgactggtaacttggtaggccgttgtaatcagcacggtggcctgcctagaatagttgtcaatggctgcatgttgagccctcatgacttccatctcccgatctcttcattatatgaattaatgtctttgctaaccaaaggcaaggttgatagtcgtttggagatcctcctgatcctgctgcaacatgttgttaaggacttgcataagtccaagcacaactcgcaggttttaaagtttagtatcatctccaactagcctttgagtgttattggtggacaggctctcggtgccaggagtggttggtcgggtgccgtactggtattcccattttcccgtacgccttgtgtgaaaccagccaaagaggaagtcactctatggcccaccatcggtggttgtgtattaacttgtctagggtttgtccttggtggatctcttgtgtttctaagagtctgtacacttggatctatcaccattggatcaactggatcagtttgaattcccccacaagttacaaccatcctgttaacttgtttagactttaagagaaaagcttgtgttttttctctcaatgatgaaaacaccaaaatttttatctcgcttctagccaacgacaatgagtcaagataaaacgattagataaagtaaataatagaaagcaaaaacaataagtaaagagaataccggaatttctagaggttcgaccccatgagtatggtaataccctacttcccttttcttgtattgatatgagagacaaagaatgaagtattctctctttaaagctcttacaatggatctctgagtaactctctcttagatcgctcttttctcttttgagtgttctttctgaatcaaattttgtctcctgaatagtgagattgaaccgcgatttataagagcttattacatgaagaatagtgtcccttaatctacaataaataaaattggaaattaaattaattatataattacaatgcaacgaatagaaaatcgaggcgcattgcctttattctctgatctaattctacaaatgtagggattatatgtgtgtcttggaagcaataatgtctatctctgaaattgccaactcacacatcctgtccggtgcatgcgagttgatcacacgatcaagctttggtcggatgtcccttggtgactctgtttggacatcctgctatgcacggataacatggacctttctaccaatctttgggggctgttaggagtatacccttccgcctaggtaggaaaatatgagacacgtacgtgtcatccagctcaatgtcatgtcatagtgtaaaaaatagaataacataactaatatataaaatatgaacgctatttaaaattaaatgaattcaattcctataattctcatagggaatgatgaataagaaatacatgtcttatgtgttaaaataatattagtcatgttcatttttattcttattctttgatgtttcaatgcaattttcttaaaattcttttgggtattcaaaatcccatataaaaattgcatcaataataatcatttcaatgattctttagttgtattcatataaatacaatattattcacaaatataaaatatttacttcaagaatcatttgcacaaatctacgacgatattagattattttttcattgtcattaaataacataagaatatatatatatatatgaatatttattcatctcttttgttatagttcagttaattatatgacatgtttgtataattttcatgatatatttaagattttatcgataatacgtaatcttcagaatatatacataatttatatatattatctatcatatcatatgcacaagttatattgtaaatattataaataatgagaatacataatatgtataaatttaataataaatatacaagaataaaaatatatacatacatggaagaggtttcaatggttatatttttattgtaatcatcatggttacattttt

SEQ ID NO: 65777 - DNA, 4268 bp, Cannabis sativa
attgttataaacaaaaatatacatgataaataacacgtgtttgttatgttagttaattgtctgtttctgttgtggtttctttgtaactgaattgttcttagctgttcaacagctctttgtacatttcctccatataaataaaagggtctgctcaaaggaattctttagagcttttacaattctctggtttcacttcttagttgatcctgataagaattgtatagatgagcatctctttcatggtatcaggaagccattgactcacgtcgataatggatcctcgacacccagaacctacttccgctgctacaaccccgatgaatcaacaaattgctcctctacaacaatggaatcccttccaaaattccctccattcctctctcacagttcgtcttgatcgaacgaactatctggcgtggaaatcccaagtgattcccacagtaatcggtcatggccttgacgacatccttctcaccggagttcctcccgttcaacgtcttgttttaggcgacatcaatcccgagttcactgcgtggaaacgaaaagatcaactgctcctcagttggttacgctcgtcaatgaccgaaacagttcttggaactttggcccatcatgaatcctcctgcgaagcttggcgtgcactcgctcaaagattctcaagtcaatccaaggctcgcctcctacaaatcaaatctcagctctcaacgatacagaagggtaacctctcaatctctgattactatgacaaggtcaaattgttagctgactctctctccatagctggtcatcctatggaagagagtgatctgattatgcatttactaaatggtctaggtcctgaatatgaccctgctgtagttcatgtaaccagtcttgtagatgatgtttcttttgagtctattcaatcgttattgctaacccatgaaagcaggattgagaggcactatagtgtcaatgatctttcaaccaagatctctgccaatctcagtatgaacactccaagaaatggtcctggtgcaccaaatcattactacaattcccagaacagaggttcttatgtattcaagaacagaccacctgggagaaattcaagatctgccccccctcgattcctcgactgctatgtcaagtttgccacaaaccaagtcatacggctgctatatgtcattataggtttgacaagaattttgtcactcctaaacctggtgaatctaaagcttttctcactgaacttgacgaccaagattttcctcaggcctactcctccaatgccttacccgaatttgtcgatgactatgattggtatgctgacacaggtgctacgaatcacattgctcaaggcatggaaccattggaatctgaaacaccatactctggtcatgaggctctcacagtgggcaatggcaagaaacttcccatatcccatgttggtaatacctccttatcttctttaacttctcccttgaaattaaacattgttcttaaagttcctagtataactaagaatcttattagtgtcctacaacttactaaggataataatgtatttttggaatttcattccacttgttgttttgtcaaggacaaggtcacagggactgtcttacacaaggggagggttaaaaatgatctttacacattgtctcatcgttccttttccaccccagaagtcaatctccaatgtcatgttgccacttccaagcatagtcctactattgctactgctgttacatcagtatcgcatccctcttgtaataataaagctgctacagcagctattactcagtgtaatgactcttcaatgaatacaattagtgattttcagtttctctctcttgtttctcctaaggctgtttctgttaataaatctgatgttaatttatggcatgccaaactgggtcaccctgctccacgaattcttgccaaaaatattaagtcaattgcacatttcaccaaatttagaagccttaaaattatgtgatgaatgtaaacaaggaaagagtcataaagccccttataataattctgattcgagagcctcacagcctcttgaattaatccacactgatttatggggcccatcacacactccatctaaagagggatataggtattacatacacttcatagatgattttagtaggtacacttggattttcccactcacactaaaatctgaggcctattctacatttttgtaatttaaattgtttgctgaaaaacagtttaattttcccataaaatgtgttcaatccgattgggggggtgagtataggtctctagccaacttcttgcaccaacatggggtacactttcaacatccttgccctcatgaccatgaacaaaatggtcgtgctgagagaaaacatcgtcacataacttaaactgggttgactttacttgctcaatctggtcttgatttgtcatattggtggcttgctttctctactgctacttatgttataaacaggatgccaacattggttataggagatatctctccctatgaatgcttgtttcacaaagcacctgattatgattttttaaaaccatttggctgctcttgttatccacatcttcgaccctacaacaaccataagctcagtttcagatcagaaaaatgtatctttattggatactcgcttcaccataaaggctatctatgtgaaaacaaggatggcacggtgtacatagctcgcaatgtggcctttaatgaagatgaatatcctgccctttccacaacaaatgttcaggtacctcctactttctctacacatgtgccttcaacttgctttcctactacaccattattcactaatattgttgcacctgttactgtcgatttgcctactcaacaaaattcctcctccactgctcatggattgaggtctgatgctcaaggggtttcattacctgatccaacagctgcaccaatagtgaatggtgctggtcactcaactcctgacgtgagttgtataccagtagccactgagaccgattcaaggcctgttccctacccattaccaccattattccatacacaaccatttattcacccttcatctgatgcaacaagatctgctatagcagaacctccaaacacaaatcctcttaatcaacctgttatcatcaccaccaactctcaccctatgcagacacgttccaaatctggaatcacaaaaccaaaagcatactgtgccacatcctatcctctacccgaatcccttctaccaaaagaacccacctctctcaaacaggccttggcagatcccaaatggtttgcttccatgcaaatggaaaatcatgctctcattaaaaataacacctggacattagtaccttatcatccttctatgaccttagtaggcaacaaatgggttcataagatcaaattaaatgcagatggctcatttgacaagtacaaatcaagactggttgcaaaaggatattctcaaacccctggcattgactttaaagagacgtttagtccagtggtaaagccagctacagttcgcatttcactgaccttggcagtcacattcaattggccaatcactcaactagatgtctctaatgcttcccttcatgggacacttgaggagacagtttatatgccacaaccaccaggctttgtcgacactaactaccccaactatgtgtgtaagttgcataaagctctttatggtctcaaacaagcaccgagggcatggaatactaaactaaagacaactctatacaacaaaggatttcagatttcaaaatctgataactctttgttcattcgaggtactggacaacacttgatagcacttttagtgtatgtggatgatattttaataacgggaccagatcaacactccattactgctatcattcgtgatctaaatcaggagtttgctgtcaaagatttgggctctttgccttattttttttaggggtggaagttcatcgaactacttgtggtatatatctctctcagtcgaaatatatagcagacctacttactagactcaacatggacggtgccaagccatgtcctagccccacaagtacctctcatgttctttcactcacaaatggggaacctttccatgaccaaacattgtatcgcagcacactcggtgccttacagtatcttactttgactaggcccgatgtcgcatttatactacataacataaaattgttatttaaatgttggagatgatactagaatgacttaaaataatattgatcggagctccttatcaaatcaaaaaaaaaaaaaa

SEQ ID NO: 65778 - DNA, 977 bp, Cannabis sativa
aactctcaaaataaacaaggtaatctttcatattaccattctcttgctagcattaacccattccaaacagtcctttaaaatattctattaaaccagcaaaaattatttgataactatatttatacataaagataaatatatttatatatatttgcatccactaaaatggcagcatacattacatttttttttatctattaatgtaaaaatttattttttataattatatattaattgaaattaattatatacttgtgaacattaattaattcaaatattttatagatatttttttaataattaatattcataaatatttttattttcatatttaagtctttattctaatttttttttaacaatcaagtcatatgattataatattttgtcataaacttttttttttttttacaaaagttacacttcaagcctttttaaaataaatttattataagtaaataattttttaaaagacatttagttgattaaaaatacaaacaaatataatttttaaaataataaaaaaaaatcgtttgaatttttttaaaaaaataatatgatcaaaacattttcagcttacaaaaagaataaattcaaatatttgttgacggatagcggcttgaattgaaagagtacttaaagtaaatgagagaaaaaaaatagtagtctacatatttatttttttgttgcttttatataatataaatgtagataaccattaaaaaaagtaatggagataatgtatgataccaattggtgtagaggtacacgtgggtgtgcacacaattaaacgataaaaacaaattgacgctagctttatttgatacgtatttacaactaaaactaataaggttataattaaatagtaaaatgaatataagcatgacactttataaaaaatgggagactttaggtgttgaaatatattttacgaggatctagatttactaataagtatgtttttaacatcctaaaca

SEQ ID NO: 65779 - DNA, 1035 bp, Cannabis sativa
agagagagagagagaagaagggtatataatcgagaaatgtggaccgataaaattgtatcacgtgtacactgtattcacgtggacaatttaacatgagatttaacagttaaatttggatgaaaattataaattactaatggtatagtggttttgctgccaaaatttgaattttaaaagttaattgctacagtattaaaactattttgccacaattaattctataaataataataaaaaataattacagattttatattaatcttagatattaatgtgcaaatatttgtgtaaaattttgatataaatatttttcaaatttagatggaaaatacatttttagtattatatattatacttttagagctaattaattgagtatttattatttaaataatatcattattttaataagtttgtgtatgctgattaaaaattgtctatttttatttgttttggtaagaaatttatgaataaattgttaattattttatgggaaatgatttcatatactattttttttttatttttttttctttttaaatttacagtttgggtttttaaagtggtttctatgtgagttgctgtacgatttttggttgcgatttaggttgctccgttagttgcaatggaggtttctatgtagaattctgtaaaaaaacaaaaaaaaaaaaaaaaaactgttatatagtgtaaaattaaaaaagcccattattttatttatttatttattagcactcaataaaggttgggggtgagggtttattcaaggatagcattcgctatcaacatgtcctgaatacaattgagattccctgactaccaaataatactattacttgcagacaaagcaagtttggccaaagtgtaagcaacacaattacaaggtctatgacaatgaataaacctaacaacatggatcctattacaaagcttatcaatatcatctaaaacaagacccaaaaaggtaatgatagaaattttattttcattttgagcacaatattcagacaatgaaactcaataatgatgttgtca

SEQ ID NO: 65780 - DNA, 1607 bp, Cannabis sativa
ttacaaaaaatggtgccttatgtaattattcctattaattatgattaagtgggttccactattaaacttatttttgggtaattttaatcttttcaaatacttgagtttgaaaattttttaatctagccccacttttccaaactcattataacatataaccatccaaagcttcaaccacttcttttcactttttccctacaacttcttttctctcatatttcttttctatcaaatatagagttatactcaagactcaaacatattaaaacctaacctcattctattttaagttgctagtattgcttgttgtaaagatagttagttagttagttttctttttttgttttcagttatgtacataaccaaaatctctgtctataaataaaaattttgctctagttgatcgattagcttttgctaagctaatttcaattaacatttttcgtactatgtcctttgttcttttgttatgtgtttctacatggtatcaattgctcttgactaacgttaatgtcgtcttctacaatctatctcgctcctgcaacaatggcaaatgccactatttctgtggctcctccaaaccaaccatgaaatccattctctaattctctcattcctaaactcaatcgtctaaactttctgccatggaaatctcaagtggttccaactgtgattggccatgatcttgacgagattctattcactggagttcctttacccaagaatcttgttactagagtaccaaatcttgagtatgctcattggcggaggtaggatcgactcttacttttttggcttcgatcattgatgacggagagtattcttgcatctgttaccaatcacaacacctcctatgatgtgtggcatgctctgaaacaaaaattttctagccaaaccaaggcttgacatcttcaactcaagggtcacttcttcaatattcaaaagggaagtatctctatttctgagttggttgacaagattcaatctatttctgatgccttgagtgttgctggttcccctgttaatgatcaaaatctaattctacatatcttaaatggtcttggactagaatttgattctattatcttaagtattacgtcaagaagtgatgccctcatcattgaagaagttcaggccttgcttctctcccatgaaagtagattggagcatcatcaaatcatgtcggatcttgctgtcaaaatgcaagctaatcttgcttttggaaatggcagatcaggtggtgtttgaccttttgccaacttcaagaatcctcaacatgaattgtctcaacctttctcaggtcgtggcaggggttatcttcgatacaatcaataaagcgtaatctgtcaagtgtgcttaagaacttgccatacaattctagtctgccactatcactttaacaaaaattgggtggttctgaggtctaaccaaccttcagcaagggctcatctcacagaggtggtttttgagtatgatccttaggcctactcaacaacattgtttcaagactttggtgataattgttcttggtatcctgacactggggccacaactcatgttacattcgattcaactactcttgaaactcagtaggcttacactgggac

SEQ ID NO: 65781 - DNA, 581 bp, Cannabis sativa
atttcaagtagcaaccaaattttggtattttattaagagaaaaaataaaataaggagtgtatcgatgcactcttttgacatttaggaaaaaaaattaatctaatttttttatgactttttatattgtaattatttaagatattaatctttataattttaaaaaattcagaaaaattaaatataataatttttttttatgtatataaaatgaattgttttaataatatttttataatatgttttaaattaatataaataaattgtattacaaaagcacccaaaaaaaagttgagctactttcttttttaaaataggttcatcaaaaaacaaaaaaagaaaaaatagtgattgagtggttcacgaaggaaagctaaaaaggtatagataaaaagggtgtaatgatgggagactcaaccggcaacaaatcaataatgactatattagtactgtcattgttctaataaaaagaactttcttttatcaaatatgatcgcagataagacacagcaaagagagccaacaaaaatcaaccaataactttaagaagaccatcatcttttgaaaagaaaaaaaataaaatt

SEQ ID NO: 65782 - DNA, 607 bp, Cannabis sativa
  modified_base (437)..(440): a, c, t, g, unknown or other
atgttggaagaatgtagtctctcaaactacgaccgtttgcctgatcttcaatggcacctccattattaccattgttaacgccattattacccccattagcattatcagccattacttcttctatttcagtgcttgctgggattctttcttgccttttgtttcttctatttcttctataggtcttttcaatttcaggatcaaccggcagttttacactttgtccttaacgtcgtatgcacccctaatgcttgaaataaaataagacaatctaaaagaaacagattagcaataagcagaaagaattaaccaaagtagaatttaatctcatttttgtaatatcaatctttgaacaattccccgacaacagtgccaaaaacctgttacaaaaaatatgaacagtacgcaagtgcaagtaatcaagtagtaaactcacacannnnaggtcgaaccacagggaattgaactgaataccactaaactagatttatgattctatttggtaaataaaaataattttgacaaagtttaaaaaacgataaacaagaaaattaaagaaagcagtaaagttgtttaatcaaggatgagaaattagggaaaagaatcatgt

SEQ ID NO: 65783 - DNA, 662 bp, Cannabis sativa
tcccgaggtaatcaatgtggttggtctcccactgtacttagggctgaacgtagtactttagtcacctttgaagactcccgccttcattttcatatttggaattcccttcttgtggactgcattgctcataagtttgacagctggtatcctagattccacgtccaggttaactgtcatgagtcatattatggtatagctgagcaatacagtactatggaagatagggcaggtcacataaatgcgatctgggatatagaacccatcgagccttttgatatattcaagattacaggttgtagggattttagtggatattatggtccttctaccccttcatttagtgatagctcgccttctagtgattttggtaaatcctttatgcagaaattttattcttcctttttcatcgacctttttaataaatgtaacgctttgtcttgttttgcaaacatgggttatgaagatatcatggaccggaaggggtccctacaactgccgaaatggttcctcccaagagacaaaggaaaaccactacccacaagaagaaatcactgcccgagaccatcgatctcgaagtctctgacaacgagatccaagaacaagttcctcctctagtcgtttctgacactactgctcctcatctcgaggtaaccccccccccc

SEQ ID NO: 65784 - DNA, 665 bp, Cannabis sativa
gttcccatggacttctagagactttgcaaaaaattggaagtaaattttggatctctatcagaaactatggatttcggagctccatggagacacactatctccttaacatacatctcagcatactgatccattgtaaaggtggttttcacttgcaaaaggtgtgctgactttgtgaaacgatccataattacccaaactgagtcatacataatggtagttctaactaatccaaccacaaaatccatggtgacatcttcccattttcactcagggagtgtcaaaggctgtagtaatcctgccggattctgatgttcagccttgatctattgacaaatcaaacaccttgatacataattctaccacatccctcttcatatcgtaccaccaataatagggtttcaaatcttgatacatcttgttggtacccggatgtaatgaatatggagtggtgtgagcttcatctagaatctttttcttaagcccactatcatttggaacacaaactcgagccttataaagtagcataccagtatcagaaatcgtgaagtccttaacatgtccaactaagacttcctcttgagttttgattaactcaggatcttccaggttagcacacttgattctttctattaggtcagaatgaagtgtcaagttactaagtttgc

SEQ ID NO: 65785 - DNA, 858 bp, Cannabis sativa
  modified_base (171)..(178): a, c, t, g, unknown or other
  modified_base (481)..(490): a, c, t, g, unknown or other
aattttactatttcagtaattgtttatgtactaaatcatactccccggactttgatatctaccaattcatgtctctcaaattttgatacgtatgaaatcatgcccctgaactttcattcatgttagaatttttttactaaaattagacagaagtccttaaatctaacaatnnnnnnnnttcaggggaaatttttaacggctaaaaaagttcaggggatataatttggtacatgttaaggttagggaggaaaaatcctaattatataattatatatataaatggactaaaagatatacgaaaaatgtttattctaagagtgttttataaatttttctaaataaaataaaacttatggtaattgtgaaggctatggtttcttaattcataatatattaagatatagatatagatagtgttaggcactaaaaattcaatttaattaaatttaaactaaactaagataataataataataataannnnnnnnnnaataataataataatattaattagggcccacactaaagtttgtgaagccacttgaattggtgatggtggtgagaactgtttggtttctgatcatgaccaagtacagttactactattattattcacaacaatgacacttttaatttactattctcaccttttattttttttatttttaaaaatatatatagtatttattataagagtataatctagtaccatctaaagatgacactttttgattagttaacgatattttataaaattattacattaaattatatgaaacttcatatacttacctatagcgatatgagatattaaagggggttaagcaagatcggcccaaaccatttgggggcattcga

SEQ ID NO: 65786 - DNA, 950 bp, Cannabis sativa
tttacatggttggggcattaataagttttagtatacgagtcaatattattatactaagactagaaaagtcttaggatttacacaagtatttgaaacctacaatttacctgagcaattgagaatgagatttcaatcctttgcataggttgatgttcttatatttatagtgctaggattcttattcgtttttctttttctacttatagggtaaataaaaataataaattaattttgggtccatgtcgtggagcctagcccatgtggcactgattgtaggctgatttggatgtcaaatcatcttgataatttttcaatttatgtcctataattatggataataaaagcatattaaattcttgatactcaatttttattgtttcatattgggaagatacgatccacaggggagatcttgggagttaaatcataatatcgtgagatttgataattaatgagtacgagacgaagctagttgtccagatgtctgctgattacttctctggacgctccaaatgatgtcttctggattctcgctgtgttagaggattgtctcgcctaaacgagttgcatgtatgtcatctggaagatctaatttgctaatagatttggtccactatcttggttgggcctactattgggcttgaagtgactgagctttaactggctttggacattacatgtgtcctgcttctggaaatacggataacatttacccctaagtttttaaaactctaggggttatggaagcttgcacccttcctctcagacaccgtgaggacaggtgaaggctaaaggtgaaacttttttgaattcaaaacaaaaattgtttctggttgatagcttcttgtttttttaaatgaagcgacatgtgtcattatatctttggctcgttgggactacttttcttaacagggcacgtgcagtaaggcttcatgaaacggtagttgatt

SEQ ID NO: 65787 - DNA, 627 bp, Cannabis sativa
  modified_base (160)..(162): a, c, t, g, unknown or other
atttaataatatatgtaagaaagttgtagaaagtttaatgcatgagatttttacgtggttggggcattaatgagccttagtcctctgcttcgcactgctcttacccagcttttcctctagcatgccaaggttttctccacttatgacagaaatggtcttnnngtgggggacttggtcacaacggagaactactggaaggccaagctcatctcagggagtcaatcagtggatgacttcaacctcttcaaggttctctgcccaaacattcgtaccccggacactgaaaaggtactccgggcggacattatagcctcagcggaggaccggtattagaagtacctcttcaggagagaacaggagttagcttatatcaaggctcacgctaccgccaggaggaccttcccactggaagcgggtaaaggacggacgccctctcggcctaagttgttggtcccggttcttaatattggggctcccgatgccagcacatccggatctggtaagtctcctttaacggtctatcacgtcccttttgcccaagagtattcccggtgtaggcctataggatttgacgaacatcttcttagatttagaatgcccctacccggtggggtgatcatgcaaagg

SEQ ID NO: 65788 - DNA, 746 bp, Cannabis sativa
attgtatcactttttaataacgtagaaaaaaactagcataaaatttagtatacgtgcctcgcacgtaactttttgctagtatatagatatgtatacatatttaattatgttatgaaatattatttttaaaaatataatttctttaatatttttaataaatgtttattattttattttatgatttaaaattttttattctttgaattaaaatttttattcatttattattaaaatatgtatatattgtcaagattattagtatatattttggttttggctgaaaaaaaattcttaaaaaataatttagtttattcaaaaactaaatacataattactttccctataattctaactaatccaatctcaatctaattgaatctaatcttgaattccaagtggaccctaaggtcaataacaataagcaaaatttaatagaataacattttttagaaaatatattcatttagtactctatcttttctttgaaaacatatttcgtttcttgtattttcaataatacttatttggtaccttatattttgaaattgtacatatttaatataagaaagtaaaatttaattaatataattttattattttaaccaaacaattctcaattatatgtaattaaataattaaatttgattccaaaatttataaattaaagacgatgtgattgtattgataaaattttatcaaaaaattttaaatttagtatacccaatatgtatgcttttaaaatatag

SEQ ID NO: 65789 - DNA, 1561 bp, Cannabis sativa
  modified_base (363)..(366): a, c, t, g, unknown or other
tctctttcaataatctcattatatcatgatcatgttgttattgttctcattcctatattatgaaatgactgtcttgtttcattcataatggtcagcacaatgaaacataatcatgattatatctctttcaataatctcattatatgattatgttgttattgttctcattcatatattatgaaatgactgtcctgtttcattcataatggtgggtacatatcagctggtatcgagatggtgagtttgggttcagtctaggtggcaattgtctagagatcgtagttgtggggatagtgtttcttgtgtagtggtggtggtgggagaaagcagtgtagatcgattgaagaagaagaagaagaagannnngaagaagaagaagaagaaggacgaagaaggattcgaaggatctagaaaagaagaaaaaaaaaaggttttttttcgtcatattttataattttttttattatttattttatttttataatatttaactaaataatgtataattgtgtacatattagtaatataagttgatacttaatattggtttattaacataataataaatactaaaacagaagttaagtttggagattttactcctaaaaattcaatttgtaagattaattattatactttgtataatgtctctattttaaatcaagtgtatatatttcttacggctatccttcaccgcttcccatttcctcctcattttattaaccttatttatcagtgtgtgtcctcaacatctatacggtttagtattaatgggcaaatcactgatcccattcttccctccaggggcatcagacagggagatcatttatctccctatctgttcttgctttgttctgaaggtttaactgctgctttacgtgttcaggaaaacttgggattatttaacggcatttctattgctccaactacccctgttgtttcacatttactctttgctgatgacacccttatcttcaccactgcctcctttgcttcttgtaattcccttaaagaggccctcactctctataaccttgcttctggtcagaaagttaattactctaagtcctctatccttttttcccccaatactccccctgcaatctcttcttacttctttgatacactagggcttgaagcaaaacctttcattagcaagtatttaggggtcccgcaatgttttggtcggtccaaaaaatccagctttgattttattcttcataggataggttctgatctttcagcttggaatgagaaattattttctaaagctggtaaagaggtgcttctgaaagttgtaatccaggcaattccctcttatgaaatgtcttgttttcgcctccctgtttcagtttgtcagaaaattgaaaagatgatggcacagttttggtggggttcgatgggtaagggttctaaaatccattggaaagcttggactaatctttgcacttccaaattctttggtggactcagattccggtctctagttcatcataaccaggccatgattgccaaacaggcgtggcgtgttttgtccaatcccaattctcttcttgcggct

SEQ ID NO: 65790 - DNA, 2064 bp, Cannabis sativa
gagagagagagagagttgggattgggaaattgtattgagcaacattgtcgattatgctggctcgggttagtaaattaatgagcattgagggattacaccatggatgacttactgtgattatttccttgtaactcgtaagattgatatctctaattctcattatcaataaagattggtggtaatgctttcaaactggagtatgaccaagttcacactgaacttaagatcagaactagtataattctcgtgtgttgttgtatctggaagctatctagattcatctgtgttatctttctagtttaatatgtgtttgctgattttcagtttttaatttgtttgttttgatttaacttttatttgtttaagtgtgatcttgaacttggaattacagaggttaattcgtacgtatcagagctaaatttcctacataaaccaatgggtgaagggaaatttccttaccagttcttgacagctttagtggttccaaaattaaagagagtgaattctgatggcaaagcaatgaaggtaacagcagcaatcccagcagtcatcagaatagtagagataagaagctgtcgtttcaaggaaggttcaatctcgctcacgctcttgatttcgagcaggtctgttgcgaaaagtgttgttatcaaacaaacaacaatccccattgagcttatgataagagggtaagacatggctacatagtcatggttgattccaaaggatgatattgatgcaacaaatagtgcagcacaagatgactcggcgtatgatccaaacagatcagatcccattcctgctatgtctccaacattatcacccacattgtctgcaataacctgaaacaaaagatatcacaaacaatagtgttatgaaatagcctcaaagtgctataaaaaaatgtcatgaaagaaaattacagctgggtttcggggatcatcttcagggatgtttctttcaacttttccaacaaggtcagctccaacatcagctgcttttgtatatatgccaccaccaactcttccaaagagtgccattgaagagcctccaagtccataaccagtaatggactcatatagtccctcccaatcatctccataatacaacttaaacaaattgattgagacaaaaagcaccaaaagcccatttgcagcaagaagaaatcccatcacagcaccagacctgaaagctgtagtgaaggccttcccaacacctttcctggcttcaagagttgttctagcatttgcataagttgctattttcataccaaggaaacccgaaaggactgatgtaagcgcaccaagtaaaaaggcgacagtggtaaagaaggcattggccaacgctggtttacatgtgtttcctgtgttgtaggtgcaaggttcggttttggtactgaatcccttaacagaaccaagaaagaggaagataataagaccaaagactcccatgaatacaccgagatatctatactgagtgaaaaggaaagaagtagcacctgaaaacaaaaaccatcatattgaactaataagagttgtgtacatgttcatttcatttgattctcagtaacatcttgtatgtaatcaaacaagttctaatgcaactagatactatattagaatgaaataacaaacaaactagaaaaaaagtgttcccatattgatcattctgtgtaatcattttacataaaccatgttaatgggtaccattaaaatcttggatttagtctgaactatctggaaccaaatgggatttgaagccccaaaattcacacatggaagatggtggttacaaggacttttactgaagagtaatatttcagatactgtattaaaacaaaattaataattatttataattgtaaaacaaaatttgaccagatgagagcataaacacaacagaaaatagattaataccaaatctatatatgttcattgcaaaggaaacaacacaaaaattaaagcgaagaggtcaaaattagcacaaacacttagtgaacaaaagttatatacatacataaaactatagtcatcaaacaaaatatgaagccaaactgatatatatata

SEQ ID NO: 65791 - DNA, 2054 bp, Cannabis sativa
tgaaactttggacaagaaaagcttatagtaagcttttttgttgcttgattgattcaattggtgtgatgttgtttctgctttttggttttttttttttgcccaatttgatgtttttaattcttgtacaatgctaaatctttgtaattagaaaaataaagttgaaagaaagaagtttgatttgatcacaaaccaaaatgcttctagctagaagttactctctcataaagcttaggcgccactgttctatctcagtcttcattttgaatgttcgaaaagttcttatggattactaatgtgttctttaccttaaaatatttataaccaatcttaatgggtatgtcttgtactcattatatgcagcctctaatatttcagaaaatgaaacacaaaaggaatatgagcaagagctagcttgcaaaacttggacaagaaaaggtgcgagtatgaatggtttatgccaattaatgaagacattacaagcataaaagtaagctttcttgctaatatttttgttgcttgattcaattggtgcgatttgtttctgcttttggttttttcccatttgatgtttttattcttttacaatgcagatctttgctcaattagatcccattctaccctataggcatagtaataagaaaataaaggtgaaagaagtctgctttaagttaaattataattggtagaaatgcttctagctagaagtactctcataaagcttaggcgccattgttctagctcggtcttcattcgatccttaacagtttgttcttcatcattgttaaataacccttctacctcaaaacctcattttcaaaacacagcagaatgtccacaattccatttcatgtttccccgatacttctcttcgaagactgcaagttcttcttccaaacaatctttacctcttacccgtgatggaaattacaacgaagctagtcctgagaatcttgttgtctgccctggttgcggggttcatatgcaagatgctgaccctaaacaccctggctttttcgttaaaccttcgcagaaagaccctaggacttatcggttgcatgcccatcttgaacctgtttgtcaagagtctgaagtctcagatttccttaaaaggggtactgtgattgagcccgaaaccaatgacagtgacgttggtgtggctgaagttaggcacgaaaggccggttgtatgtgcacggtgccattctttaaggcattatgggaaggtgaaggattctacagtggagaacttattgcctgattttgactttgatcataccattggaaggaagctggtatccacatcggggactcggtcggttgtgctaatggtcgtggatgcatcagactttgatggttcattccctaaaaaggttgcgaacttggtgtcagatacaattgaagagcatttaacagcttggaaactggggaagtcagggaatgtgcctagagtagtgcttgtggtgacaaaaattgatttattaccgagctctatatcaccgacgagattcgagcactgggttaggcaacgagcaagggagggtggatctaacaagttaacaagtgtgcatttggtcagtgctgtgagggattgggggttgaagaatcttgttgatgatgtcatcgctttagccgggcaaagagggaatgtttgggcaattggggcacagaatgctgggaagagtactctaataaattcattaggaaagcatgttggagggaaggtttctcacttgacagaagcacctgttcctggtacaacattggggattgttagagtagaaggcgttcttcctcgtcaggcaaagttattcgatactccagggcttttgcatccccatcaaattgcaacaaggctaacaagagaagaacagaaacttgtctacattagcaaagagctgaagccaaggacttacaggatcaaagttagtttagttgaattgctttttccttatgcctttttaattttcagttattctcatctgtgatacacttttcgccaccttgtttgctatatttcttgcactgttgcacaatcaaagcctagaagtaactatt

SEQ ID NO: 65792 - DNA, 808 bp, Cannabis sativa
tcgtatatattatattggtggtttctttataataagaattcatattcaattaattatcgtatttacttctattattttgtttgttaagatgtaagtttcatcatatcccacatagatttttgatttaataatgagatttgacaatccaattataagtttgtgagattgcccttttttttctcttttgaaaattttaaaataatacaaataaaattttataaaaaaaaaaaagaattccaaaattaaaatatctattccaattctgaactaatgtaaaagaacttatgcagtttatattttgattctgcaagtcaagtaaaacaatccttagtaaaatttatattgtgccccttaaatttttatacacgccacttttttttttagtaaaattggataaaaaaaatcttaaatccaacaatctcaataatccaaagagaatttttaatgacttaaaaagtttagagtgcataatttagtgtatgtcaaaattcagtgagtaaaaatctaaattagcttaattataaatggagataaattacaatacagcattgtcccacattaattaagtaaagatattgaattatgctgaataaattgctaacaaaaataaaaagagaacgatattaactgaatgaaatttttgggttgagttgcggactaggtcgctctctttaagacgttcgtggcactgcccaggaatattcaagcaatcggaatttgtcagttgtccctaggataaaataacctaatcgtactgtaccggaatcctactgtagagaatattgttgaatacatcctagaatttgta

SEQ ID NO: 65793 - DNA, 641 bp, Cannabis sativa
gttgtcactataattttgctttctgtagaacccacagataacaactccgcaaattcctgccacttaaaagggtcgtcattccatacatcatccaacacaagtagaaactttttatccttcaaattctcactcaagggtcttcgcaactgctctaaattagtcaacttactaatctcagcttcattatttgttgcactcataataacatctttcactagtctaatgacattgaaatctaaagatacacaaacccaaatcttcaaaacaaacttttcatcaattttcccatcattgaaaactgatttgatgagtgtagtctttcctaaacccccaattcccattatagataccacaggaatttgattctcaattttgtgatcatccatcaatatcatatctaggatctcttctttttcacgatctctaccaataacatccgaagggttaacaaaagagtgagtcatcactctattctccaacacgagagagttttgttccatattcaaaggtttggtcaaatgaaacatttgcatattcttaacaatctcatctaattgttgtcttatctctttaactcgatgaacaacactaaaacgataaacaagaggattggaccatgaaaagaaacggcatacctttct

SEQ ID NO: 65794 - DNA, 993 bp, Cannabis sativa
agtttttttactctttccaaaacgacactatctctatttgacaactttgttgcatactcaaaacgttgtcatcagtttcaatcatgttaatagttaactaatccaaatgaaaaaaaaaaggctctaaaacacaacaattcaagagtataatagaagcaacaatttagcaaattcacatattcattctagactttaagaaaccactacaacgtgctacattttaagcgtactactagaaatgatgactcagttcaaatattactgcattactaaataaaaccttaagcaacattgtctgaatcttccgcaaaaaaagacaaaatatgaaaataaattaagaaccaaagtaataattagagattacctgaggacagtgacagggtttggaatccttaatgaagaaaaaagggaaattgaggtaaggagttgtaatagagctcaatgctgaagctacgaacacaatcgccagggcacacacaaatgtccatctcgacattctcgtcttcctctttccattctcctcctctttcttctccaccatatttttcaattttcggacaaattttatgaactgaaaaactcgtcgattttcccaggaaccacatgtaataataataagcgcattttatatacattattttaattaattattttcacatacatttttatatataataaaaactttttttcaatttttttataatatatatatagtaataattattgattattatatatacagtaacattagttaggtatatttttatgtttataattataataaatataccaataatattaaatattttatatatgtatttattttattttctatatttaataaacaaaataataatattcatataagtttattatatcacttaatgtgtgttatgtttatttttaaaaaataaataatatatataaaaaattgtttatttatttatttatttattttgtttattgtgtcatgtttattttttttaattaaat

SEQ ID NO: 65795 - DNA, 764 bp, Cannabis sativa
  modified_base (55)..(72): a, c, t, g, unknown or other
ggatcaaacaactataattttttatttaaaacctatctgacgggaaaggaaaatnnnnnnnnnnnnnnnnnntataaaactgaatactaacgattctcgcaagctaataaagtactaaacaaggcatcacgaaaccttgataaaagtacttgaacttagaaaatgaatcgataatataactattcatacgagcaaattaaaaatatacaaagtgataaaatcattaaagtatatttaagtttacttgaggaaaattgtaactactatagcgaggtagaattgacaactactcgaaaatcaaaatgtttggttgattacaaactacttaaacaggaagattacaaacttgtctttacaaaaatgccactaggggcaaaccattaagtcatcttcctaaacataggatgagaggagaaagatcgactacacatagcttggagaaagaccggctacatgtagttctagaaagaccgtctacacgtagagagccttgatctctgcacagacctcattctcctcatcatcagaatatcccatctcctgaaatcgagacctatttctcagcctcaggaaactttttgataccagaaggaggctagcacgaaggtcctctagtgcaagccttgagttggctggattctctgataaaaaccatgccaacttctctcgtgggtccatccaaagccatgccaaccttctttcaggactccttgtcaaccagaggaggacttttaagatcactcacaagatctacgtctattcct

SEQ ID NO: 65796 - DNA, 947 bp, Cannabis sativa
cacataattgaaatccattacgagaaatagtgcaaatagaactaagaaaattcaattgataaaattatttttgtaaacatgaaacactaatcaagtttctactaaaattcggaataaagaaaacattgtctaaaactaaaaatttctttcaaaacttgaggcgacttttcccttagcttggaccgatactaattcgccatttccaacattcagttttaactcccctggatttaaataaacccaagtttcaagcagctgcaatgaagaacaaacatggttagtagttccagaatcaacaatccaaaaggatttgtcattctctaaaacacatgattcaaaaaaaaaagtgttaccttcgttcgaattgtctagaagtttgggacatctttcttcttgatgtcccttctcatcacaatttgaacattcaagagtatgactatcaattgtttcactatttgaacttgaagaagcagcattgttagaagcatcatacttaattcttttcctcttactcaagtctgcaaaacttgagggtggcctccttgcaggcaaactttgctcgtaagcacgcaattctttgtccagcttatctacgtcgaatgagttaaaattgttgaccatgtaagatacaaccaatccattatactcaggtggaagactattcagaatgaactgaacccattgttctcttgaccaatcctttcccagcaaatttgcttctagaacttcagattaatcatcattaagtgtgaattaatggtcttaccaagacacattttcacactatagagttcatttgcaaaggtctgtacaaggagaggttcgggtgtgggttatccattttgacactacaaatatcaataaacagaaataaattatttggttcactcaaatttatacacaagttcagaaaataacaattgagtaaacatgtttgcaaaaatacc

SEQ ID NO: 65797 - DNA, 1221 bp, Cannabis sativa
ttctatggactccggtacgcttccgctattccttaattttattgtttgattctcttgaattaattagggctatatacagatttacagtatttctaatacggagagctttgaattcttgaaagagaaatgctaaaaggcacctgtggttcctaatactgtatcaatatcgctattggttcaactagttatcgggtctcatataatttaatataatagtttttagggagtattcctaacaaatcgcaacgcgacatgtcaaaaaggtgcctaatagcaatgttctttttgaaaacatatttttctcccttttcgaacagccactataaactatattttgatttgttgttttcagatttatgattgcataaaaaaaattatttttttaaaagttaccgaacagtatcattatttgccacattttaatactatattaatttgtgcaactgatcacctaagtttagtttaaaatctatgccaaacttttcttttcttttctttttttcttttgaaattggaggtattaggcaaacaaaaaaaaggaggggcttgaggagttgttaaatgtgtatgacgtaagtgcatgcgttgtgagtttgtttaattaattttgttgtatatatacgaatatatatgtataaaagtgaataaataaacacaggtacaggtaatgagatgagattcctaaatgctacgggctactgcatgcatgcatatatcatattcatatatatcttagtccatttgtaaactgatttgataaattcatttctatatataggcccgtatgattaatcattctcatcctcaaagtcatttcaaagagtatacaaaagttttaaattttgttcgaagttcttcttcaaaagtaattattccctcccaatttcggtgctatcatgaaaattaatatatatattcataaaaaaaatatatatatttatataaatatatgtacatcagaaaaggtgttttagatcattaacgttaaaatacatgtatataaatatatgtatatcatttgtatatataggagtgaaagtctaaccgtaaagcttgaccaatacagggagatttaactttaacccaatcaaaaatacactatccactttaaaaatatacgtacgcgtacatagcattagcatgtagaaaactgattaggaagtacgaattacgaattatgttttagttggagataaagaaataaaaaataaaataattttt

SEQ ID NO: 65798 - DNA, 740 bp, Cannabis sativa
aaatacaaggtccattttgtcatttaacaaaacacagagtccaattggtaacttttgtaaaacagaggatccaaaatggtatttaccctttaaaaaatctttcattttttactcgatttgcttttttaaaatattattttgttaaaatcttttgtacattttttaccatattttttctctcgtatttttaaataaattttacttgcttattttttttaagtttttcttatttgtttattagtaaatatataatagtgtaaaaactatatgtacatacataatattaattttttttttgtgttgttgttgttgttttttttttaatttttgttaattattatatttttttaaaaaaattttacttattagtagataataaggaacaaaattaaatgagcttacctttagacaaaatgactggtaatttatattcaataagtgaacttgtactatacttatgttcttatttaaatataattttcttaaataattatttaaatataattaatgaaaattaaaaatatgattacaaatataagttcacgcacctacttcgtaatcacgcacctacttcgtaatacatacatttttatttattattatttttttttttttttgagaacacttcgaaatacatttgataattgacttatgatactttgttttccgtacctatatatatatttggtcttgttagcgcccatagtttcttcttcggaaaattataaaataaagcttta

SEQ ID NO: 65799 - DNA, 768 bp, Cannabis sativa
taaaactttatttataaaaattttataattaattaaaaattttaaacagtaaaattgtaaataaaacataaaatagggtatttttgaaaattttcccacccaaaaacccccaaaccccaaaacggattcttctacgacacttcctatctcttccggctcagaactcaggagcggaaaggagaaatcggtgatcaaaaatctccaactatttgctaatattaaggtaatatattcattaggaatctcactaaccatattattttctggttttccttatttaatttgtatttctcatgtgaagttacttaaattgaataccactgattaggtttggtttgttttagtaatggctgactgtaattcaaaatccaaaattgggtcttcgagcaatgtcagtgccggattatcatatgagataattgaagagataatttcaagattagatgcaaaatctgtgatacgactaaagtgtctgagcaaacattggttttcccgaataagtgagccgagtttcatggatgctcaccacaaaaaccaggtacatcgaaccctactgggcttctcccttgagtgttctaatgatgacacacacagtgttggtggtattgtaatgcgaggctcaattcgtagctcagaaaactttgatgagattttgtttatagaatttcctgtttgccgtaggaatgttgagtttgtgggtagtgataatggtgtgatttgtttggtagaagaagatcataatgaggtttacctttggaaccctgcaat

SEQ ID NO: 65800 - DNA, 709 bp, Cannabis sativa
tatatattaaaggaactaagtcgttggttatgctatcatatattaacgctcatttaccattttaaacaaggatatataagagcattcatatataaatataggaatagtgcatagtttatggattgagtgggggtggaacatcttgaatggaagccaatctctgtgttgtaaggtgcttactgcaaaataccttaaaggaaaagagtttcttaattgtgattctaagagttcagattcctggttttggaaaaacgtcattaaaaccaggaacatccttaagaaaggtgcgtgcaagatggtggcgaatggaagggatactcgaatctgggaggatccttggatcccccacttaaaggatttcaaactaaagccccgctcttctaatgctggggatcacaattttgtggctgatctgatcacctcagatggccggtgggatgttcataaactcaattgcctgtttgatcgggtgacaatgtcggctatattaagaggaggaacttcgtctggtttggtgcaggataagtgggtttggactcttaaaaaggatggacatttctcctgcaaatctgcctatctctctcaagcgttggagagagctccccattgtgttgtggctctccctcttagatcagtcattaggaagagatttcatattgaggaggtgaggttccctctttgcgggagggaggaagaaactatggaacat

SEQ ID NO: 65801 - DNA, 881 bp, Cannabis sativa
ttgtcaactttttgagatctgcatttaatggatctaaaagttgaagtcatgatattagttttatgcgaattaaaccgaatttctggttgaattttagttttgaaatagttttctgcactttttttttcatgaattcaaaatattctttgttttgattgattccggtcatcttctcaggtgaagtcaccagaattaatggtagttctccgcctagttaaattttattttggttggcttgctgggttcatcgattgaagcttgcgtaggtgagtttttttgcttcgttccatgcgactgaaagtttagaagaagtattattgtaatatttaatatgtgggttgtataaatatttaaagcgccgattataagttttttagtaatatagttatcttttttttatatatatcttaaaaaaacccttattaaaactcccatattctaataattatttttatcttttaattacttgtacaaagtgaggaagactttatggagtaataaatgaaattcgtatagatgtaaaatcaatatctattctatgttatattaagtgtagatatataaccgaaagcattgttattttttaaaagtattacaatacaaattaaaactcatttcacatatatttcttattttttatcttatactaaattagaaaacaaatagtcattcgcatgtagtaggattttgtttaaaatataattatttgttaatcataaaaattgaaaaattctcacaaaaaatagaaatctaataaagaaaagattatcgataaatctatatgttgattcaaaaatttggacacagactcctaaactacgccagcttgctagattggcgagaatgagagatatgttataagtataaatagagagacacaa

SEQ ID NO: 65802 - DNA, 1485 bp, Cannabis sativa
cgcccttaatggggtggggattcctttcttggtggttagtggagcgatagtgggagaaaatttcaatactcgaatcgatggggcgagagtaggaataatattatccgcactatatctgaccctgatatagatagatttttttttttttttgaaaggaaaacactttattcaacaaacaagaaactacaaatggtcaggcttctctgcatctaaaatagcagcagcacaagagggtaacacctctgaccaaaaataattacatctgtgattaaaaacccacttagctaaggagtgagcaacattattacaatctctattaacaaatttgatacccacacaaccatctaacagatcagtagagaaaatttccaacaacgacaccccccaatctgcccgaggagcttttcttgacagcaattggcttatagcagtttggttatccgagttgacaaaaaacggttttgtgttcaatctttgaaccaacttcagacccaatctaatagccaagcactcagccagcaaaatcgatacacaaccgtgatggaagagagattctgcaactatcaaacgcctctgagtatctctgataacagcagccacaccactgtccatctggtttgtacacaaagcagcatcacagttcagcaagaaggtgccaaccagaggagccatccatctgctaacacccctctttttcttcatttccttgtttacagtaggctgcagtagagcatgatcaacataatcaatagcccaaggggtccagctcttcaaaggagtgaccttattttggaaaattcgttaattcctgtgactccaaaccagccaactcaaacacaaaaaggtttcaaactcctgcttttagtagttttttgccataaacataagaaattccatcaaatccgacatcaatccaaggcttttaggaaagaggtgccagaatcccgcatccttccaaaaagacctcagccaagggcaatgccataatgcatgactaatagtctcaacatggctccagcaacccgaacaagtcctatccatcttgatgcctctcttgaccagttcactctttgaaggaacccagttatgaaaaactctccaaacgaagttcttcatttttggagttaagtttgagtgtcaaacctccttccaccacttcctcataatcgatttgtcagacgtctctgctccttgtttctcaatttgcatcagggtatatccactagccaccgtgtaatccccattcactgtatagttccaaatgagttcatcttcaccacagcctctcatagtttggatccccgaaatccaaggaatatcctccacattcatcttttcctcaagagcctccaacttccaatcatctgcttcattaagtagagataccacatatgcattaggaggcaccttagcaggggttcgaagaagaaagggtgctcctctaggaatccaacgatcctcatttattctaactttgcttccatc

SEQ ID NO: 65803 - DNA, 998 bp, Cannabis sativa
agaggtatgtttcaaataaatataaaattagaagtaatttgattaattgatcaataaaagtggtatttttcaacttacccctaattaaattggttaaactgaaccaaaaagcactattttttttttggcaaccactaaattcattaaaaatatatgaatactatacattttatgttgattaaataaatactattgataatcaaaataatattatagacccaacaaaaaataaaaatattcatatctagccaaataagttatttattcatccaaagagcatgcacaactaatccatgagcaacacgcattaaggacactcttgaaaatctgaataacaaacttgtaaaaaattctaataatgatcttaaaatcatttgagcgggaactctaatagtaaaagcaatcatagttgtaaaatttttataagagactgcaatctattgccatcatcagcggcatgcaatttgttataaaaactcgctatcatttctctaaatgcttgaaggaacaataatgttttaactgcacataaacaaacaacatattagtgggtcaaaaattaaaataatgagtaattaaatattattgcaaatttatattttatttttactaaataaacaaaataagcattaatagaaaaatttataaaaaaatactaacaatagtcaatattaaaaaataatttccaacagaaaaattataaagaaatgggaaagaacttatcatgtcaaatgcaattagtttttaaagtagatccacgagctctaattcaattattaaaataattattataacttaaaaaacatcaataactttataactcaaataacacaacttaatgttcaaaaaaaaaaaaaataacacaacttaaaattaaatcttaaattatactgtaatgatctaatttaactactttacatgaaaatatttaatgataggaaaaaaattgttccaaaaaaattatatgatagaaattttttaaaatgattgagaaatat

SEQ ID NO: 65804 - DNA, 1558 bp, Cannabis sativa
  modified_base (1011)..(1023): a, c, t, g, unknown or other
ccattcactttggaacaacaaagaaaaacaaatccaaaacaaagaaaatcagactacaaataaaacaaatcccaaaactaataacagttgaacaaatcagtcatcgaaaccactttcatcacactacgattcaaagaaaaacaaatccaaatccaaaaacaaatcaatcatcacactacaaatccaaaacctcatcggcttcccataattcatttcggttgctgaaataatggccctttaggtgtttgttgaatagattatcaagcacaagcaatactatttaactgttttatttaatcccttaaataaatatttaacttttattttaaacatataaatatgaacacaaagttgtcactagtcaccattctgatctttaccataatcaaataatcagaacacaaggcttgttaccagtcccacccaaattcacgttatgcaaaattgaaacaatattatctaatctaatctcatctacctagaagtcagagcacacaccggttcgacaagggaggaggtgaacagagttgtggtcgcggagctggtagtggatgcagcggtggcggtcagagattggatgtggaagaagccggaggtagtggttgcagggaaggagaagcgacggagaagatggtgttaatggtggctgttggagccccatacatttttctcccctttttctgaaaggggtgttttattttaataattttggaaaattcttccgtgcacccttttaaaatagatacacttatttgttttaacattcaaaataattttttagtcaaattttttttttatggtcatgtatagttatttaagacatctggcaaaattttaaaaaatttggaaaagtttaacatgccgaaaattacgttcaaacagtgtattgtactggtgactattttattttatacgcgtgtaaaatagaccgtttgaatattgttttctatattataaattattcgaaattttttaaaattttgtaagttatcttaaatagctataacgtannnnnnnnnnnnnaaaattagactaaaaatttttttatggatgccgaaataagttaaggtgtatcagtacatctcttttaagggagtgcattgtagaatcaccctaaagaggagtgttagggaaattctctttttcaccctcttttacactatcttcctatttgaatgacatgtgtaccttctaaattttgtttaaaaataattataattatgcccttatttagtttttattaataataattaaaatgagtcacctcatttattttatttttttattttttaaaaactaataattaatttatttatttttactcataaaaatatatgattctatttatttatttgtttattttcagacaataaaaaaatttaattaaattatgtataaagtttcgttttttaatagataatatgcaccacaatgaataattttttttaatttcttttataataaatattggctatttactttataaaaaatggaaaaaatatttcttttcatatattttgtatcaatttttttattatttttcattcatttttttttt

SEQ ID NO: 65805 - DNA, 2719 bp, Cannabis sativa
gcatgtaggagggtgtatataggtttcatgtggatactgtcctgtatagtaatcacgagatgtatgactatgagggtactgatggggcggaacaaggtgaggatttcttgtcatttgtggctgaattggatcttcatattcaggaatcttattcaagaaatgattttgatgagaataaaagtttgggacatcaatgttacgatgagtcatgaaagaaggcggtctatgactatagttcgagtaagtgcttggcataggataatgaggggtcctatcgacaggtttgttctctactggtttatctgcaacacaatatgatttgctaatttgatctttcaactcatccaactttctgataagctcagctctctccttctctaaactttcaactccattaggcacattgacacggggggcattgctactcatctgctgttcacgaccatgaaaataatacgcctcgttgtttgatggcccctccccgggataacccaaattcgatgctctaccacgctcagcaataacgccattgttcccataaaacccctcatacctacctcttcctaaacccgttcgatccactcctgctaacctatgtacttgggctgtcaaatcacctacacttgagtttacaaactcagatctgttcatatccatatgttgattacttccgcgagtccattgatccattcggggttccaacattctaccatatctatcaccataacaatgttccttctcttcaacattcttctctagccttaaattgtttaactcttcactaacactaatcacattaggaaatctctcatttctcctcctaacaatctcaatcccagaattccctaattcagtctcaacccttttctccattaaaccctctaatttctcctcaaaaacctcttcaccctttgcttcaactgaattttcagataacacattattattctccgggactttcttttttgctgtgtaccaaaagaaacaaaaatcactacaatggtccttgaatagctcacaatttacataatcaaaacaaaagtaaaagtaataaaaatgaaaactttaacattctacacaactgttaagacatgattttatatccaattttctcatgattatttaacatgaaataaaatgaatcatacctctgagaatagtaccacagccaccacattgataaacagagtaatctgggtgttctggtaacagattttcacacttagggcaacgaactaacctaactttagactcagaagaagacattattaaccaaaatagaggaagacccagaaaccttttcacctcaaaaacacaacaaaacagtaaagctcaaaactttaagatcaacccattttcccaatcaaaacccaggaaagaagaaataacaagatcattattaccaagtaaaggacattcaactttgagtttttttttttaattttttcaaatcaaagtctcaaactttttgcctttatataaacaaataagaaaaacaaaaccaaaaaagacaaatgctttgtctgtagtatttggttaaacagagaatttggggttatcgatgtaataaagtttggttggaaaggaaaggaaagaaaacaactttccgggaaaatattttattgttgtaaaatgggattgtttgtatcttcttctttgtttctctcgaagtagaatatactaataaataaataaataaatgaataaagaaagaatgagagagaatggtgatcattaaatacatgaaacgacagcgttttgaaagtgagtttggtttgggtaatgttgaaacagcccacgcgtctgtaaatgaaggagactctgccatgtttattagatgttattactggttggtcttggaaaccaagtttcgacaggcctttacgttgaattggcttctcttattaataaaacatcatattaattagaatctcttattataatctcgatttttgtcattcttcacatcccaaatcacatattaaaatataggttgttgaaattttaaatctaaattgtagttgtatgctggtgcccaattttgggtctgtgtccgttatgttcgttttttgaattttaactgttcctgctcttttctcatttgtattatccctctttcaaccgctcccgccttcattccatgcttgaaactgccctgttttgccctctctccgcctgccagttccgatggatcctcttgctcattccatgaattctacactctcactcacggagaaggagagttctgtcatcaatctgcctgatctcaacccaccgtcctttgttgatcgcccagaacatgtactcctagcccgtgtactttccacaaggactatctttaagccccattttatcgatcaaatgtctggccattggaaaggccggtaccctgttgtgatccgtgatcatacttctgacattttccatatcacctttggctgtgagggtgatatgagacgggtgcttgaaaaagaaccgtggcattttcagaatcacctcattgtgttcattgcgccagatgttcaccaaaattctcaaaggaggatatggtttttgttcctttttgggtccaaatatatagacttccttttctcagtaaatcatctacacttgctgaagctcttggtaacacaattggtacgtttcttgaagtttataaagactctacaaatgaaggatggggtccgtttcttcgtgttcgtgttcgattgtgtgtaac

SEQ ID NO: 65806 - DNA, 886 bp, Cannabis sativa
atggtctaacgctgaaacgagaggaacgcctcaccagagtaagcaaattcttacaaatcaagagggtagcaaagtcaagtacaataagctccctcacatctgagtaaaaggattagtaaataataagaggatgagaccgctgaaagagtaatactccctcaaatgaaaacctgcttaccatagtggggaaaatcacttggccaaagagtaaccatcagagtcactcgcccaacattagttacaaaaagtcacttggccaaagagcaaccttcagagtcgctcagccaacatcaattacaaaaattatctggccaaagaataaccctcaaagtcactcagccaacatcagctacaaaagttatttggccaaagagtaaccctcagagtcactcgaccaacatcagttacgaaagccacttggccaaagaataaccttcagagtcacttggcccacattagataaaaatgtcacgcggcctcgtgaccttacggtgactaaagtcacttggccaaaaagtaaagaaatgtcactcagccccaagagcgactcaaagtcactcggcctcatggtgaccaaggtcatttggccgcatggtaacttagatcactctgcaacaaaaagtaaataataggaatgagagtcgaaagggtgatctagggaaggatcaaacccaggacctcttagacagggtgagaagagtttttcattacactaaggtgttgttatgaagtgaaattcaagcaagggagactcctataaataggggcacatcctcatagaacgtaaagaagacaagattcacactttagaaaggaaaattctccaagtcactcagtcaacaagaatagttagaagaattcttgtagactgggttgcaagtgttaa

SEQ ID NO: 65807 - DNA, 1203 bp, Cannabis sativa
gtcagctaattggtcacaagcaggaacatgcttgacaatcaattgctcgttcaaaactctttctcgaacaaactataaatccaactcaatatgcttggtgcgagagtgcaaaatcgggttagcagcgatcagaacagagcttctattgtcacaccagatagttggagtagtttgtagttgcaggccaatctcaatgatgagggcttgaatcctagagatttctgcagcagtatgagcaagactacgatactgtgcttctatactcgatctagacacagtttcttgcttccttgaagaccatgagacaaggtttaaaccaaggaagatgcacataccagaggtactcttcctgtcatctgggttagaggcccagtcagcatcacagaaaccagttatagacagtgtagagtgtagaagttggtttaatgtgtaagctaaaactaactcctaccagctaacattatccaatgtgcttcaagaggagtgtgcatgaactgagataccttgttgacaacatatgaaatttcaggcctagtgatagtggcatattggagagctcctactgtgctactgtagaactgtggttcttgaacaggatcacttccttgacttgacaatttttcaccacctggcattggtgttgcatcaagcatcttagctctttccaaaacatcgccaatgtattaagtttgacacaaatgaagaccctgagtagtgtacttcacttgaatgccaagaaaatatgacagaggctcgagttctttgagagcaaacttggcgtaaagttgctgagttaatgctgctatggcatgaggagagctaccaatgagtataatatcatcaacatacacaaaggcataagctgtatggtctgaattggatcttagaacaaaaatgggtcagctttggcacactgaaaaccaaaagacagtaatgcagccttaagtttatcaaaccaagcccttggagcctgtttgagaccatagatagctttgttgagcttgcaaactaagtgtggagcatccttgtctacaaaacgaggaggttgtttcataaaaacttcttcgtgaaactcttcattaaggaatgcattattcacatcaagttgtctaatgcaccagttatgagtgacagcaattgtgagtgtaatcctaatggtttggggcttcaccacaagactaaaggtgtctctgtaatcaaatc

SEQ ID NO: 65808 - DNA, 555 bp, Cannabis sativa
gaaattatccggtactttgaaagtgtgtttctacttttacgtttttattttttattttttttttataaaatatagagttattctagaatgccttattttagcagagatgtactgatgcacatctatttatttcggcattcaaaagaattttttagtctaatttttttttcattcatgtacagctattgaagatatcttacaaaatttagagaaattttaaaataatttacaatataaaaaataatattcaaacactatatttcatacacgtataaaataaaataataacgaatgcaacatactgtttgaatgtagttttcgacgtgttaaacgtttttgaattttttaaaattttacggaatgtcttaaataactataatttacatgacatgataaaaaaattgactaagaaattatttctgatactaaaataaatagagacgtatcggtccattaaattatagaattttccaaaaatttgtacttatttttacattttcttcttaaactttcagccttatatctctcctaccaactttctatagcttctttcat

SEQ ID NO: 65809 - DNA, 1410 bp, Cannabis sativa
ggtgagttatcatatagagaaatatttttttttttttgttaaattatagagaaataatttaagatacatatacagtgagtttagcaagtgataaaaaaaataggtgagttatcaattttaaaattacgtcatatttaaaaaaaaaaaaaaactaataaaaaaattgcgtggtttaaaaaaagtgcttttatagttaatattttcaaattatataatatttgagttttatagaaaacgtaaacaaacatgttatcatattttaaaaaatatatatactaattaatagagtaaatcaattgagttttataaagaaaaggtaaaaaaataatttattatattttaaaaaatatataccaattaattaaaataaaaaaaaattagagaatagatattttttggtatatacgatgagtgtagtttttttaattaatgttttatttatttttttaaaaaaaaaaataattgactacattaattttagttttttttttttaattaatgttttattagaaaatgaaaaaaaaataaaagaataatagatagatatatttggagtgattttttagttaatatcttcattaaaatatactcattagagagattttagaagccatgtcacattttatgttaattaatatttatgaaactaataaaaatttaaagaaaagagagaattaaaggaaaaacaaataataatcattagagagatcttagagtaagcacgagacaccttggtacttggtagctatatgagacttaataacttaacaacacaagccatatgaaatgaataaaagaatgcaatgtaattttgttattctttccttgacacaccaaagcgacttgtatgcataaaggaaaagaaacatactttttttatcactgatccactttttcattcttatttagagtgcgaatacctatcatcaaaataattaaaataaaaatatacttaataattagtgcacatactgtaagatactcaaaataatataaaaactttaagtgtgaagaataataataatgtttatagaagatgagggatgtgatttttataagaaaaaaaatagtagaagatcaaggattacgatgaagggatgtgttatagtattataagttagagagaattttggctagaaagagattgggggaggaagatgattatttatgcatttatatttcagttatataggcacactttatatagaatagatagatataattttaatacacatgcaattaactattttaaattgtaagttattttaaatttttcaaaattgatgagatatattcagggacgaacccaagtatattaatgtgggggctatagccccactaacaataatattgccttttaaaaaattaaatgtaattttttaaatttgataattatagatcaaaatcgta

SEQ ID NO: 65810 - DNA, 962 bp, Cannabis sativa
cacacagatttggatggatcctttgtatttaattggtcttgtagctactaggctcgtttaggcattgtgttttagacaaagcctaatgtattttgaatgagtgggttatatttactgatttggttttgaaggattgtaatttcgatttgggccgtaagagggatttgggcctagtgcaatttttggccactacaattatcataacttcaaaaacaaattaatcaaaacagacaaataataaactcaaaatagggtttttttggggcggtggcatgacatagactctttgaaataagaaaattttaggacagaggagacataaattcaacaagcaggtatatatatagtcattttcatgaagaaaaaaataaaccaaacaatgttctatatatatttctgtgtgtatgagttttcacattatacatattatctaaacctcaaacaccatcaacaattaattaaaaaagaaaaactctaagtaaactatgtacccataagggctcgcactgttatccacatttttgtcatcatggcacgtcgaattttaatcaagaaaggctaagaagtcatcagtttccctgcttcctcaattgatgctccgagaagataaaggcaccaacttcgcgagaagggcctctgtaaagaggtgttccccgactgctagctacatggacgatatccgtgagccaagaactccctccattcctggaactaaaggtatcttctcccaagaagagtatggattttcctagaagggccaaggcattctgagacacactaaattgggttgtgcctttagcccacggaagcctcacctaaacgtgtcagactatggacctaatgatcaggctttttcgggtacaatctcagaggttgttgttgtcgagtgaatttcgcaacaccaattttatatgatattattaataacagaaagaaatctatatgaagaacaagtgcgagta

SEQ ID NO: 65811 - DNA, 843 bp, Cannabis sativa
cttccctttgagatatttggctatgagaactctacagcacagagattggcttccattgaggatattccatccccatttagccagaaaggcctgattcatctcttttgttttccggaaaccaagaccacccagagatttaggaagacaaagtttatcccaagcctttagatgaatcccatgatttcctttctcaaacccccaccaaaaatctctgaccaagccatcaatcttatttaccatacgggtagagagtttcgtggtttgcatagcatacataggcatagccaagcctactaacttaatgagagtggctcgacccgctttagataaggtttttgctttccatccctgaagttttgtcgtgaggttatcaagaatgaagttaaaatcagcatctttctacgtagatctaaagaggggcaactccagatatttaatgcatccttcagggtaatcaattcccaacgcctccttgatttcaccccgtaagcttagcggggtgtttttactaaagaaaatagacgttttgagcttattcacctgttggccagaccacgaacaaaaattctctaaacatctccagaacccattcacctttaataaattagctcgaccaaccagaattaggtcgtccgcaaagaaaatatgagagagaacccgaccgcccctactgagtttaattccctgaataaccccctggtcaagggcctcatgaaataatcttgaaagcacttatgcagcccaaataaatagataaggggagagggggtcgccttgccgaagcccacaagaagggttaattctcccaacctgccccccattgagacagatgtttagggtggt

SEQ ID NO: 65812 - DNA, 1871 bp, Cannabis sativa
gttatcggtcctaagagtcttaacctttttattagtcaagttttctattgaaattttccattcttgaaatttagcaaaggcatcatttttatgtttcaaaagaaaacccaacaaccccttttttttctcttctctaaccctagcagccgcacatcactcctccttctcctcttcttcttgctgcagtagcagcacttcaatcgcagccaagtcttcttcgtctccctttctttttgctgcagcaacagccgaacccaagcctacttcttctcttcaaaccgcatcctagccctctttctcttcttgacttcttctagcttcaaacaaagccatccttacccgaacctgtacaaccaaataaacaaccaaaaacagtaacaacaaagatctaaaatgatctttgttagtaattaaagagagacccgaaagaaaccagcagaaaaaaaaaaaacacaaagaaatgatttcggagttccctctaaatcagaggtacgtctccgtcaagcgaccctcaaagttgcttgaatcttcactatcaatgtcaaaatcgagtacaaggagttggagattcctagccacaatttcagtaggtaatctcaagctttttctctcttttcttcttttattttttctggttttattacaaaataaaactttctaactctctctgtttttctctcttattttctaaggttatttcttcatgaaatggctgctgcaacactctttggctaatctaaaacatgccacacgaaatgggcaggttgacccctttatttatagtgttattactaactgtgatgtgttgtattttgagctgagaaaacagttagaaaactgttattgatttttctttgtgttgctgaaagtttgttggagtcttgagaagttgttatttatttcttgtctagtatagagctaaaagatttaagcctatgaaaacagaaccgattactccaagagttataatggtctattgacccttataaaaaaatcttactttatttttccttgtaacttgtttaatgtattttccatgtgacaggagatttatcccatagatatatttcattaaaaaaatattttcactacatttattagataagacatattcaaaaatcgtatctcacgcaaaatacgtatcatttattagaatatatttcatcgaagactattatgatgttttctaatattgtgagcacatttatttgaaaacatcagaatagtaatctataaatgcacatctgatacatcattattgaacagaaattgtcactaacatcaagattgccaattttaaactttacaaattaaaaactgtggatatattcgagagactcatacatgggaccttgtatataaaccaaccaatgccaaaccattactctgagctgaagaagctcatgcatatgggtggtcgaatctttgccaacgcaagtactgacgagggaagaatccataaaccatctccacagatcaaaccagaagcaacagcaggaatcatcaatgttgcgttcttaccattcatcttatgccacacaaaaacaactaaacttcccacacacatgtcaatggcgaagtaagcaccgaccaagaaaggaacagccatagccattggaagaggaacccatttaccgatatgcttgggtgaaagatctctcacaaggttggctgctatagcgaaagcgaagaagccataacagagttgcaagcaatgctgaggcaaggcagaaaatccttcaacacctagaattgccatgttcctgtagactatagcatatggcgctttgtattcaccgtcagggttccctatatcaaaggccttgtagaaaaggaagaatgtgacgggtgccactacacagcctaatgct

SEQ ID NO: 65813 - DNA, 1241 bp, Cannabis sativa
tgtatcagttggataatcaaagctttcccataaatattttgttgtgtttgcatctttctcatctctcaaaaccaagttaccattatccaagagctgaactagtggttccttggcttgtttcgacgagtttgaagaccaaacaagcactctgttattactctgtccagaaaaaagcacaagatctcctttgtcgtttatactcaacgagccagatgaatccttgatcggttcacatcggtttgcaacccaaacaacagtttggttacctgtaatgttgttgtaccaaactcccaaataacgattctttgatgaactagttgttggagtaaagaatcccaatccaaacattccttctttggataccaataaagctgtgttgttactatctctcatgatttcgggtggtctaagggtatcaaccacagctaaagttgttgtaaattgagaaaaaactctcaaaacaactaaggtaaccagaaaagaaagaaactccataattatattattaatctttctagtttatgatgatatgaaccatttattttctctgcttcattcaagtgatcataatgcctaaaaacatcataccagagaaagggaataacttcaatctgagtaagaacaagaacatgaatttcaatagccaaaacagaaatatagaaagattcaatatatatagaaagaaagtgcagaagtgttatgttcaaataacttgtcttagactgataaaaacagaaccacagaatgatcaagttgaaaccagatcaatagatatagaaagaaagtgcagaagtgttatgtttaaataacttcaacaacttatgcaaacacaatattaagaatataccttgttaatgcagggtgtgtgtgttgtggatatatgtttgtatgaatgttgttaatgatgctattaattaaagtcaacaaagaaacagatctttgttgtgtgaattctaaaaaaaaagaaaatattaacactggaaaaatgcaagtggttggtactaagtaggtagtagacagtgaaagcttatatttatatgtacaacggttgttaaacattcaaccataatttaaaacaaatagccatatacacataatgctaataatgaaatttcttaacgtacatgtagtataagagtattgctatgagcagggccggcggcccaagaccccctatattaaaaggcctcattttttatataatgtagtgtggtcgtttggtacgccgtattgtatcgtat

SEQ ID NO: 65814 - DNA, 1034 bp, Cannabis sativa
taacaccatttacttaaagggttagaacatctggaatatctagatcaagcaagatatgagctggtattttcgaaaactccttaatcttcgtaataagatagatgagtttaatctatttcaggccaaaaaaggagggagattcaaagtgagtcattcttaaaacaccttactcacaagtaacaagattgattataactcgaatatctagaccaagctcatcacgtcgaagcacatgtttacttactggaatgtaattaataaccttttattaactagaaatcacttgagcagaataatgagcatcccctcatctcactgtctagtttgtgatttagaagttgagtctcgtgatcatttgtatatggattgcatctatacttaaaaaaaaaaatagtggatgaaattggctcttggctgggtaagttttattggccgagaaacaagttgaagcttattgtttggtgttcaaaaatgcaaattggtctgataaacaaagttattcatgcagttattgcttcaacaatttacatgatttagaaaaatagaaatagtgtgtcttcgattgtgtttgtagctccgttaaggttgtttgtgaagagataaaatatctagtgtaatggcgtattttgggtattttcaattccaatgtaaaaaatagtgataagtatattctaattgtaattgaggaatggtagtgtgtgtgtgtgtgtgttcggttgggggctgtttgcctttgttgttttttcttgttcagttttgaataaaaaatttcttttgttcaaaaaaaaaaatctataacaaaatttgactacgtaagtatgcttgctaccaatttgtttacatacatagttctattataattatcttttaaattaattttcttatcaagaaagataatttctattaatcaaaccaagtcaattacatccacaagtagatttctattcaaaagagaaacttacaactcttttacatttataagaacaattttatcaatgccaaataattttctttcatgtacaagtttaagttta

SEQ ID NO: 65815 - DNA, 1075 bp, Cannabis sativa
tctctctcaatttctaactctaacttctctctttattgtattgtgtctttcttgttattctctcttattctcttatgagatgagtagtcctctttatataggccaaagaacccaatatacttgttgtctgtcatatttgacagttaagttagttaatgaaaaattaactaactaactgaatcttgattgggagtttaaagaataataccacatatttaaacaaactccttaagggaggctgaaaacaacaattccttaattgttggcatcactcaaaagcaagttttgaatacaagaaggataatctaactaccaaactatgctaactataaagtgtgggcaaccatattaccataacgagaataagaaaaaatagaaaatagagtacaatcaaaagtaatatcatgtaaggcaagccccaaagatgagtccagaatagaattattgttcaacttgagaacaattagggttggacattcgagcaggttattgagtttcgagcatattcaggttcgggttttggattttaggttttaggtgtgggaaattcaataccgaacctggccatttgtagacaaattttgactgggtttgagttcgaatttggctgagttggtgagactaagatttaggcagatttcgagagagaatcaggaatatcactttaaacaaaaaaattaaaccaccaaatctccaattgtattagggtagtataaaatgaaaatgaataaaccctaaccctcattctattcccaaccaacccgaatcaaagtgactaagagagagaaaagaagaacaaaagaaaatagagagagagagagagagagagagagatcgaagttgttgacgccgctagagcactcttccgtttgtacctaaggcagagaagaacaacaaaaattataaagagagtcggaaagagaagaaaaggataataaaagagaagaagaagatagagcatacctgagggtggacaatcaccggtaggagtgttcgcggtgcaggtggtgcggtttttgactatttttttaaaccaacctgcacatgcggtttttttaatttcccaaatcgcacc

SEQ ID NO: 65816 - DNA, 1912 bp, Cannabis sativa
acaggatacatgtaaagatattgagaggagtatgtgtaacttctggtggcattcgaagtcatctcaaaagaatggaattcattggcttagttggaagcatttgagtaaacacagggaataggaggaatgggttttcgagatcttcgggattttaatcttgctttactaggaaaacaagggtggcgattaataactaatgaagaaagccttgttgccagaatttttcgagcaagatattatcctaatggtcattttctcactgctgaagtaggagctaatcctagctttatttggcgaagtgtattagcttctaaggacttgatcaagatggggattcgaaagaggatagggtcaggggttaatgttgacattttaggcaatccttggcttattcatgaagagcagcctttcatctcttcaactcactcggcattgtataacactaaggttagttctcttatgaaagtgggtgtgagagagtgggatacagaaattttggaggatgtgttaaacgtccgagatcaacaacttgtaatgagtatcccattaagtttagaagtagatagtgacggttggtactggagcaaagaaaagcatgggttctatacaataaaaagtggttatcactgtttgcaagagcttaaagggacttggactactgaaaataattctggtttttggagggcattgtggcagctgaaattacctccgaaagtaaagaactttttgtggagaacttgttcgaaatgtcttcctactaaatctcagcttagaaatagacatgtgcagcttgagacaaactgtccatggtgtaatgtaggggcagaaacttctttccatttgtttgttcagtgtcctgtagcaaaagcctgctggtgcaacatcggccaagcagtttttgaatcgcaagctgtcacttttgctgcttggtttcaggcaggtttggaaagctaggatgccgccactaagatagaagtttcgatgctttgttgggcgttatggaagtatagaaatgacaaagtttggaatgctaaatctcctacggttgatgaaattgtcacttcagcaaaactcaccttagctaactggttagatgcttaaaaccggtaccaaatttctccactcaatcatgtgagtgaagaaaagaatgagcattggtctccccctgtttttccacagctaaaggttaacgttgatggtgctatttttcaacatgaacacaagtttggtgtaggtatggtggctcggacagcagctggtgctgtggtagaggctcgacagaccatacattctggtgtggtctctcctttgttagctgaagcagtgagaatcaaggaagcattgagttggataaaaaataaaagctggagtgacttagtggtggaaaccgattgccttaatgtggttcatgatattaattctaataagccaatggtttctccatatggttttgttattaaagattgtaaggcacttttagtagaacttgttaatgtttcaattgtttttgttaagcgatccgcgaacaaagttgcacatgcattggcacgcaactctgttcttatggctgattgtactttcagtatggctaccctgccaactgatatttcatccttagttttggatgacttaatttaatgaagtttatcttcttttcaaaaaaaaaattattttattgagttaaataatttaaattaaattaagtaagttatcttttaattattaattaaatatattattagataattatttaattaaaaggataactatttaaataaaagatctattgatattttgctgccatgaatgactggactctccactaattagatgtcaataatgccttcttacatggtgacctccatgaagaagtatacatgaaagttcctcctggttacccttgtcctcccaa

SEQ ID NO: 65817 - DNA, 1040 bp, Cannabis sativa
caagagtgaaatgggagtcgcctttgttcttaaagaggactccaagaaattgaatgaatcagctgaatgttccgtggatgcgaactttgcccttcttgggaaaaattatgccagattcttgaaaaagagctttaagaagaactcaggtgctggtaaagaaaatgctagtggcaaaaaccagtccagttttaacaaggcttctcagtcaaatgatgaaaaaggaagagggatacaatgtcatgaatgtaagggatttggtcatatacagtctgagtgtgctaacacgttaaaaaagaaaaatgctctcacagtgacttggagtgatagtgatgaagaagagccaagtgacagttctaaagatgataagtccatgattaccttcatggctaaagagtgctcttcagtagcatcagaaccagaagaatctgtttcagattcagacagtgatgttactgaaaaaaatagagcctatgaagaaatgttcgctcaatggagttatatggctaaaagggtcaaggaacttcaagatctgaacaaggaattggatgccagtaaaacagaccttgaagagaaattaaaaaaaactcactctagaactgtgctcaaaggatagtgagatctacaagttaactgcagaactagtcagaactaagcaatccctgtccttcttacccctaggaattgcagccttaaaccaagctatacagagtcaaaaaccatatggggatcgtacttccatagggtataaactgttatataatcaagggaaaaatctttccatcaatggtacctcatctcctcaagaggaaagtaagcttaattttgttcctgcctctgagaacataccaagtagccagaaagagaacccttctagtgattccctgaagaaggtcaacaataaccgaagatctggtaggaagagaactgccccatctcaagaaagatttgtccccatatgccatttctgcaacaggagggggcacatcagacctaagtactacaaacttaacacctacttgaggaacctgattaaacgacag

SEQ ID NO: 65818 - DNA, 2770 bp, Cannabis sativa
aaaaaaaaaaaaaaacattttacattttttttttatatatatatttttaatgttattttataaaattagaattaaaacatcaaaatacaaaataacataaaacataaaaaaaaaataatatataaataataaaaaattaataacgaaataataaaagtacaatataaaaatattttaaaaaacttattttatataaataaattttaaaactataaacatatttaaaattttgtatgatggtattttcgtaattttttttattgtttttatgtatttataaaattatccctttccttttttttattatttttaaaataataaaaagtttacatttttacaaaatactttttttttacatttttttttttatggatcgttgttttttagatttgttgactgaaattttcgacaattaattaaatgtacgatgaaaagtgataaaacatttgtaaagaatgagacttttgcgtggttcaaacagtaattagtcttactctacgaatcacttgtattgtattgtattgatatttaaaattacaacaataacagaatcttatagagtttggcagtgattttgcttaatacaaaaattcttgatctctttacaatgagtataatgctcctatttgcaaaataaaagcctttgccaaaagtcttcctaaaggtggcatctttggggtatatcttccttcattaagaagaatttttctccttaatgagtcttcaaatcaggcccaaatttgatggtaggtgcatatggacaagacttgtccactgaccaagataaatttttttctaaataaaaattgctattttaatttagttttattattaaagagtgtggtaattaaattttatctgttgattttgagaaaattatgaaataagtcttcaaaacttatgattttgaaaattatcaataatagttatcaaggtcattatttttgtacgtccatcggtactcaatttaacatattggtttgacggtgataagaagaccacatgttgaaaatttattagtccaaattataattttatattgtaaataataaataaaaattaatattttttatttgtttttctcttgacttttactttttcttcttcttcttcttcgagacccaagaacaagctcactgttcatcccgaaccaagtctcctttttcttcatcatcttttttccttttccgccttccactaccattaatccaaactctaaactagaggtttccttgtggttgcgatggtagggtaatgttgtttttgtggtggttttgctgatgattgatggtggataaaggtggtggcggtgttgttggtagaaagaatgaagaataagaaataaaaacacgaaaaaaaaggagtagaaaagaaaattgttccttttattttttttaaaattatttatttttaattataaattaatttggtatttaaattttatttttcttaaaaaaatatttacactgatcaataatattgtgtcacgtgtacactgtgtccacgttggctgaattgaactaagccacgttggaaaataacaggattaggaaaacggaagtgtgtttttgctaacagtaatatagttttgagggttttcttgtcaaaattttagtttgggggattaaatgtaagcaaagtaaaaattttaagagttatgctgcaattaactcatatttaaataagtgatacattcataaaattatctattaatttttattcttatataaaaagggtatttgagtcattttacatttattttatttaatatatatgatgtaattctcattacatagcttcttcaattaataaaataatttattgcgtaatgtaattaacattacattgttatctcattacatccgccttcaatcatctttgcaaatgttctcaactttcttgctgaatttcagtctcataccagtcggcaacaaagaagctctcattctctctcaaaacatggtcaagcttggtagcctcttcctctgggacaattgaaacttaatgttgatgcatgctgcccttgactcaactaaccagattatgggaattggtgttattgttagagactcttgtggtaatgttataactaccatttctaagcagatttggggctattttcaagtcaaagagattgaagcccaatccatttctttttgcttacaatggttgcatcattctgcttgtgttttttaccttattgaaacggatgctcgtgttgtctcacaaagtatcaatgcctatcaacagcattatagtcgcttctacgattcgaaatattatttatcagttgtccttctttcctgaagcttctttaactcgtgtatgtcgttctgctaatgaagcgacgcatgatttagctagatttgctcttaggatggattctgatattgtttggcgagcagatttccctgcttctattcattctattgttgtaaatgaactttttcattaatttataataacaattttttctctaaaaaaaaataatacttttgattctattacaatctccattatattaaactgaacatgaccttatatattatattaatatttctatattattttattagtacataatggcagaaaaaattataggcatacatttaaacaacgtgataaaagattacaccttatatttaagaacatgtatcacaatgttcttatttgaacgaaattgattaaaataagattatgaacctacatgttttaacatgatagggatatgattttgtcccattagtgtactttcacagattgtaatccg

SEQ ID NO: 65819 - DNA, 786 bp, Cannabis sativa
ttcttctcccacaatcggccaacatttctggaaaaatgcaggagtcatcccatcaggtccgggactcttatctggatgcatttggaagactgcttttcgcacctcttcttcatcaatcggttgacataactcagaattgatcaaatcagtcaccactctaggaacacaatcaacaacttcatcacaatcacaacccgaggcttgaaataattcttgaaaataatcagacacaaccgatggaaaacccgactcccatgagacccaattagcgtgggaatctttcagctgagtaagttgattatttttcttcctactagtggcagccttgtggaaataactgctattgtgatccccctctttcaaccagaattgttttgcccgttgcttccagaaactctccctttgatcgaaagcatcatatagttttttcttgatttcggcatgtctttggactgagacagtatccctcaaactatgaagcttcttcaaatccgccttatagcttttaatacgatgatttaaagaaccagtaatctccttcccccaaatagacaacttttcagcacacatattaattttgctttgaatattaacatgttgatcctgggcccaaacatcacgcacaatctcaagacaatatggctcttttaaccaagaattctcaaaacgaaagcgacgactaggaataaaattattccccacaaccggttctaggaataaaggtgagtggtccgaagtagcaaaacccagattataaagacaagccgattgaaataattgattcca

SEQ ID NO: 65820 - DNA, 712 bp, Cannabis sativa
aatcgttgcgattgtggcttttactccctctcttgttttgggaatggtttgcactagaatccaagaccttaatttttattttcttagagctacactacatcttgtttgtgtcgccccgtacccaaaaaatgagtgtgtgtaggggcgagacacaaagtagtagttctttaaattgttggggtaaactaagctctaaaagggtcaagactggagctagaacttggggtgtgatgttaggggcagtcgtggaaggagtttgagtcgaagggactccaaaagcatgtgtgtaagcatcctcaaggttgatgatgccttgggctttcgccataaactcacttaaagtttcaactctcattctctacatttttctccatagcagagagccaactgctaatctagattggagggctatcaatttcatgtcatcactaaccttagtcttcgtagttgcctccatcatcctttgaataaaagtcttcaagctttcattatgttgttatttgacattggtaagagaaccaactttcatgtccttgacacgtgtagaaataaactatttacggaaagccgactataactccttccaactattaattgatctcggagctagtcgttttcaccaatcttctgtagacttggtcaaggttaaggaaaaacataagcacttggcatgatcactgacccgggggacttgcatcattttgttgtattt

SEQ ID NO: 65821 - DNA, 1049 bp, Cannabis sativa
caagttcttgggccatgtaatttctcaagatggtatcactgttgatcttgcgaagatagactctattctacagtgggaaagaccaaagaatggtactgaggttcgaagttttcttgggttggcagcctactatcatcgctttgtggagaatttctcttggattgctatgccttcgacaaagttaacaagaagagaagtaaagtttatgtgggatgatagttgtgaagaagctttcagagaattgaaggaaagattaactttggcgcctgttctcaccgttcctactagtgaggaaccatatttggtattcactgatgcttcagcaactggattaggaggtgtcctcatgcaaaatggcaaggtggttggctatacttctcgacaattgaaactacatgggaagaattaccctacgcatgacctagaacttgctgcggtaatctttgtcttaaaaatttagagatgttatttatatggcgtaaagtttgagttatactcacatcataagagcttgaagtatctttttactcaaagggacttgaacttgaggcaaagaagatgggttgagtatatggaggactatgatctcactttgcagtaccatcctgggaaagctaatgtagtagctgatgcactaagtagaaggcctcatggtactttggcatgtttggctcttgaggattggaaaaggacaatcacaatgggtgattatgaagaagtagcttgtatctctaacatagtggctacaccaatgctacttcaacaagttaagtaacgtcagtgtcaagatgaaaagctaagacttatttggaaccgaatacaggatggtgagcaactagacaggtggacagttaatggtgaagggtatctataccatatgggaagcctagctgttgcagatatccctgatcttaggaagtccattttaattaaggcctatagatccaaatttgttgtacatctacaaagatgtaccaagatttaaagagacaatattggttggaaggtatgaaaagagatgtggccaactttgtagctaagtgtatagt

SEQ ID NO: 65822 - DNA, 886 bp, Cannabis sativa
  modified_base (830)..(832): a, c, t, g, unknown or other
gctgaccaagcagcccttcaacttggtaatacttcatttttttaggaaaactaggtgaccaggcatcctttaatcccaggtttatcgtgctttattttaaaatgaatattttccattaagttttagtaattgcacatgcaaactattgtatttttttgtgcttgttatttacctaagcttagtacaggtgtagttaaccgagcagacttatgactcttggtcacttgtattgcacaagttcaattttgtctgtttagattttgcgttcgagcaaaccctttatacacattttaatggtaaattcataacttgctatagaaataaaaataaatgacacaattagaatgataataaatatctttattaatttattggtctgaataatttttttaccatagtaacttacatttattaaattatgaaagctattacataatttattcgatctttagctaattaagacataaaataattgtattttctaaaatgtactttatatatggttatccgacctgagtgctagtcattttttccaaacctttgagcgaggtccgctcagaaggccatctacttaagagtatatgtttgagcattgtgtactcgaaggggttcatcagatcttgtacagttactggtagtattttctcaaatgcttcccattccaataccttggtaccagaacgagctccatgtttttgtcataccagcccaatttgtatgctccaaaatccatgactttaattacatgatatgatccttcccaattaggtctgagcacttcagtcgcactgtcttttgtgttcaagaatactcttcttaggaccatatcnnncacaaagaatttccttgccctcacttgcttattaaagtaccgagccaccttttg

SEQ ID NO: 65823 - DNA, 890 bp, Cannabis sativa
tgggtcttcttaaaaagagtggtggtgggaccaaaccgagcagtctgatgagaaatttttagaaagccattgataattatttaaggagatttcctttgaagggagtaagtacacctggtgttacaggaagtccgagaatctaattttaacggttggatagagttcttgggaatttggggtggcactatttatttcctgtctctatggtgaagcatctacctcggtggaattctgatcattaccctttgttgctttgttgtaattttgtacccacaagcaaaaatattatgtatagatggggatctcagtttcattatcagcaagttcaaaatgatagtgaggaatttaggtaaatagtgatggagtgttggaagagtgaggtctcgattgggctacctaaacaatttgcaaatcatatatacaagtgcagtcaacagctagacaattggaataagcaacaaaaaaggccgcccaaactcgtgttaagacccttaaggattaggtggcttcattgtctgtattctctcaatttgaagattggatattattgtctaaggtggaaaagagttaaataattagttggcaaaagaggagatgctttggcgctaaaggataaagctctttggtgcaacaatgacaatagaaacactcgttatttccaccaacaagcctcaaagcgccgaaagaaaaacgatatcaatggtagcttcgatgagaactatgaatggcaggactcctaagatagagttgctgcaattttcacacaatatttctcaacaactctttacgtgtcagcatggtcaagacatggtcttccaataactccattgattcgttctttattgtttatcttttttggaaaatgaacggctgctgaagctgtttaaggc

SEQ ID NO: 65824 - DNA, 984 bp, Cannabis sativa
attcttacagtatttgttaccaaaatacttgttttctaaactgaattctattaaagacttttaaaagtctaaccctcaaattggtaactcacttaagtactttgcaactttgtaggatgggacttatactacttatcacatttgttcacacattgatttgttcttacctattgaacctaacactagtaaagttactagtattaagataaattactttcaattgtgaacccatttagggacttttagtcccatcccttttccactaaatctctagttagtggcttcgtaaatggatccgccaagttttcacttgatctcacataggatattgagatgactcttctttgaatcatctcacttacatatccatgtcttagactgatatgtctagacttccaattgtatactccactatatgctctagctaatgttgcttggctatcacaatgtatcgatattgaagatacattctctttaacaattaaaatctcaatcaagagatttcttaaccattcggcctctttcccagtggcagctagagctataaactccgcttccattgtggaatgagaaatacaagtttgtttcttggaccccgaagaaactgcccctctacttagggtatatacccaacccgttgtggaaaaattatccctaaggtgggctatccaacttttgtcagtatatccttccaaaattgaaggaaatttggagtagtgaaggcataggtttttggttttctttagataacccaaaactctcctttcttccaatgatctacagttggattactagtacacctattaagtttactcactgcaaattatatatcgggccttgtacattgggcactatacataaagcttcctatagcacttgcatactccaactgagccaccgctctaccactatttttaactagtggtttactatgatcgaatggtgtgttggcctctttagcctttatatggctaaacttattca

SEQ ID NO: 65825 - DNA, 1030 bp, Cannabis sativa
tagacctctccaaaatgcaaaaaacttctctctctagggtttttctctcttctctctctaagctagggtttaatctctttttcttcccctttctcagcttgagacacagctacaggctttgttgcgcgtcagatgctctctagccgaaagggaccgttgatggtggttctcatggtcatggccatggttcccagcacaaatagaatgagaaagtcagctatgagtatggcttttcgagtcgctgttgtggggaggccgagcgtgacagtcgactttgctcggtcgtttttggtatttttggccctttgcattttcgtttgaagtatggggatgggctgaggtggataggtagtccaattttgcgttccctccagtgccaagagcttgctggtggtaggatgactcttcttctccagttcgtttgggctctatggtcatgtttttattttttgttattattttgttttagatctattttagatttgttatttttttctttggtttttcattccagctatggattttctcttgttagagattttggggtttgtatccttattttagttctttaccttctattttatggtggtatgtatggtacttgaaaatgaccatgactacaatagacatatgtgtctcgatttgtcaatctattggccttgttgtcgtttgctcgcctttgtcgatattgatttgtttttgcttatcgatggcatagtaaagctgatcctaaaatttagaaggtcaaagaaaaaaaaaatatttttgaaccctcattttgataaatatgtggttttttaaaaataaaaaaaaaatataattttaaaaaggaaaaaaaaaatgtgggctcctgagataagtgagctctagacgcagcctaactcaccttaatctagagtcgacctcatcaatttagttcaatttttaagagaaaagagagcttgtgacagtcagtagtctcgtgatccgtaaggggaaataccgggtaagctgtgcaatcccacaccgcctggggaaggtcaagtgggat

SEQ ID NO: 65826 - DNA, 1427 bp, Cannabis sativa
  modified_base (339)..(350): a, c, t, g, unknown or other
gaaagttagctaatattattatggatccttaagcctcatttactaaaaaatcttcaaataaagtgtcttacatgcaattttttttttattgaaacacttgtgcagtatttttattttgatatatagtgaaatttagagattaaatattaagaacatatatattggacatataaaactaaggttttaaatatatttgattgtacaattaattaatcaaataatactaatttttttaccacagttcgtatgactctattagtatggttttcgataaatattaacaactttccttattaggattcacaaaattattcaaaaaaagaaataaaaataatatannnnnnnnnnnntaattattagtataaaataatagtttgcacattataaaaaaaaatatctatatgtagagacattttttgtgactctacttaaacattattctatatataagtatatagcttgaaaaagatgaagaggttaatatacattaccaaaaatattattttagtgataagtttaacaacaatgacatgaaaagcaacaacaataaaggacaacaataaaagtcaatgacatgaaattaaattaacaacaataaaagtgtttgatggttgagattaaaaaaggaataaaagacacaaaaaatttaagaggttcgacccaattattttgtaatgatctagctactctatatatcaagatagtaagaacctggatctagtgagtttctcaatatctttgtagaattacagatattatttttggaacataatagctctcttgaaagattaaaatttagtcccttaaacagtgaaatgactcactatttataaggttacaagtgataagaatgatattatattgtttacaaaattacacactaaaggccgtcttatttaaattcacgattctctcaaccccataattctctcaatcctaccattctaggtactcataatgacctagtcttcagaatttgtggagttaatgtcacaaaatttggaatcagttcatgctacattccaatcctggtcgaatgttccaaccagaatgtacgtagccctcttttgatgttcgggaagaattgagtcgctctcctctggtcggccaagctatctactatgctagttggaagtttagaagatatatttcccaactttttcaactagcatttggcttcatggatctatcatgtgtcgactaaccttttttttatcgccacatgccaattttttcgcgacacgtcactcgagcaattctttgataacaaatataaaatttttgaaattaaatatcaatcacttttagccgcaacaaaaattatttacactacaaaaatttttacttttagtcaaaataaaatttgtgattaaaagttaaaaaaattgtgactaattataaatcataattcttatgttgtgactaaa

SEQ ID NO: 65827 - DNA, 1044 bp, Cannabis sativa
taaagttaatgcttctgcttatatgttgtgttcttttaatacttggcatgctagactttgtcacgtaaataaacgcataatcaagaacatgagtagtttaggcgtaatttctaaattatctttagatgattttttgaaaaatgaaaattttgtagccaagccaagattatgaaaacaccacataaatttgtgatagaaaaggaaaccgagcctctagatttaatccattctgatatttgtgaacttgatagaactttgactagaaatggtaaacgctactttgtcacttttattgatgactgttctgactttacctatgtgtatttaatgaaaaataaaagtgaagcccttgatattattaagatatttgtggctgaaattaaaatcaacctagtagaaagatcaagaagtttcgtagtgaaagaggcactgaatataattccactgcttttgttgaattttataactcacatggaatcatacacgacaagacaacaccttattcacctgaactgaatggaaaagctaaaagaaaaaatagaacttttactgaatctgttgtttctattttattgaatccgggtgctgctactcattagtggggagaaattttattaactatgtgttgtgtgcttaatagagttcctaaatctaaaagtaaaatttctccatatgaaagtttgaaaaataaacaacccaatatctcatattttaaaacttgggattgtttggcgtatgttagaattcctaatcctaaaagaattaacttggcttgtagagcatatgaatgtgtttttattggatatactgttcatagtaaagcatgcatatagattatatgatttaaatgcacatactattttagaatctaatgatgccaatttttacgaacatagatttctatttaaattgagaaatagttggggtgcatcatctagtaacatgtctgctattagggataatgagcatgaagagggtatagaaactgaacctagaagaagtaaaagagctagagttgcgaaagattttggttctaatttttgt

SEQ ID NO: 65828 - DNA, 2917 bp, Cannabis sativa
gaaacattttacaaagatacgaccaaaataaagccaaataaatattgaatcaatcataccaatataatatcaatcatcatatatgatttctaaatattagcccaaaattatctcaacacccgctcaaattggagcatgcacatccaaaataccaacttgtgtagaagaaagttaaaattttttttatcgagtacctttgtaaaaatattcaccaattgaacctccgtagaaatgtacgaaggagcaatcaaattgtttgtaataaaccatttgtaatagcatcataaataaaatggtaattgaccttaatatgtttcattctttcatgataaactggatcttaagcaatgtgaattgttgattgattattaataaaaataagaataactttagggtgatgaatccctaagcttaatagcaaacccttaatccatttcaactcacaagtaatagctcacgtggaacgatatttcacttcagtagatgattgagagtgacgtgtactaatttaaatcacaccaaccttgaagagttaaatcatcatctatccagagaagaataccttggcttggagaccttttaaatatcaaactacctttaaagaagcctcctagtgctccaatttagagttcttcataaactaggatagaatatgaaaagtgtacgctaaatttggtcgcgtaattgctaagtatataagacgatccatgtaatgccctaatctatatggacgccacgtgtgtgattttataaactagtttagtactaatagattaattaattattaaaatccataataatattaaaaacttcactaaaatagaacactaaaaacggacatcataatgacactaaaatcgtgttcaggggaaccctgttgtaaaagttttacaaaaagattacatacattgacaagtcaaaaatatgaaatcaaaatacacaacttatacaatgccaaaaaactcttggcaactcggcacacaggtcgatagggtcaatatgtacattgatggagaagactgtcacccatgcatgttctagcttttttttgcctttacctgctccatagagcacccatgagtcacaaggattcaatgagaaaagtaataaaagataatacatgaaataacaaattatttatttcactattataaaatgattaaacaataacattcaagagtggataacataacaagccatatgtatggaaataaaagtaatcatatattgcattgttctataaagcaagcccacatcatcatctggcatcatacataatttttctgcatcaccaatcagatgagctcgtgccacaatctagcaccaatgtatcacattgtctaaccagatgagcccatgccttaactttgcactaatgtattgagtcacctaatcagaggggctcgttcctcaacttggccctaatgtattgcatcgcctaaacaaatgagctcatgccatagtctggcactcacatgtcactgctgcccttgcctaaataatcatcaccgacaggaagaaacccaacaacagtttcagtttgtcccatagcctggcactcacatgtcaatgtcgcccgtgcctaaacaagcaccaccgataggaagaaactgaacaacagttttagtttatagtcatgaatttataacggttgcctcataggtagaacttgaatactggtatctacatatcacattgcctacttaggcaaattcatgcgatagctacgtattcatatatagcatcacctaattagatgagcctatgtcatagcccaacatctatatgctacattgcataatcaagcaagcatatgctctagcctagcattcatatatcgcattgcctaatcaggcaagctcattgcataatctggcattcatataccgcattgcctaatcaagcaagtctatgccatagcctagcatccatgtatcacatcacctaattaggtgcgcgtgtatatcacattgcctaatcagataagtgtatgccatagtttggcatccatatatcacatcacctaatcaggtagcttgtatatcacattgacattatcattgcctaattagataatcgataattacgaaacctgtcatgtcatgtggtacattacttttcttacttttgacctacatttaagcatgtcggccaacccaagtggagaaacttccccaatgatcttggtgttatgtcccaacaacggtaaaccaataagtgtttatcccaaaacactgcttaatatttgcaaaggacaacctagggttttctacaaaatcctgtggtataaatacactgaaacaaaacttatattttgtctctaaaatatacatcatattgtagagcttgtcaccagcttcgaaacggtatatagaacgtccaaaacggacacctgagtgaaaacttatgacaaaaatacaatttctggtccctttggaatttcaagaaatggcagaccttttttggcccaaaaatcctaaattttgcactctccgaagcactaccaaaacctatccaaatcattccgaacttcagatgacacatatatactatatatacaataattcttacttaacagaaattaaaatcgagcccttaaatggaaaatgacattaaagctcgaacctaagctttaaaaagttctaaacttgatttctaactcaaaatcacctcaaatttaacaagtaaaaattgaaactagtatcatagctacccaagaacaatttcatgaagtcagaatctccatacctactctaatgcacaaagtcaccatataaaacaaatcattttcaacttaaaacgaaaccaatccttaccttaagttttccctcttcaatgatttactatcccactactatcggagctagaattactagatttcaggctgaaaatcaaagaaaatatattaaaggggagg

SEQ ID NO: 65829 - DNA, 1589 bp, Cannabis sativa
aggaggcacaaaacctggaagatgatcacagaatatagagtttctcttagtcgcctgatctgccatatgcaaatgaagcacttgatgattacatattcagtttgcataccaaagagctcatgtaaaatcaatagatgttggtcatgagatgatgcatatagcaggtgaaacaaagactcagttcaagaatcactttgaatgctatccactatgaataattagaaaacaaaatgtgttaaaagtgccccatttatcacatagtaagattaattaagatcataaattatactgaatgccaagcctaaagatttctttgagttgctcattctaaccagacctgtgagaaatgagaataccaccaatgtttgcaaaagggcaacggaagaatctcaaactgtttttcatgcttttcttcctaaagttgttacacacctctataacacattaaaagatgaattatccaaagaaagtccactaaagtcttaaaattacacattcataatgacaaatcactatgcagagcaatatttttcatgtccataaaaacttcttcagaagagaggaaaggagacttaccaaaattgtattaacaactgcgaaacagccacttcggataccgctgaaatttccaatgaacataacattatttaaatagtcttaaacaatattaattctataaacataatcaactcgtgggaaccctttctcattttggtatgaatgatcaaatctttacttaacaatgtaaacatggtgagcagtgtttctctaaagctgcaaagaacaaaatccaacctgcagactcccgagatgagacacaatagaaccagtaactgcgagttcctataaaacaccatggaatcaccttgttgagctgaaaaaatagctgctgtcagtataccaggcattgaaatctcagaaacctgcatgaagaaaactacaatatgtgagaaaatggacatattcaattaaagtataaatcatttctaatattgcttatcccatagcaactcaaactcacagcggctccaatcaaagcaccgcagcccacaaagacaatccatctatcgtccccaatcaacttccacattctccgaatagcgaacgacaccgtaacaggttcttctgcagaaggtaattgtggtttctcttcttcttcttcttcctgatcatcatgtaatctccaccaactttcgagtggcgtaaccgaaccgaaaaatcgagcccaatgccgccggactattgtttcggcgccgtgtttttttgaagaacggaaagggcgaagatacggcgaagtgtggattgggaaacggaaagaactgagattggagtgtatggtttgaaatgggcattggtgttttttggtgagagaaagagttgttgtggttgtaagtgagaaggaaatgttagagtggtggaggatggccatggaaatgtaaattagacgactgtccagggctgttttcgcatcttggtctgcgtagcttatagctagcactgtgcagggatgagaagcttcttcacaagtaactgatcttcagttcagacatgagacttcattgcgcttaagtccaatgaactgttttttt

SEQ ID NO: 65830 - DNA, 970 bp, Cannabis sativa
ggtttaatggacgtagtcctttatccttccttgattgatgtgatttctcataaagtagccatcactaggcttattaatcatagcgtagtagctgcagcttcaataccccttctcccatgcggcattaaattcgaggtgactgttcagataggatttgacacctcccggagatgctttgtcgtagctttgctctccgggagtatgtgaaacccacatgccttctccgggaggcatgttaaatgttgatccctctaattaaagagacttagctgaattatcccaaagttaaacctctttagtctacgtgtctcaatccggttggtccacgtattttggacaaaatcaggagcaacatttaccccccaagccttgttaagtaagaaagtaaacaaggcttgcttagatgcctccggttgcgttattagcttcctagcacgtgccttgggcgcgtggggatgtatttatcaccatcattactgcagttatttgctttttgcagacaacgattcgttttctgtccatttattgatacgacgcattaaaagggtatcagtcgagtactcaaacgttttctaccgccttgatgagcgcttattccaaccgttggatctgtagaatgcgaatcgattcccatcctgaccgtacgatgatggttgatcatagctatctcacacctgttctggcctataaaagccagccttcttacttcatttggttactttcagcattttaccaaattatcttagagttttctcaaagagaaaagaaatttcaaacaccatagactacttgcttctattccttcaccgttgccaatcttcattctaccggcgaccaacaccaacccctagctttcaaaattcatgtaagttcttcgtataccttatacttgcttactgttcgtttatatagcatgttttatgatttctgggttagatgtcgaacttataggaatgagtttgcctgagtt

SEQ ID NO: 65831 - DNA, 1172 bp, Cannabis sativa
ccccctcaaacgaaaaggggtaggagccattttcagtttggattttaggtagataaaccgatcctttgagagtggtttagtgagcaaatcagcaacttgatcacggctgggaacatatctaacagagagccgtttatccattatccgatcccttacaaagtgcaaatcgatttctatatgtttcgaccgagcatgaaagacaggattggcggctaaggcaaaggcactttggttatcgacccatataactggacactgagacaagttcacttgtagttcagtgaggagagacactatccactttaattcagctgcattattagccaaagagcgaaactcgctctcagtgctgaagcgtgcaacaacgttctgtttcttagcagaccatgagatcaaattgttgcccaaataaacaacatagccgcctgttgaacgccgatcatcgatgcagctggcccagtcagcatcagagtaactatgaagagtcattgaggctgctggtgtgagtaataggccatgagaaatggttcctttgaggtagcgaagtagccgcttgcatgcttcccagtgaggtacagtcggggccttaagaaattggcttagtttattgataacaaaagccacatcaggtctcgtgagagagagatattgcagggcccctatgcaacttctgtagagagttggatcttcaaataattcaccatcatttagggaaagctttgtagtgttactgatcgggttggagcaaactttagcaccttccatatgcaacttcaccaacatatctgtaatgtatttagtttgggacagaaacataccagttgaatccctgaaaatttcgactcccaaaaagtagtgtacatccctaagatctttaagagagaacttgtgattcaaatcagtaaccaacttggaaatcaatgagggattgggaccagttatgagtatgtcgtcaacatacacaagaaggataacaagagaagtacccgagccatgaacaaaaagagatgtgtcagactttgatgcaatgaaaccccactgtagtagactggttcttagtttgtcattccaagcccttggagcttgtttcaagccataaagggatttgtgaagaagacaaacatggttaggttaagatggatctatggaccctggtggttgactcatgaaca

SEQ ID NO: 65832 - DNA, 1496 bp, Cannabis sativa
tttagattttggtaactaattttatattattatttgaacgatttgttttataaaagtaaacttgatgtaagtgaaccataattatgtatataaagttatgatatgcactttgttattaatattaaatagaatgttaatctcaatatattcatactcatataataattattcttaatgtgataaatcataacaacatatcactttaatatttattctttgttttagaaaaattaaaaggatcaatatatgtattttgtaaaatttaaaagaaatattatttacgaaaaatgtcaactcaacagtttaaatggtgaactgattgtacatcacaacatctagtatttcgttatcatcgtcgagttagatatatgtctttttactaataatgtatacagaatatattgtcgttggtataaattaaattaagttcagatctcaataaaaaagctacatcaagttcctccacaggtagctggtgattatccaaacatgccaaagttttatagacctattatgaataaagtaaattttaatcacataacatataaaaagttgaatcataaacatggaaatccacaaatgaaaattcatatgaaaatagaaaaaattaattaaataaactaagaaagaaatactgaaatttttaaagaaaaaagtcatttgaaaagatttctttatcttaatagaaatactgaaatttaattaaataaactaaaaaaaactactgaaaagatttaatcataaacgtgtataacattatttcattagaaactattaagattgccttttatatattcctctgaaatctagatatttttcaggcatggtcttccaatttaattttctttccgaatttgtttcctaattaaaagaggagatgagcaatgaaattaaaaaacttactattggaagtagatttaatcaatattgatatgatcaatggaggagtagtatatatatcttatatatcacaagcaatggagatggatttaacagaataatacccactattagaatggcatgtaaaataattatcagcaatagtatacatgtacctagaaagtaacactatttgattgtttattgatgatattgtgagattatggcatatgacttgtaggtgaatgagtttaattccaatattaataccttcgaactcaattctacatccccctcatataagcaataatatagaattgaacccccaattgaaatttgaaattcgaaagaaacacttagatacaaatgaactcctcatcaattgaaaccaatttcatcaattttacataaaaaaaagtttatcagtaaaaaaacattagtttgaaactaccaaaacttcaaacttttttcttaaaaaaatattttatgggaaatgtgttcattgtcgccccttaaacaaccaactttgttggaatttagtaaatttagtaattagttgttatgattgttatatattaatcgaaatgaaaaaaaaaaatgagaaacaaagtaaggac

SEQ ID NO: 65833 - DNA, 793 bp, Cannabis sativa
tttccctctcaaaccattgtaataagccttagatttggggtgagctccaaaatcattctgagtgttttttcttctcttcccttctcatttttatttttcaatttgtgcttagatttattgttgtgtgcattcttatagatttaagcaagttcttggcaagatctttttatgatattgctagggtttcttagtctatgtttgtgtgtgaaagtgttgtatttgtgattttgggggattctcgatcattctaagaaagattctttgactcttagggatactacacaagttttgtggtcgtttgtgtctaataaactcaatattattgtagtaaatttaaccaatgtatgatgatcatgaatagatagctatatataggttctaattaatatccttttatttgataattatgatttgtttgaaaaacttcaaattgttctaagaaagttcaaaatattctatcatggttagccaatcaatgagcaataatattaaaattgtgattgacctgagaatgaaatatctctaaaaactagatatataaaatcttaagagttgtttgtcttcaaaacttaaagactgtttccaaattttagaaacagaaaacaattttttaaaaaatatttttccaaaaattgagttaaaaaaactaaaaatcaaaaaacatcaaattattgtttttttaaaaaagttatatatttttttttttgtctaacacattcttttttatattttctctcacatattttggtttaagtctggagtcaaaatctaagttagatctctttttttattt

SEQ ID NO: 65834 - DNA, 826 bp, Cannabis sativa
  modified_base (51)..(56): a, c, t, g, unknown or other
  modified_base (780)..(783): a, c, t, g, unknown or other
tcgttttagaagttcatatttaagtttttaaatcaacatacttgtgagtannnnnnagttcctggtaaaataacttccagcagagctttcaaccgaggtggcgaggcaaaaagagaaggttaatgctctagagacagtctgtcttgagctcttctatgacttttggaaggctaatcctcaggccaaccttgactacatgggtgacgctaaggacatgtaccttgagttctgcgcttcccaagtggtttatggtgaaatcgagatggctgcttctacctcaggccaaggtactgatgtacctcctattcaaacaacagatcctccacctcctactggcccacaagacccgaaccaagagcctcggactccagctgtttaaacacttctccttttatctttttattttttatatatcttattcagccaaaaggccttttctaagacatcataaccggccaagcggtctttaaacatggaattatttttcatttttcagacaacaggctgaccgggcagcttttaatcccggtattatatgcttttgttatctttagttaatttcattctctgtttataatcgtcgtgcaattgtgattgttttaccaaatgctttgtataggtatgggtgccccacaagtgatcgagcagacgtatgactcttggtcacttgtctcttttttttcggtgttatgggtttgaccaaaccttttgtacgcctttgacggtaaattagaaacattcttataatttcgactcaatttgaattttgaaataactatnnnnattcatttattgatcgaaaaatgtatttgttaccgtagtaact

SEQ ID NO: 65835 - DNA, 607 bp, Cannabis sativa
tatttttagtcacaatacttgttgtgactaaaactaaattagtgacaaattgtaattgaatactatgttttagtcactaataacattttgttgtgattaaaagtcacaataattagtcacaaaaaaattgtgactaaaaagatgcagttttctgtagtgcaaaatcgttcctcagctctcacaaacaacacatttgctactattattattttttaatttcttaaataatcgtaattctatggatgttaatactatgaatttaaatttgtggtttctatattctagtcacttgattatttattattagttatgataagattaattttatgaacaatatttataatcttctaaatttttttctttatgtttatatataatatttgtgtgcaccattaatatagtgtttaattatagcgatgctctttacacactacaaaaaaatgttatttttagtgaaaactttttagtcacaacataattttttgtgacaaaatgcgaattttagtcacaacaaaatgttttgtacttgtaactaaaatatagtcttaagttacaagttgtcactaatttaattttagtcaaaataagtattgtgactaaaaataca

SEQ ID NO: 65836 - DNA, 634 bp, Cannabis sativa
ttattataatcttttaatcaaaataatttttttttaaaagttgggttggagcagctttagcttttagttgtagcttctctaaaaattcttcaaaaagttgtattttaaattcttaccaaacacatttttatcacaattttttttaaaaagtagcttttaacttttctaaaagttgtgtcaaacagactagactcatgtaaaataaaaattagtacaagtgtaattgacttatttgagtttattttttttctcaataaattattccattttttttaaaaaaaaaaaattagtaagtgtttgttataattacatacatgtatatataaattataatttctacaaaactaatttacctaaaacaataaagctaaaagtgatcgagctactaggaatgttcacggattggtttagttcaaattttcatattttttgaaccaaaacagtataacgattgtttgaatattagaaaccaaaccagaccaataaatttttcaaaccaaaccaaaccaaatcattaaaaacagtttggtttggttcgagatatggtttaagtggaatttataacttctaaacattattgttactcttgctccccgtcgggataaatctgacccttcctctgttcccgcctaca

SEQ ID NO: 65837 - DNA, 1141 bp, Cannabis sativa
ccaactactcatatttttaattattcgtttattaacgtgacagagtctggcatgtattaaaagaacacaacaaataaatagaaacattcactttattaacttcaacattcaatttaaatattccttcagtagcatatcctttccccacaaaattctcattttagttaaagtaaataaatcagcccctatagtctgtgtgaatcccgccttgttgaggaaatagcctaagaccagattctttctcatctctagagtatgcatgccttctttgagaatcatggttttttaagaggtaaactttaattccacatcaccagtattagcaacaatagtagtataagagtcgcctaacaacactttcttatcctcggttgcaactatgtatgttttgaacatcgcatgatcaaagcagacatggcgagaagtaccagtgtctacccaccacccttctgatccaccaatcaggttgatctctaaaatcatagctttataaggttgctcttcagttaggttagcctgcgaagcagaactagacctgttcgacacttgtgccatatgacctagtttgttacaaagaaagcacaaaaatggtgttgggtctttcttaagggggttgctgttgtttgtttaggttccttgggaaccaattcttcttgttattctgagaattattgttacggtttggagcatgcttgcgattgtacttcttgaaatttttctcggtgggtttcagaattgcactggatttcttagtgttgttgtctgacacaacaagcacttcttctttttggtcctatttatgagcctcctcctcaatacgaagacgagtgatcagactttccaaagaaaattcttttgttttgtgccttagaatatttttaaaatctttcaaacaaggagacaatttgtcaataataacagcaatttggaattattcatctaaagacataccttcaaaaattatttcgtgagcaattttctgaagttcatgagaccgagcctccactgacttatcgccagtcatctggaatttgaggtatcagttgacaacatacttcttagttccagcctcctcagtgtcgtcgtatttcttttgaagtgcgtctcaaatttcctttgcagttttgtcagaattatagta

SEQ ID NO: 65838 - DNA, 734 bp, Cannabis sativa
cccgaacccagacccggaccagaaccagaacttaaactagactcgacatgttgttggtgtttggatttaggaccaagactcggacctcaacccaaacacggacctagagcaagactaggtctcaaatcgagacccacacccgaaccttaaatcgtacccttaaaaccaaaaccctaaaccttaaacaataaatcctaaactgatccctaaaccctaaacactaaacccaaaaccctaaaaccctaaatacacataccgagatcggaacccaagaccaagacccataccaagatctagtcctgaacctagacacaaagtcaagacctgaacccgaacccaaacccagaccacaacgttgtccggcacctagaccttgactgggacacagatcgggacctcgacgccgacccaaacagggacttggactcagagcggcacctgggcccaaactcaaaactgaacacgtactgggacctagacttagacccaaactcggggtccaaacccgaacctgaacttggacctaggtcgagacctaggatccagaactagataggggacttgggccccaaacctgaaccttgacgaagacctggaccaaggatcgggacatagatgggggactttaacaaaaaattaggccccagaactgggaccgagatcaaaaactgaaccctagactcgagacacgggacccgaccctagatcaagactcggacctaaacccaaattca

SEQ ID NO: 65839 - DNA, 668 bp, Cannabis sativa
gagagagagagagagagagagagagagagaattgacagggacgattggggatgggagccacaagatctggaagtttttgatggaaaaagctcataactgagtttcgtttggttcattaagacccagaggttgttaaattagagttgtggatattcgactctggcgagctccaccatgaagagagagatggcgagtagagttttgtagtgaaaaggaacgaaactctttgattttcaagtttcagggttcacgagagcccgtggtggtgggtgttccgctagtgtctcatcctcgtcgttggatatggcctatcttaaaaagttcgagcaaaagagagaaagggggagcatggggcacgtgaagataaatggaaaagaaaaagaaaaaaaatttaatttctatagttatttattttatttttattttttaaattatttattttatttttaaattatttttataacatttaagtaattaaaatgatgtggacgaacgaaaatatgcaacatgtacaattgtacccatatagaaaatccaccttggcacttaactgtataaatgtaatagaagattaaatagcataacataagtgagatttggagagtttgccaccaaaaaatcagttttttagttaagtgtaacaaaataaatagtttaggtagttttgc

SEQ ID NO: 65840 - DNA, 787 bp, Cannabis sativa
tctagtgatgctatcaaatacaacacatcaatggtatatcaattcttgcgaaatgcttaagcaagcattctatatccaattctccctatcaaggcatagaccaatcaagcccaacaatttggtttgcatcaagcaacaagaagaagaacctctaaaggattacctttagtgattcttggatgccaccacacagacgaagatacttagtgaagatgccaaggttatggcaatgacaactggactaacagtaatgagtccattttgaaaagacttgaaactcaagactaaatacaccattaaaaagtttctagacagagctgacagttttattaagcttgaagaagccgtcaagaaggccagaggagttgctctaccagaagaaactgattacacttcttatttatttcttgagtctcgaacagacattgaccaggatagtgaagaagagtcaacacctaatacctccattgaaatagactcctcttctgtttcctaagatgaactcgaacaaggagatagtgatgacgagtcccttactatttcttaagaagatctcgagctagaaagcagtgaagaggaatctcctcctacttcccaagacgactcaggagagggagcggtgacaaagattctcccatctatttccaataatcatcaggaacagaagatcaatagtagtgaagatgttttctatgagtcttctgaagatattgaccaagaaagtaacattgaagattccctatgagagagggagggaccttatattgtcacagaagcatttgaacct

SEQ ID NO: 65841 - DNA, 886 bp, Cannabis sativa
  modified_base (840)..(857): a, c, t, g, unknown or other
tgttttgtaaaatttataaattgaggataattctgagcttaatttttgaccattttttttttaaatataaccaacttgaagataattcttaatgcgaacgtagaaaatttaaccagttttgtcataacacctctaagtcggattattattaagttttattttgacaaaaattaatttaaaggtcatatttatactattttaaaaaatacagaatctattatatcatttaataaaatgaaggtccaatctataacttttacaaaagataagatttaaaatattatttacattctatataataatcattatcaacataccaaacaagtgattctcatccaaagttaaatacccataccaaaagtagagtctaccaagatggttggtccacatatggatacgacaatgggtaatttcattatagattggtcctaaaggcaatctgctcccacttttttctgtgaaagaaaattctgacccttcttttttataaagaaaaagagaaaaaagttgatctgtcactacatataatctttttaattatcaatcaaaaagtaggcttttattatgtgattaattattgatctccataatttttcttacaagcattattggtactaattataatatctaaaaatttgaattttagaatttcgtgacttaattgtatttttattaaaacctcatagaacatcacccatgagaagaaaaaaaactttacaagggaccgagaacaagaatttattgaatattggcatcggccataagaataactaaaccaccaaagagagtacatatataaattgttagggtttgtttgctacgccgtattacaccgtattnnnnnnnnnnnnnnnnnnttaaattgtattttatgtaatatttttat

SEQ ID NO: 65842 - DNA, 1303 bp, Cannabis sativa
cgtaaccccgtgtctgcactccgagacccgaactggaaaatggctatggatgatgaacatattgctcttattaagaataaaacgtgggttttagtgcctcgtccccttgatgctaatgttattcgatctatgtggattttcaaacataaagaaaactctgacggttcttttgagcggcataaggcccgacttgtatgtgatggtgcaggacaacaggttggcgtggattgtggagaaacttttagcccggtagttaaaccggcaactattcgaacggtgctcagtcttgctctctctaaggcttggcccattcatcagttggatgttaaaaatgccttcttacatggtgaactaaaagaaacagtgtacatgcatcagcccttgggtttcaaggatccagatcatcctaatcatgtgtgtcttctgcgaaaatcgttatatgggctcaagcaagctcctagagcttggtacaaacgattctccgactatgtttcttctattgggttctctcagagcaagtctgacaactctcttttcatatacaagaaaggtatggagatggcttatattctactttatgtggatgatatcatcctcactacttcttctgttgctcttcgcaaatctatcatgctacttctcagcaccgaattcgctatgaaagacttgggtccactgagttcttttttgggaatcgcagtcactcaacatgctagcggtctatttttgtctcaaaaaaagtatgctcaagaaattattgaacgcgctggcatgtcatcttgtaaaccttgtccaactccagttgatactaaaccaaaacttagtgctaaaacaagcactccatatgaggatccctctcaataccgcagcctagccggagctctccaatatctcacgttcacaagacctgacatatcttatgccgtacaacagatctatttatttatgcataatccaatggatgctcatatgcatgctctaaagcgcatcctgcgctacgttcaggggactcttcattttggattgcatctttatccctcatcaaccacttctttgattttgtatacagatgcagattggggtggttgccccgataccagaaaatctacttctggttattgtgtgtttcttggagacaacctgctctcttggtcttctaaacgacaacccacactctctcgctccagtgccgaggccgaataccgaggcgttgccaatgtggtttctgagtcatgttggttacgcaatcttcttttggagttacattgtcctatcaatcaagctacattagtctactgtgata

SEQ ID NO: 65843 - DNA, 1413 bp, Cannabis sativa
tcaggaaggcttatctgctcaactcatgtagctcatttgtctcagattattgagatgcttagagcaaaatacccatcttacccttttgaaaacaagtaagtgaatggtattattgcaattaaataaattgaattgtattaagggtacttaaataatcatgaattgatgattaatgtgcaggtgtagtagccaagaaggagatagcaatccacatagcatggacacaagtaaaatcagtgaattgggttttcctggttttaaaacacttgaacaaatgtttgatgattgcatcaaaagctttcaagaaaagggttttctttgaagtaataatatgtagtagttattatctatttatatccttaattaataattaataatgttactttttttcagttacccaaattgaataatgctattttgtacgacttatatgcttgccttggtggtgttgaactgagattgttttatgtttgtaatttgaataaagtttaaatatttatagtaaaaatattaattataaagaaagaattaagagcatcgattcgtttttagccaaattttcattgtacgatatatgttagaattgtaagatgcgtgaagttccatttcagaatcaattagcaataaagaggagtagctcatgaatcttatatatagtattatctttccacacactaacaatgtgaaattctctaacaatgcacttgaggtacaaaattggcaagaagtgctcctctcatttccatttctgttaagaatttcaatccccatggactgaacgggaaataacctaatagaatgcaaaattcctacaaaagcttaattttgtaaaaatgaaatttatattaaacatgtgagtatacaaaaaaaaaagtaaactaaataaaaattaaaatattacacactatttattattcaatatactatttttatccaaaatacaacttaaaattgtatatatatatataaagttactagtatactagaaaatgaaataaaatataaaatactattaaaaaatgaataatatattaaacgggttactgtcgggtggagaatttcatccccattccagcctgtataacattcgacgacgaaatttgatccatagagtcctataaatagaaatgtaatctcatcattttgtaccaagtcacaaatcacacaagttgagatacaatatatagcttcctccgtttaagtattctcttcaaagatcttgttattatccaacaaattagtgttgtaccagagcaaagtttgtgaagaaaaatggcaagtagaggaatgatcgccttccaagttccaatgttcaccaagagcaactatgacaattggagtattaagatgaaggcgctactaggagctcaagatgtatgggatattgttgagaaaggtcataaggagcaagac

SEQ ID NO: 65844 - DNA, 810 bp, Cannabis sativa
aacaatctcatgataggatcaagctcactgtaagaaggctgggtgttttgaagttactccaattgtagaagggattctcagctcattatatagtggaactcaaagttgagagctttcaagactgatgatggagattgttagaagttattaaaaccgttctaggcgagaatttgtatcaagatatgtattgctcctcgagaatgtaagtcatttcacttgggctgaaccttgtgatatttggtgttgtattgttccatgtggatttgatgttattccattcgaactatgtttcttttttggttttcttcaattggtgtaatagttttcttcctagactgttcttctgtgttgttaaagaagtgttcttgcacaacatcgccccttgtaaaagagtgattatacacttttatccctaagctcttctgagtttagaaaaatctatttgtgtagctactaattagtgtttaaagtaattgaaaagttataaaatccaattcactctcgagatccattcttcatattctctagacataataataagctttggagctggcattagcattttaacacgtcaataataagtaaaataactagttttcaaaacttgcccaacaaaaactaaatagttataaaagagagccaccaagtttgttttccaaagaatagcctgattaaacagttccaaatctcgaaacctcattcctccaaacatattagcataagtattagttagctagttagataagtctatttaggtttattctttgcttcaattggttatttcggttatatccttaaccgactcttatt

SEQ ID NO: 65845 - DNA, 1462 bp, Cannabis sativa
attacaattacagtaatgcctttcccatttatttctctgtttagtaagctttattttccaaaaaaagaaaaaaaaaattagaacaacaacaatgaaaacagcatatacacaataaacattttttcatactaaattaaaactaccattggaacccacaaacaaactcaagagattgttcaacattttcaatttcaaggcacaattttccaattgagaaggttgatatgcatttaattactaattaggattagtggacagttataaagatactaatgtaacttataagcagggaaaactgttgaaaaaaaaaaggcttatacaattgaagaaaaagcaaactcaaggacaataacatgggctgtaaaaaaaaggggaaagggaggtgtttgatgtaaaataaggatttgattccttacttcaaagcattaaccacgaccatacgtatgtctacggtcggcatccatcaatcaaattatggatagaccattaccgttcattattaatttaaaaaattggccaaaatgaaaaatagccttgaattactttcaaccttgttagcataaaaagataattagagatcaaactcagaatctgaaattaaaatataaattaaaaaataattaaaaatgcatttatcaattatatatgcaaaggtggctattcacaatttcttagttcaaatggactcaaaggaaagagacttaggattgtaagacatccttactttgaattcaaaatttctaaagagatcgacacatttctcattaatacatttgagcaacatctcagcacattaaggtaatccaatgtagcatatgttctagtatacgtacttacatattaaatccatacatacatatcgtcccggtattttatattttagttactggttattgtatgaaattaatgtaccgatacttgttgaaaaaccaggaaaagtggtgcaattataatagataatctaaaaataacaaatattgatgaaatcaacaaatgtataatatattatatacactaataatatatagcctattaaattttggatattgcaggaaaaaattaaggaatatgggcgagaatcacttatagcagccgaagcaaaaaattaaagaatatgggcaagaattacttttgttctgggtttgggttattccttgtaaaactacctaacactatgctggagtttccatttcttccaaggattatagggacacagtaagttttataaaacaaaaaaaaacaacaaacaaaatgttagtccatcaatgtagtagttttcaattaaaacaagacaaagaaaactaatcatttaacgacaccaacagaggcaccatatctataatactcactccatttgcaacctcatgtacagatacaacagttggacccaaaacttccacccaagaaattagaaacaatattcatagtctcactacttgagctgagttctcacttacttcac

SEQ ID NO: 65846 - DNA, 773 bp, Cannabis sativa
aagccattataggaggtgtgggacagaccactgtcactccctcaatctgttcccaaaaactgctagtcatgcaggagagacttccacacctgcggcaatagtgggacactttccgccgatcacacctgcggtggcctctgaaggcattattcaacttacgacagcacagtacacgaccatgcaggagcaggtcagatattcatcgatatatcatacactacaccctaatccttttctgatatagcttcagaaatagttaatttgattattcagaaaacgaagttcatataatttttcatatgaatatatgatataaagtgagaatgatataggaaagttgctgttgtaatttgtatttaattatatttttctttcggtttttgagaggggcattcatgcatgtatttaatttggttgatgttataaagttatgggctgatagagtagagtagtgagtaattgatgataagtgttaatttggtttggaaattgttgaaaggaacgaagcagaggttgtaagccaaatagttgaagcagggtcaaccaaaatgatgagtagcactagtattaccataaccattgtggcatcttcagatgaaataatgatgttcattgtagtaagattcatctcttatctgcaatgccttagcaaaatattgatagctttcctttttaagaccaatgtggaacttttaaaaaggtccgatatttgaaaaattaatatgaggcttgtagtaatatctgctctcattttttaagggtaaatactattt

SEQ ID NO: 65847 - DNA, 1095 bp, Cannabis sativa
gctagtttcacatccagcaatgatgaaccaatcaagtcacctgtatggatatcctgaggggaaaaatttattctgaaaggactcaaccactctatggactattggtcttgagtcatcaacaagtgacacctgcataaaattgaaacaaataaataaacccataccagttaagtacatcagtaaaatcaagtgttcatctcaactcaatcttgatgcattcaaaagacaacatagagcacgcatctaaagagaaatttgagaagaaaaaaaacactactaaatcaatttggagataatcaactacaaagttagaaaaagaaaattagcagatagtttatctcaaaattgtacaacgacattgctaataaaggcttttcgatttcatccacagtatcaagtcatatctcgtggtttgaacataacccagcaaccaaaattgatgcagtgcatcatccattggttcatacatccatcaccatatccctaaaaatcccttcttgttggctgtttatgcaaaagacactccctctcaatgatattactgcttgattctcacctgtcttcgcttatcaaagactgtatactattcccatatcaagttcatacatacaaggctttccacaaagatgtcagatgcccttattctactacaaataggatgattaggaaaccccacccatacatctctcgacaacacctaatggtaatggaaccatgaaaaagaatgcagtgattaagaaacttacagaaagttgaccgtcatgttcaaattggcagcggcgtgatacagaatcagatatttcaatccagtaaacaggtgcttgggctggtttatctaaatccttcttcttctgcatctttatattctcctgtttcatacaaattgacaatactgtgaacaaaaaacaaacaagagaacctattgtcccacttaatagtagtaattatggaaataacaatgaatgcaatgagctcagtggttgggataaggtacattaagtttggttgactattttaagcaatctctctttagattgtgtggcgaacatatacaaaataataaataataatactaaataaaaaattaaaaaaaaa

SEQ ID NO: 65848 - DNA, 697 bp, Cannabis sativa
aaaaagggggaaaccaaaaagaaatcgaaaacaaacctaagatcgaagaccaactccatcttgatcattttttttagcatcatttagaggaattttttcctgggcaaccacctttgatttcttctttggaggagctcgcccacatttcgacaatggaggagcaaaatcagaatcatcttcctcaacaacaggccttttacccttgtttctattagctaaagatttcaaccccattttagaacttttcttttgaacaggggaaggagttgatgaaaaacgagttacaaccatatttatatatggattaagagaaaaataaaaagaggaaaaacaattgtgagattcggttaatgagagttgaaaaaaaatttgaagaacaaaaagaagagggaaatcgagttgggattgtggagggggaagtgttcagctatgggggttaagatttaaaaaaaaaggaactaaaaagaaatggaaaataaaagaaaaaagaagagaaaaaaaggagagaaataatgtatagatacatcaatcactgacgtgtcaaaaaacatgtattgtgtgtgcatgcggtaaaaatataataaactaaaacaaaagtttataaatgtttaggtaatgagtagtgatattttaataataaagttagcattttgtatttttgaaataaaaatttttatttaatttatatattatatta

SEQ ID NO: 65849 - DNA, 1030 bp, Cannabis sativa
gatctctccctacctttttattctgtgtaacgaggtgctctcccgccttcttgtgcaaaaggaagcggaaggggcgatctctgggtttaaggtcagtcgctcaagtccgtctatttctcatctgatgtttgctgatgatctttttatattctgcaaagctgaccgggctgaggtggaaactgttatggattgtgttaatttgtatggtacgtggtctggacaacgtttgaatgctcagaagtctgcttatatttgttctggtaatgttctggcaaacactcaagctgaattggctcagtatctggggtttcggaagttaaataaggaggatcggtttcttggaaacccgattatttggtcaaatagcaaagtcaatgatttgaagttcattaaggagaagatctgctctaggattgaggggtggcggtgtaaacttctttcccaagcgggtcggtcgaccttgattcgggcggtggcccaaagctccccggtttattccatggcaactttccttattcctaaaactctttgtaccgaaatggatcaagcggttcgtaagttttggtggacgggctccgcggacaaggatagatttttagcgctcattgattggaactctctatgcttgcctcttgataggggtgggctaaacttcaaaaagtttgaggacattaaccttgccctcttgtccaaacttgggtggaagcttgcttcggatgaggactccttatggtgtaaaattttcaaagctaagtattggggtaatggggacaagtccttttggtcggcgaaagtttctaatcaggcctccttcggtgctaaagggattatggctacgagggagctgattaggaaagaaacctgttggttaatagcgaatgggagtagggcggatgtgtggaattctccgtggatcccttggcttgattggagtatgtttagagctgcctttaatccattaatagagcaaaattcagtcatggtatcgacgttgattggggcggacggtgagtggagaacgagctctatc

SEQ ID NO: 65850 - DNA, 701 bp, Cannabis sativa
acgttaggaaaaacaaaaaatggcaaaataagcttttagattcagttttatacccaacaagtgatcaccgttcaatcaaaagagaagaaatctaatggatgggaacattaaaaaatgtgaacggtcaaagcattaaatgctcaatgatgtgcctcaaagttctgaaccaccaaaaactcaaagtgttatcccattttttgcactataacatagcagcatatactgttgacacgtggaccctatttcctacatctggctgaagaaatgtttcgaaccaagctcagcatgcaccagcacgaatagattattcccgaccgagcagggtaagggtagacagtttaaacagtgtatcaaaacttagcaattccaagattttcatcatgaagcaagaaagcaatccctataatctagggatcgtatcagaggaatctcgcaagctatccgaatcccataatttgtgtattctaaatacgtaatgtatgttcttaccaattatatatattgtaagcaaaagggaagccttccctcgagcatttagccctataaataatgatccattctcactggtatgggggtcaaaagaattgctttagagagatttaatagaatacactcagagatttcattgtaagagcttcaagagaggaaacactgtattctttgttcttgagttaatacaatacaagaggagtaggctatta

SEQ ID NO: 65851 - DNA, 696 bp, Cannabis sativa
ttaattcatattaatttatatattattataattcttctttactttagttcatgttattaagttgtataaattgtaattaactaactagtgtagtatttaattgattggaatggattctagaattgaatgacttttcctaaagtgactccattcatttgtttggtttgtcatttataatagaaaaatttatataaatgtttatataattatttgtgttatgtcacctaattttttataactagctagtaatgaactaattatttgggttaggtatttgtccttcaatatttatgcatttttagtaaatttatcataattctattgaaatttcagcaacataacggctgtaattggacgttctcaaattttttaaaaatccttaaaataacatataaaacaaacaaaataacattaacaatacaaaatttatccacccatccgactgtaaaacaaacaaaataacattaacaatacaaaatttatccacctatccgactgtagtacatgtattcgattgcagaatctacttcactatggttgaatattaaagatattcaaactcaaataacatgcatactattacactcatccgactgcagtacaatatatcacagatgatactttactatggatgaatatttaagatattcaaactcaactaagcatgcattaatataatgaaatacaataaaatta

SEQ ID NO: 65852 - DNA, 710 bp, Cannabis sativa
aaaaaaaaaaaaaaaaaaaaagagtaagattatacaatgtatgagttagagagataccccatactgtcttttctgaatgtgttcccaaactggggtaagaattcaagtgggttaggccaagtgtgcttgttcaggagcctactacctggcccttcttgtcagtctgatcaccacgcaaacccatgttatctttcttactccctgtcatttaaataattttattatatatatatatatgtacaacatgacacttgcaacatttaattattataagaaaacaattaatatactaatacatcatatatattattattaactttttgtatttcatgaggaattggtagcgctaagtatagtggaccctttgcatcaaaaaaaagtatagtggaccctgagtaccacagtactgttgaccattctcatgtgtttggactgttataaaaccaaacctccatactttgggttacaacatagtacgtgtgttctcgtaaactctgccgtcaaacatacatagcccgattccctaacctattcttctaagtttactaattaatgcctccctatacttaggccggaaagaaacaattaataatactactatatatacaatagggtaatttgcggcaaaacctcctaaagtggacaggtttttgcaactaaccccctaatctaaaattttggtggtaaaactacctaaaccactagtccgt

SEQ ID NO: 65853 - DNA, 906 bp, Cannabis sativa
atgcatttggaacaacgccttcttgatttcctctctagtaacctcctcaagtagcaagttattttgatcttcagtaaccgattgggaaacacagttgacaaccgaagaataatcaccatccgaatgcataaataaatgctggaaataattcactatcactgtagggagaccatcttcccagccgacccattcaccatcagcattcttcagtttatgaataacattcgatcgtcttcgtgatgttgctttggcatggaaatacttggagttacgatcgccttcacgcagccaaagctgcttactcctctgcttccagaagatttctctttgcaagtaaagattattcaaattcaactcagcagctttgtatcgagcaacagaatcagtgtcccgccctttcttccaattcttaatttcagccttacaatcctttattcttttgccaaaattaccagtgtattcttttccccaatcaagcagaacattaccacaatcccgaattttttctgtaatggagagacctgaggacaattcccaactatcttcaacaactttaaaacacattggttcctttaaccatgaattttcaaatctgaaaactctagtattcacatgaatgttctcggttacagggactaagtgtaaagggcagtggtccgaggtggacacttccatattatagagcttagccaaaggaaacttagcaagccaactctgtgaaaccaaagctctatcaagtcgagcctccacccaagaatcagttcctcgacccctttcccacgtgtaaggataaccactcaattccaaatcatgtagaccgcactcatccaaaacatcacaaaatccattaatcaaccaagtcgggtatagattacctccatttttatcttgttgggaagtaacatt

SEQ ID NO: 65854 - DNA, 1314 bp, Cannabis sativa
aaattaattaataattatacttaatttaattttaaaatataataaatcttaattaaagtattataaagaaataaattaacaggttaatataagattacaggtcatttttttatttattttatttaatttccaaattaatcacaaccatttaatagtgatccaatggctaaaaaaagtgtaaccataatggttacaataaaaatgtaaccattgcaacctcctccatatatatatatagtaaaagtcaatgagttaaacttaacctataagagaagcatatttattgagtaataaatattatagtaattttttttaaaaaaaatctttaatttatttactttatattaaaaaaatatataatttttaaatgatataaatatatagagaaaatatgaaaaagttaatgttaatgtaatataaatgtgtaagataaaattaaaaaaatgtagtgatattataaaattattaaaagaacaaaaagataaagagaaaaagagaaacaaaatgagatttcaatattttattttaatgggatgatccattatttatacaaatatgtgagtcatagataactaaggagatgaatagtaattataattactggtaattaataaaaaaaatatttaggtgaattggacatccatatatttaatatttaataacacttccccttagatgtctataataactgtatcattaaaaactttgtaaggaaacttagtgggacaaaaactcgatcaagggaaaaagagtgcagcattaattaactctgccttatttatgcattcgtagaaattttctaatcgacgaattctaatcgtgtgaaccatcttcttgaatattgatattggtaatgactttgtgaataagtctgcaaaattgacacttgattgaatatgttggacactaatatgcattctattgaaatgtataaagaagaatttagtgaaatgtgttttaattatatctccttcaatgtatcctccttttagttgaacaaagcaagcagtattatgttcatagagaatttctagtgttgatacctctttattgagtgcaatccatatatttctgaatgtgttatgtcatgatctcactcttacacattctctacttgcaacataaagtgtaagtatgttaattagcataatttaaagttgtctcattaaaaatcttgttaggaaaacccaatgggacaaaactcgagttaagaaaaaaagagtgcaatatatatatttcatactcataattatttgcatgttgcctcattaaaaatcttgctaaaaaaatccaatgggacaaaacctgaactaa

SEQ ID NO: 65855 - DNA, 1167 bp, Cannabis sativa
  modified_base (1139)..(1141): a, c, t, g, unknown or other
caatagttcctaatccccaagagagccaagtgcatgagttgtgcacatcctgtaaaagataagtttctgttggccaagttgttaagatttttatgaatcttgtcaaggatgataccataatccaaagctttccacttggttggtctaagattaactagctacttcctcaatctaaaccaagctcaaaatagcccttttgcaactatcattgacaccccatatttgattgaagactttgccatgttagctttcaaaccagaggaatcataaagaggattaaaagcttcgtgaatatacctcactggcttttcattacctttgaaaaagatgattaagtcgtcaacaaaataaaggttgataaggttgaggtgtttacaaagtgggtgaaaaccaaagccatccttgcaagcatagtggctcaagatcaagattctggtcaaataatctatgataagaacaaagagaagagaggaaataggatcaccttgaagcaaccttttttctcccttgaaagagccttgcagttgcccatttatcatcaagttgtaggaggtaccttgtaaacaaaccaagatccatttaataaattttgtaagaaaaaaaggcccttcaataagtcagctaccaacaaccatccaactgtgtaataagccttgcttaggtctatcttcatgatgcatctagccaagacattcttccttatatatcatttgagaaggttggaaattaagaatgttgtgagccaattgtctattctttataaaagcatattgattgttgtgaattaattctggaaaaatctttgaaagtctagagcatagcatcttagaaatgcatttatagagtgtattgctacaagaaataagtcaataatcattagcatctctagggcagtcatttttgggaattagcaagataactgttttatttatctcattcagcattatttcttcttgaaaaaataccaatatagcttgagaaatgtcctccccaatctcattccaaagacccttaaaaaatcctgaaccaaaacaatctagactaggacatttagaggtatgaatattgaacatatccttcttgacatctgcataattgaatggtctgattaagcaaacttatgttgggttttatgcccnnnataaaactctttacaatctgattagt

SEQ ID NO: 65856 - DNA, 1246 bp, Cannabis sativa
tgttacatggcttgtggaaatggttcttcatggcattttactggtttttatggtgccccggctgttcaaaatcgacaccttacctggacccttttggaaagattaaaagatgtggcacctttgttaccatggatagtaattggagactttaatgaaatcctttccaatcacaataaatcgggtggtgcgttgcgtaatgaggctcaaatggatatgtttcgacatgtgcttgatcgctgcaatctaaatgagcaagattttgtaggagaccagtacacgtggattaaagggagacattctaccgatgctatcaaagaacgtttggactggtgttttgttaacacttgctggtgtgagacttttaaaccaattgttactactcaccttgattactatcgttcggatcaccgtgcacttgctgtccaaattttaccaaaaaattctccaaaccagcagcagtccaaacgcaccagatttcgtttcgagaaactgtggttgcaagaggatgaagctacggaattgattaaacagaactggtatcaagattccaatgaaaatgctgctgtgatcttcataaacaatctcacacggtgtgcaaactcccttcaaatttggcaccagcaaaagtttggaagctttaagaaaaaaatcaaacatgcacagaagaatgttgcagctttgaataatgctacagaccgttctcccactgctctccaaaatctaaaacaccatgaaaatgtgttagatgagttgttagctcaagaggaaacgtattggcaacagagatcccgagtggactggctgcaaaatggtgatcaaaacaccaagtttttccatgcttatgcatcctcccgcagacaacataacaaaatcaagtctctggtaaataatcaaggtactgttgtccattcaacacaaggcatgactgacataattacatcttattttaatgatctgttctcggctactgatgtgcatcctgaagcattgcttcatacgcttgatacgatcccaactactgttacatcagctatgaatgattcattgattaaacctttcacaagtgaggaaattttcagtgctctcaaaacaatcaatcctgataaaagctcgggtagtgatggaatgtcagcaatgttttatcacaagtattggacaattgtaggagatgtcgttaccaaagtggttttgggtgttttgaatgatggtaatagtatggaaactattaatcattcactcatcacac

SEQ ID NO: 65857 - DNA, 681 bp, Cannabis sativa
aaaatgcatagaaactcaaatttcccaagtcaaatatgtatagaaaatgaaaaaaaaaaaaacaatcttctctactatttaaattttaatcaacttaacactattagagatgatactagtaatttttaaaactcaatcatattaaattatactaatagtaataaatagaactcagtaaaataccattttaagcattataatacatgtgaacacaaactatttagcctaaattgctctaataaccatgtgattttattgactacataaaccatttcttcattgttgagtaaattacataatctaattttgactttggtctatactataccaactatgatctaacaccaaatttttttaaatgggaaaatgtgaatgatgattgatgaccaatagcagtatattgctctctaaattaaacttactagacaatctcattaataggtccaattataggttgacatatttttctcatggaaaaaagaaaaagtttttgtgtacatttttggtaatgtggaaaataatcaaacacttgatgcatgtgcatagagatctcgaattggatactgaaaaaagttgaaattaatggaatccaaagccaaatataagcaaaccttaatttttattttttaaataaaaagacccttttatctaaaatcattagaatagttaatagattataaa

SEQ ID NO: 65858 - DNA, 1181 bp, Cannabis sativa
tgtttgtcatctatatttgttgctgcatttgtggaaacgaatgattaggagtttgtatataaaaatagttaatgtttattgatgttaagtacttttaaaatttgttttgaaaaagattcatacacaaaagtcattaaaaccttattttaactacgatgttagtgttagtaaaagaaaaaagatttgcttgattaagtgtaatttttatgagatagaaaaaatgaattatttttttaagatagtttttttaaaaaagtctcacacaaattgacaacaatttgttgctgcatttgttgattaagtgtaatttttatgaatatttgttgttacatttggttgaatttacaataaaaggtggtgtagtttcttggaattgtaaaaaacaaacatgcattacacactaaagctcagagtttatacaattttcaaaattcaatcaggttgtcctgcttagtcacacttagaaatggtcatgattagcctgaatgttataatcatgccttgagcatttatgttaaagatcattcagaattgggtagagaaggcatcctaggaagttaacataaaatacggtactttaatagaggtagtacaaaaaattgttggcttaacaagcttcaacaaagcatgccacaataactacataagacatttgtttttcattttatttgaaatcattttgtataacatcataaaatcatatcatttccacacttattaattttgaaacaaatcttccaatagtagaaagtttgagtaaagaaaaactatagatgaatgtatacatacaaataatgaagttgtttaccttctgagtccttctcggaccgaattaacccactaaaattggagacttaaatagaatatttctctttttgttttctgttttcttacttttagaaaagcctgtaaaattgttgggtaagaaattagtaagtttttattcttgattggcctagttgtactttcatttacttttcaaataaataaattcaccaaatctatctttctgaatacaaaattaaattaagtcaatgagccaagaacattaaaattattggaattgtaagagtagtttttgttttgtttcatttttatatattggaattatttcaaaagtaaatgagtttctcatcattttaaagtacttgattgtgtaacatgtaataagaattaaaaat

SEQ ID NO: 65859 - DNA, 1006 bp, Cannabis sativa
ttctattaatataaatgatagtaaattttatcaatatttattagtgtattaattatttttagtaaattttattttagattttgttatattttttaataaagctaatttgaagtcatcttctagcataatagatataaaataatataattaatctcgttataatatttttaattcagatattattaaatcttaattcaataaaaaattaatttaggtactattttaaaaattttaggataaaaaattttcatttaataaacaaaagttcataatttttgtaaaacaaataatgtgaaataatatttaccctatttttaaatttattttaacatcataaattattaaaaaatatattaaaagttagtgaaaagtttgctataacaactatacaccattgcaaaaaaagaaaaaaaaaactacaatatacttgtcaattgaaaaaaaggattaaaatttcttcaaatattaataacaaaaaaaatattttcccaatatcataccaaaaaaaatcaatatatatcccaaattcaaattaaaatatattgataaaaatcctaatgccaaataagtgaatggaatatatagaaatttgagtagtctaaaaaggataatattctaaggttcgttagtttattattattgagtccgatctttgaatttcgtttgtttttgttagacaattaaatatttaagaagattttttttgaaagaatttcttttttcaatcaagtagttgagttatttatttttttttaaaaggaaaatcaagttttattaaccttcaaactctgacatggcaacataggtaacaaatcagttggaacatttttcatactgaaagtacaatcaggataaaatagagacgctcttgcaacataggtaacaagttcatgagcgactttatttgctgaccgcttattaagcaaaaatagacattacttaaattatacacctacatatatcatattatacattgaataatctaaaaaaaaattatgaattattt

SEQ ID NO: 65860 - DNA, 520 bp, Cannabis sativa
gttgattcacttgcataatagaatttggtagatttcatagctcactgaacagatacatatgacccagagcagtactaggtttgttgggatatgattgtgtgcagtattgactacagaagcctcatgtcaaacaggggcataacagtaggattcactggcataatggactttggtgtattttagagcccactaagcattgagcatatacatatgccccagagtgtagtactaggtttgtcagggtaggggcgtgtgtagtgttcactacttacgcttcatgccaaacagggacataaaagtgggattcacttgtataatggtcgatgtcaacttaaataagtccacgcatcatactttggtggatttcaaagctcactgaatatatacatatgactcggagcaatattaggttcgtgagggtagaggtgtgcataatgttgactacttgcgcttcaaatcaaacagggacatgaaagtgggattcacttgcataatggactggtaaatttcagagcccact

SEQ ID NO: 65861 - DNA, 1341 bp, Cannabis sativa
tgaatacacaactcagtttgatcacttggcaatgttggcttcaggaatcgtgccaactaattttaggaaaaaagagaagtacctggatgggttgaatttgaagataagacatgaactaatgatcactactgatgacaacaccacctatgctgatatggtgggaaaggcactgcgagctgagggcacagtagagtgcacccaagagtctcgagggactcaggtcgttggtggggctcctactcctcctacctcaggctttagtaggaaaggtagtggctcgaccactgaccagaaaacaaaggcacctgctggatccggtggctcaagtcagaacaagaggttctaagggagccagggacaaggcaatcgcaagggtagctccaaaacatgattcacctacccagaatgccccagttgtaagaagcatcatttgggtgagtgtagagggcaagggtacttcctgtgtgggttactatgacactacaaatgggattgcccacagcttaagaaagaagagcagaagatttctgcgaaacccgctccgacaagggtgttcgcgttaactcaggcagatgcagaagctagccccttagttgtaacaggtccgctctcggtcaacaactcttactcactgtgttatttgactatggggccactcattcttatgtagcagccagaatttttagtaaattgggtagactgcatgatagttttgatatagggtttggagccctacttcctggcggataattagtcatctccaaaaggtggattaggtctatgccgatcaaaattgaggatagggagttgagtgctggcgtaatagaaatgggtttaacggatttcgatattatacttggaatggatttcttatccaagtactcaaccagtattgattgtaaacgaaagatggtaatcttccaaccagagggtgaggaaccgtttgtctttgttggatcggttcagggatctcagatcccagtgatttcagtactaacagccagagaattgttactagatggatgtctaagggttttggccatggtattggatactacacggtctgagtcaattcggccagaagacatcaaggtggttcgggaattttcagatgtttttcctaatgaaaccgcagagagaaattgatttaattattgatttggaacctggagcagaaccggtttctaaagccccatccagaatgggtccagcagaacttaaagaactgaatattcagctttaggggttacttgacctagggttttcacggactagtgtgtcaccctagggagctattgtattatttgtcaagaagaaagatgggtctttgcgtatgtgcat

SEQ ID NO: 65862 - DNA, 1038 bp, Cannabis sativa
ttattattaaattttactttgacaaaaaaatcaattcagagtcctatttgtacaattttagaaaatatagggtctattttattatttaacaaaacaggtagttcaattggtaatttttataaaacacatggtctaaaatagtatttagcctggatttaaatattgtagatagtgtttaatagtacacactttttattggctacgaaacaacattttttcctatatagattattaaaaaaaattctctagttttttcaaaatttctatttttggggtcattgttaatcgatgaatgggggaactattagtttgattaacagtgaggaggatgttattgagggagatcttgagccagtttttgttcacgttagcaaagctagtgtcgcgagcactttagtggataaattgttattccaaagtggtttcgggtgagcatatgacacaatgtgtcgaattttttttggaagattaatggctctgtgatcagggccggtcaagtattttgggggcctcgtgtaaaattttaaaattgggtttttttttttcaaaaaaaaaaaaaaactgtgtatattaaaactacaattttattactagcttttttttttaagatttattcataaattttcaattataaaatttttatttacgtgtatataatagaaaaaaaaaaagtattttcttaaaaaaaaaaaaagaaagaaagaaaaatgggccttaaaaaaatgggggtcttgtgcaatggcccaagctgtccaatgcttgggccggccctgtctgtgacagtcaaggcggttggaaataatacattcttgtggctccgtgacggtcaaagcagttgaaaataatatgttcttattttattttttttgaccttaatgataatcgcaaggtttttggcactggatattggttgttggaacattaactcttggctctcgaagtccttacgagcaggggcgaacccacatagaggcgaggtggggtagtcgcccaccctgaaaaaaaaatcggtaaaaaaatatatatgcattttagtta

SEQ ID NO: 65863 - DNA, 1500 bp, Cannabis sativa
aaaaaaaaaaatgtaacataacctcaaaagggtaatatattcataaataaggtttttagacaaaaatatttttagtaaaattgaactcaagcaactattttaaattaatttacaatgaaaaaaatattcgcaaaagaagtaatgtattcgtaaataaagtctttagacaaaaatattttgagcaaaatcgaactcaaacgattattttgaactaatttacaaattaatcaaaaatataaatagtttgaaaaatttaaaagaaattttttgcattacctttctgcaaacatcttgaagaagaataagttgattatgttgaaaactattaagagttttagccataaccctttgaatatcttccaaaaaatgaaacttaagcttctcaagtctcatcatattagaagcaattccatgaagtttcctttgttgctctccttgaaccgttatcaccccatttttcccaaccaaatcccgaaacgatttagggtaactcgatttgaatagcttcccttcgttttgcataacaaatcggttaaaactcggatcagctgacaccacagcccattttccaaacaaactacacgaaaatattttcccaaacctaaacacaaaacacaaaaaaataattaaatcatcataaaattattttaattaaataaaaaattgaagaatttatttttataccttttgacttgttgttctacaaaagtaggagggtgtgaacttgcaacagaattataccaattgaaactatcaccaatcaaaggccaacctcttcttcctggtggcaatttattgtgtttagttttggccaattttgaattttctttttgtaaataaatattaataagaaaaattaatataattgtgattgtaaaaggaataataataataataatccatgtgcaccaccaatcaatttctcccatttttattctaagaaattagaaattggagagagacacacaatcttggattgtttgtgagagtttgaactttttttttatttatatattatgacaactaattgagcaaaaataaaaaatataaaaagaaaataggataataaaaaaataaatgtgaagagaggaggctagctagctatcattgacttgagtagctaagatttagtatgaccacgttaactttatataattttatatatatatattggtactcaagttattattctctctttacatcaataatgtaaaaaaaaaaaaaaaagccacaaacataaaataataaaaaattcttcaatacacttttttaaaaaaagttattgatgtacttcttatctgtttcggtatctgaaagaattttttattttaattttttttatgatcgtctacattgtagttatttgagacatttaacacgccgaaaatagaattcaaacattctatttcacacgcgtataaaataaaagaattttgcatggaacatactgtttgaaccctattttcaataatttttttttttaattttttagaatattac

SEQ ID NO: 65864 - DNA, 4363 bp, Cannabis sativa
ttatttatcttctatagttttaggacaatgaaacaaagcacagccccaaaaagaacaaatcatatcccatttccttgtctctttggtaataatgtattataaaaaagaacaaatcatcccatttccttgatctctttggtgataatgtattgcaactgaaattatttttatacttatgaaaatttgtaatcataaatcaaataatcaacaacacgagttattgtaacttaaatcccattagacaatttgtcttcctgcttttcaaagattgtgctatctgtttcaatactgccattgttgaataagcaccttagagcaatctcataagcagcaaaaatggcaccattaaccacaaatgccctagaaaccgcagtacctaaccctcgccatagcacactgaatccttcatgtttgacactcttttgaaaacaatcaataataccattatacttgagaggaatagaagatggagattgagcctgtaatctggtcttgataacatctaatggatagcaacatatccagctagcaactccagccagtccacccgagaccaacattgtctggaggctttcttggccgccttttctgcagcccggatgaaaatgctctctcatatactcataagtcgaaaaataaacaccatgtgcaggtgcatccctgagaacagttatggtaaaacctctatacattcctctcaaaccttctcttttcattatggttttcacaacacttacagggcctttatatggttgaactttatttgttttcgcttggcctgtaccctgcaattgaaggcgaatcttaacaagctccacgggggcgagcattagactttgaagagcaccggttccaactcctcctagagccactcctttgtaggaaggagggtctttagctgaaacagacgagtcaaatgctcgagagaggactgcgtatatctggaaaaccatggcattctagaacaaaaagataattggtcagttcagttcggtgtaaggctgttacaaagcttgttgaagctacattatacataaggatggaaaccgaaattggccacacaaaaacagtttgtcacataagagaatgtcacaacatatcagcaatgttccctgtgtatcatatggcaattcaattgtgtgtttggttgaaaattttagtgactttaaaagtccaaaacagctttggtgttctaatacatagtaaaacaaaagagccacacaattgtaaaaaaggtttttcagtatatatgccatttcaaaggtgaaaaaggagaacacaaagtttcttcctaatctcgccaaccatttttaatatggattttccaaaacaatagcaaagataattgattacatattctgtttctttggccaattcttaaagattgtttcggtcaaaaactctcattaaaagctggaaatgaccctataactaaactccctcaattacaataaattccacaacaaaaaacaccaataggataaacacacaagtaagattatttacacatattttgaaacaaaagagagatagtgatagttaattaagctgacctgaaaagtaacagaggccaaaggtgctgccatgcctctgtagagggcaccaggcccttcagtagagacaacatttcgaaggatactaaaggctgaaccggtgtgcaagtactgctgttgtcgaattcgaagggtgtcaaggggataaccagagactataccagcaatgcctccaaaccccccagccacaaattctctaccccaactgctagcaagaaactccggccaaaaatccatcttcttctcctttatcccattaaaacttttcccttatttgaaagaaaccccaattcttgttttgccttctagagctataaaaatgattcctttagcttgcacggttcaaactcttccacctaaaaaaaatctcctttttaacataatccaatttggggtgggattatattgactgtaaatctacttaccaaaacaatttccatcaaaattccttttgaaggtttctttgagtcaccaaatgctgcatatttaagtaatttgccactttaaacataaaaaataaacaattacttaatctttcaaaaatcccacatgtctttcatcaacctcttcaaaccattgtaataaactattcctagaaagatgagagaaattgaaagagaaaaaaaaagaccagaatttaacaaacaacaaaggtttctctcacaacaagttcttaatttagaacgaaacaaaagccaccggttgctattgtgttggtaattgtggtctggggaactgggaagaaacggcaaagtgcggtttcaaaggtgatacacgggagtgacacgtggaccaataaactatccacgttgcactatttgttgatgatgcaatggaaagttaagaccataaaaaaatcataggctttttattgttgagatgggtcccatacactccctgtggtgtgcaaaagtggggtttttttgtcctgatctgttatcattggtttcgatttgtactagtgtttgtaaaacacacgtctcttattttatgtatatatttttggaaaaaaaagtaaggtgaattctataaaacttattaacattatttattttgtgaaatgataatatatttttttaaaattattgaaatagaattttaaatttaatttttaataattttattttttaatataattaattttgaaataatttttaatatatatacgagcagatacataaaatataattagttttgttataacatctctaaattaaatttttattaagttttattttgacaaattttttttaaaattctatttgtacacttttaaaaaatacaaaatttattatgacatttattcaattgataacttttaaaaaatataaacttttttttttatatttaaaaaaaaaagtttatatgtttaaaaaatataaacttacagatggacgaatgttgtggtggagtcggattgtctgagagtcatcagggatttacaaaagtttaaacatgtggcttctccctatggccatatactttctgaatgtaagactatgtgttcgagtgttggtgatgtttcttttaattttgttaagcgatctgctaataaggttgcgcatgcaattgcgcgatcttttcttgttgaggctgattgtacttattctgagaatgcattatccttgaattatgcttctttaattttgaatgatttgatttaataaaatttcatcatcattcaaaaaaatatatatatatataaaaacttaaattagtatttattcaaaaaaaatatatatatagtagaaaaaaaagtttttgagtgttacgtaaattggaatgaaaagtctaattaatagaaaataatggaaaaagaattaagtcaattttcttgataataaatagatctttggtaatgaaaagtgatgcaatatttggtgagaagacattacgtgtatgagtcaatcacttgtccatgttttgggcacgtggaagagttttagaataatgatgagatcaactcaccttaaatagattttaatctcatcctcaaataaataaataaataagataatgatagataactcttacattaaaaaattgataacctattaattaaattattagtgtttttaattaactatgatagcctgataagtcttgagtcaaattctatcgtttagcctaaacattgaagatgatgttggtttttgttaattaatattgagaaaaacttgtatttttattttttgggtacatacatcaattatgtttttcttctaatatttaaccatataaatatttaaaatatatttttttaaaacttcatatagttgtcatttgattagtttgtgcaatatacttttcaataggtgaaaattaacaaaaataaaaaaatagttgctgagttgggatggaagaagttataggaaaaatgtaggaattttctttcagcatcaaatcaagaaaggaaaaaccattttcaacatcacatcaaatcagtatcagattataactataacgataataacaagcaattaatagacaatattttgggccaaaccaaattatgggcttcactcattgtcaacaaatgcatccaatgaaagatatgtgaatttaagaaaatgataccttatataggaatatataagtggtcgaatacaatacatttatttatgtataaaaacaatataaatgacatatattgctatttagataattaaatataataatttttatagaatattattatttataaagtgtcatttcctactagcaatctcggtgcgtgataacaatgctttaaaataaaatagaatgattcaatactaaaaatttattaaacgatatgcttataaggctgc

SEQ ID NO: 65865 - DNA, 696 bp, Cannabis sativa
  modified_base (536)..(538): a, c, t, g, unknown or other
atctgggacccgatcccaaacacagacttagacctagataggtatccggatacgaacctagattcggaccaagacccaatcagggatcgaaatgcttgacctagatctggacagagatcctgaccaagacccaaacttggacccgcaatcgggacttgaacatggacctggaccagaacctagacccagatcggggtccaaaccttgacacaaacccggacacagacttagacgcgaactcaaagacgcacctagaatcagacccaaagctagacccagagccagacccaaactcgaacccagaccaggatcagaaccaaggactttgaccaagaactgaatccagactcatatcaggagttgaacttggtacttggaccaaaccgagaccaaaacctaggacgcgaacccacacccagagcctgatctagacctagactgaaatccggacccgaacacaatctcagaccaggactcgtacaccgaaccgaactcaaacctgaactcgaacttagaatcacaaatggaactagaannnaacaaggactaggaccaggaccacgacctaaacccaaacacgaacccagatcaaaacccacacaataaccgggacctggagacctgcaaaatagaactaggaccgggacctagtacccgacccagacccgaacttgaaactaggacccagctcctaac

SEQ ID NO: 65866 - DNA, 2544 bp, Cannabis sativa
  modified_base (796)..(796): a, c, t, g, unknown or other
atggtatatgtattttttgttatatattatattattttttttataatgatatttaagttctattttttattgtacttttgttgacgtgacatatacttttattagtatgttatatatatatatttattttttgttattatatatattaatgtatatattttttgttatatgatatacaagttttattgtatagtatatcattttattttagatcatacatgtttagttttttattttattctatataaaggtggtatttaattttgtaaaaatagtataattattttttggctgtatacaattttgtgaatctggtatatataattttttttaataaaattgtagtatttttttaattttttattgtaggtatatatgttttgttgtatatattttttgttgtgtatagtataacatttatttaagttgatatttagtttttactttattatatataatgattatatataaattatttggtatgatatatatattttaatagtgttatatataattttgttagcatgatatatatatttttttgagtattaagagataattgcggcataacctccaatacttttactttacttgcacttaacctccaaaactcaaattttggtagtaaaacccccaaaactaagaaacagttagtaatttacaatttccatccattttaggtgttaagtgccatgttagactattcatgtgtatatctatatagatatagtgtacacatgacacaattttattggtccacataaaaaattatttaaaaaatttaaaatttaaaaanaaataatttaaaattaaaaaaattgtaaataaaaaaaatattatatttaaaaaaaaaaactaactttttttccttcttcttcttccttctttttttttttttaatttttttttttaattcttcactttcacatataccatcacccaccaccaccctccacaacccatcatcacccaccatcttcgcaacaaacaccaccacttcatcctactgtttatatccaattcacacagaaaaaagaattaatcagaactaaaattttaaacattattagatcaaacaaacaaacacacacttatatacacacaaatttcaaatatactattttgaaccagatctgagatctctaatgtcactgcaaagcccaaccctgactatccacttacgagatctgtacaaaagctcacaaacccatccatccccatcaaaccaagaataccgtcctcgtcatcgaaccacgaacgtacaaacttgtccccatccccttcaagcgacgaaattgccaaaatggagccatggagctttagctccagtgagctctaccacgacggtgaaaagatgaaataataggagagatcacaaggagagactttggggtttgagttttgagactctgacatcgcgactttatggtctgcttggaccatcgacaaccatggacgaccatcgtggccttcgtcgttgttgcaccgagaggaatgaaagagaaagagagatttccaaagtgagggaaggtcagggttctgggcttttgggattgggaaaactcattttttggtccgtttggaccaccgacatcggtaagggtcgtgcatgcgcaccgtcgatatagagatgaagagtcaaagacgggcaaggagtttttttttttggcctaaggacagttatgtgtggtcctctcggggcgtgggtgattagagcacaatagtctcgtcgtgccaatggcctccgcacaaatacagagagaagagagagagagggtgtcgagtgaggaagaaagaaaaagggaattagggtttccaattaggatttttatcattttcaattcacacccttcaaactaaatttattttcaagtttaattatttttatttacaattttttttaattttttaaataattttttatgtgtaccaataaaattgtgacttgtgtacactatgtccacgtagatgtacacatggatagtccaatataacacttaacacctacaatagatagaaaatgtaaattgctaacaatttcttaattttgggaattttaccgcgaaaaatttaagttttgggaattaagtgcaatcaaagtgaaagtcttaggagttatgctgcaattaactcgagtattagtatactagttttagtattgttataattttactgtggtatataattttattactacagtatattaactttcaataatacaatatatcaaatactgttatatatatttaatgatctatatatttattcatttttactacaatgtattaatatgcaatactaaaaaatttatataacttatttttattattttataatttttttaaaaaattaatatgtagtacatgtactttttattagctaatttattatatttagccattttattaattttttttttgaaaaaaacatttactcacttatggtgctataagaaattaagagaaggatttttatgtagttggggcgttaatgagccttagtccacgagtctgtgtatttatgggtgtattaaatacagagaat

SEQ ID NO: 65867 - DNA, 595 bp, Cannabis sativa
gatcgggacctaggacccgaacatagatgggggacccagacccaggaattgagcccccaaattgggaccagaacttggatcgagatttgggacccgacctagacccaaacctgaacctaagacccacctcaagacttgggatccgggactagatgcttggactcgacccgtaccccatgagttgaaactagaactgaaaccagaagcagatcgggacccaagaacaggaccaagacaaggacttggacccaaacccaaaactatatagggtctcggacccggactgaaacactgacccacactcggattctgtgtcttagttcgggatctatttttggtctgggtcgggatatgagttttgtttcgagtctaggtctgggtttggtccaggtctggatctaggttctggtcaaggttcgagtacgagtcccaggtgcgggtccgagtttgggtccctggtgtgggtctaggtttgggtttgggtcaagatctcgaactagatcttggtccaaagtttcaatcccgctcttggtttgggtccaagttcaaattcttatttggatccctatctaggtctgagtctatgtttgggatc

SEQ ID NO: 65868 - DNA, 728 bp, Cannabis sativa
  modified_base (410)..(411): a, c, t, g, unknown or other
aaacataacctagaccagcatgattagtttggccatatttttgaatcttttcaaaaatgttggaactggatttaacattttgacattctttttaatgttttcaagttcctcagtcaaggaaataattttaaactgttttaaagacagttcagattaacaacatttaattttttcttccagctcgttaatgttgttacacaagtctttattatcattaaccagggaacgattttcagcacatatttccaaccacttaccaaatattaccttgtaagattcaactatagagttctcatcaatttttgactcatctaattcggatccagcttcttccatgtggtcatcgatcaaggtattattcatgcaaatgaattttcctttttcctacaaatttcttgacaaaacacttnntagagcaaccttttctttttcatcttcactacttttaaaataatcattccaagtaacattcaacccctttttatttttctttaacgtattggcacattcaaattgaatattgccatacccttcacactctctgcattgaataccttttttaatgttagattaaaaaggtttagagggattgttacttgaaatattaccttttggagtttttgaaaaattctttttatttccaatagatttcacgtattttggaaatatttcatcaacaaggccatttcatcatcagaaacaacatgttcagaaacattaaaagcaat

SEQ ID NO: 65869 - DNA, 895 bp, Cannabis sativa
ttctcttctcaccctgtctctagcaagttgataggtgctcaaatcagtagtaccttcatttgtgtcagtttctgcatctatttcacgattctcttctgcattttgagtgtcagattggtccacctcaagttgcagacattgaactggtatagcaggttgtatttcagttggagttttggttttcattgccatttcatcctctttgaagacaacatctctacttatgatgcactttctgaaaccaagttccatacaccaaactttgtaacttatcctgttttatgtgtgcataggcagtgcacccaaacactctaaggtgatcaagtttgggaacatgccctgtccacatttcttgtggagttttgtacttgtttgcaatagatggaaattcgttaaccagatagcaaacagttttgagtgcttcaccccaaaattttctttctaaaccagcaccaagtagtagacatctgactctttcaagtagtgtcctattcattctctcagccaaactattttgttgtggggttttaatcactgttttgtgtctcattattccttccctggcacagaaatctttgaacagatttgagcaatactccaggccattatctgttcttagcacctttaatttcttgccagtttggttctcaagcaatgtcctccaattgacaaaggtttcaaatgcttgatctttacttttgagtagatagacccacacctttctactataatcatctatgatgcttatgaagtaactagccccaccaattgtctccaccttagaaggcccccataaatttgaatgaacataggctagtttctcagttgtgtgatgttctccttttccaaacttaaccttgcaactcttaccaagaacacattcttcacaaaattc

SEQ ID NO: 65870 - DNA, 602 bp, Cannabis sativa
aaattcaagtaggaaattgttagaacatatttgtgaattattaaaaattagaaatgagcatttttgaagtgcttagaggactagtcccacattgtttgggaacatttatttataagtgtatatatattgtacatatgaacaattggattgggtcccaaagggtacccacttttgtggaagaaggaggagtcacacaaaggctcacctacacaccacacgcgtgccaccaccaagtaacccgagctggtatggtgtgcaccatcttttttagagaaaatttatagtattaattaaaatagtttttaacgtggttaattaattagtaaacaaagacattttctcgtcttgatttttagcatcgatcccgtgttctaacgttcccacgatcaaaaatgtatttctttccgttactatcttctcggcctgtttggtatgcatgactcgattggattagacaggctaatttgtccaatccagtgtttgggcatattaaaagtctagataactaatccagctaatctcatctgtttgggattatttatcccattcagcaaggtgggataaaaaatctcatgcaggtgagattttttttatcttttttt

SEQ ID NO: 65871 - DNA, 919 bp, Cannabis sativa
taggtttctgatctggtttagtagttagttagttacataaattagttaggtgtggattataacctaatccattctaactaatttatgttagggatatagaggtcgaagcccaaattagggatttgcatgtatttactcttttatccttgtaagtaagtgaatatcagtgtaagtagaggtttaatccaacaatttccacctaaacctttactgagttgataatctagtagtcgagtcaaatttgagggtcatagctctgtgatccttaggattacattatccttggtccagccctattggatagggtgattactttagtccccatgtatgcaggattttcttctgtaggcaccttgtcaatacttatgtgtccctgtgtcactttatccctgataaagtgatactttatctcaatatgttttgttctatcatggaacataggattcttacatagatgtacacaactctgactgtcagagtaaatcacagctttagaatctagcaatcttagctcttctaggacccctttcacccaaatactttctttgatagcctctgtagttgcaatatactttaattcagttgtggataatgccacaactggttgtaattgcaccttccaactcacacagtttcctcccattagaagtatgtaggcagaggtggattttctactgtctctgtccccagcatagtctgcatcactgaagcattctatagctgtatgtccttgttgttgcttatatttaagtcctagtttagttgtctcaattaagtaccttagtagccatttcatagcaagccagtgtgtctttctagggtttgtcatgaatctactaagtacactaatggcataagcaaggtcaggtcttgtgcttaccattaggtagataacagatccaatggcattagcataggg

SEQ ID NO: 65872 - DNA, 696 bp, Cannabis sativa
agtgctcacatgtgaccggagaaggaagtcgaatgattttcttagctaagaccttattaaccaatttgttagagtcctggagaaaaaaaagctcattcaactccacaaacatattggcaagagattgtaaattagtctagtgaatttcctcaaacttagacagacgcgacttgaagttctcattctctaattggaccttagataaataagtctctttctgaaaaaaagcctatttggccaccaacaactgagtctgagccttcgtcatcaagttgtggccctccttcatggccttctaatctcgttccctcaacatgttctaggcatctctgaaagcccttttaaggcaacagctgcgtgaccttggtcaaccaggttcttggagagtcagccatcctcgacggttgcctaatcataatgcaaacaatatgataataagctttagtgaatgagaaatagaaaagcaggtgacaatgaggacaataattcaacttatcgaaaccaacaccaagtttatattttgagcttgatagactatgttagaggatgcataagtcgcaagtctcttagtaggaagctggaccaggtcagctgctaaattgcttacaatctcggaggcaaattttaatatcatgataagcttattggtaaataattatggtttttatatatatatatatatatatattatgggct

SEQ ID NO: 65873 - DNA, 805 bp, Cannabis sativa
taataataataataataacatattattaatatatatactatactagctaaattatataccacaattaaaatatatataaaaaaattaattaaatttatgtagcatcccaataaaattatatacatacattacaatatttgtatgatgtgaacaaaattatatactattattatgcatagtaaaataaaaataaatatcatctaaaaatataatgggtaaataccattttgggtgttacaaaaattaccaattagaccctctgttttattaaatgactaaatggaccctgaactgatattttgtcaaaataaaacttaataataatctgatctaaagatgttatgacaaaattggttacattttctgtatctgtttgtgttagaaattgacttaaagttgattatattaaaaaataatttttttgaaaattgagctcagtgtcttatttttactatttatgaaaatatgaggtctattttgtcatttaacaaacagagggtccaattggtaacttttgcaaaacacagggtctataatggtatttacccaataataatatatcatacaacaaaacagaaatatattgtacaacaaaatatatataccaacaacccacaacaacccgttaaaaattaaaaaatcgacataactacaaataaaaaagaattttaacagaattaatatagatataagtatataacattgtctttaagtaatttccttctaattgtaaaacaatatatgacaaaaatattgatttttttatgccgcaaaagacaatataaataataaatagtataaaatg

SEQ ID NO: 65874 - DNA, 508 bp, Cannabis sativa
  modified_base (456)..(470): a, c, t, g, unknown or other
tgaagatttgtcgctttttcaagtttaaggaagcaatccagttcctatcacttggcaatatgctattatatccactgtcattattgaacagaacgaaatctagagtagagtaattgaacgaaaagaatcatttgtttttgctgctattattgtaagatttcttaatcgtgtaatgaattttatattttgagatattatattatttatgtgatgatgaaatatacatgtcatgatttataaaaaaaagttccaatagctattacccctcattatagataagagctaaaaataagagatttgaataatctatccaattgatgagttagctaaatacaagttataactccaaggttaattgggatttttttccccaaactttgacatgtaccgaatcatgcttcctgaacttttaaagtcgttgaaaatgcctccaaaactattgagattgttgaattnnnnnnnnnnnnnnnaattttagtaaaaaaattctaatatggatgaaaattta

SEQ ID NO: 65875 - DNA, 620 bp, Cannabis sativa
atttttaacgaccttaaaaatttacgaggtataattgaatatatgttaaaattgattggacaaaaatcttaattagcaataaaaaaaaaaaaattattagtgatgtaaataaataataataactaatttcaactaaaaaaaactaataaatcaaatatattgtggctcgactcggtcggccaaattcgcctaaacccagggcagtgtaacaccatagctatgctccgaactccaaaaaatggatcaaaaccagagaccttcctcagcttcaagggcttaccagttccacccaggccgagccaccattatcactctctttgacctatatttaggagtaatttccctttctattgctttgtccttttttctctcagaatttggtgtaattatgctttgtttaatgtatttgttgcagaaaagtagtcgccaaaaacctgatgatcaatttcgagaacctccgtaagttcattcatgctgttaattgctttctttttagttttgagttttggtccaaatcatattgtatgaacagtgttcctttgttagctttagcttagcttatatatgaaaagttataaactttaatcagtgataaaaaagaagtgtttgaagtttgaacc

SEQ ID NO: 65876 - DNA, 722 bp, Cannabis sativa
  modified_base (457)..(461): a, c, t, g, unknown or other
ttttagaccaacttaaattaaaatatttttcgtagatattaaattagaattaataattaagttaattttattcaagatacttaataatttgttcttttatttgatacattttactaaatagaaaataaatatttaagttgattttttctagacacttaaatattagttattttcaggaattttgattagacagaaaattatatttaagttgcaaatttaattttagatcaacctaaattagaataatttttaatatatattttattaatcatttcccacctaatttcgaattgtgtttatttatttaaatgcaaatattttaaaattttgaaaaatagattaaacttgaaaattaattttaaaccaacttaaatcaagtaaattttccattaacaatttattaaaataaatagagtaaaatatattatattttaattagaaaataagtaattaattnnnnnaatatctagatagttattttctgtgtagacttgcggtatttttctagacatatttaattaaataaaaattaatatttatgttaattttattcaagaatggaatcgaatgcaatacgaatgttttagaaaaaataattaaaatcaaaatcaaacatagaaatcaatcaaaagcacattgcaaacaaaaaattattcagattaagaagaaagaaattcatttccaaatctaacagcagacatacacattaatatatatatata

SEQ ID NO: 65877 - DNA, 1117 bp, Cannabis sativa
ttacattgaaacagagttttatttagggcataaaacccaacaaaactgttgtattggagtccccgttttttatccaatccaccttggatttctgctgtaagagagatatgtaagctttctgtacaacagcataattctccctaaaatcttgcttagcttgctgaagatcaatgttcaaaaggggtccccttgaagagccttctgatcctcttccaaatttatcttggccttcttctcaacaacttgaatgtcatgaaaaccctgcttattgatctcttgtaagaccggtttaagagctttcagcttcatcacaatttgatacattttagtgcccctcacattcatcttccaaaccaattccacctattgctaataatatgggtgacttgaccacatcctgaaatacttaaacggtttcctaccgctagaaatggaaggataaaccgtaagcagagcaggagtatgatcaaataacccctcattaagaaagattgcttcagcattaggaaaagaatccatccaactttgcttttccattactctatcaattttagagtatatccgatcctcacctttctgtttgttattccaagtgaaaaaactaccaccaaatttgacatcttcaaggttacaagcaacaatacaatccttaaaagaagagggatgttactttacccaagcccccatcctttcatatctctcaaggatgtcattaaaatccccaagaactacccatggtacataggttttgaagagcatcaattcttggcaaagtttaagtcttccctcctcattattgaaaccatagacaaaagtgacaaagcattgattccttttatctatggagacaacaaagagatgcatagcttggctagaacaagagataatatttacttgaaagctcaacggattccaagcaaatattattcttccccctttatgccaagctatgttagaagtgaaacaccaattactaaacattctcaagtataaggctccaagctttggagccttaactgtcgtctcaaggagaccaacaagcccaacattattcttagtaataaattgtcgtacctcattttgcttgtttggactgttgattcctcggacgttccaa

SEQ ID NO: 65878 - DNA, 569 bp, Cannabis sativa
catctgctatggaatcatttatttatgaagaaattacaagggttttcactttttaatttccttctctaaaagattttcataaaataatttttttttaataaaaaatcatatttttgttaacttgtaatgagaattcccctttatttattttcaaatatatgtaaatataacacgagtataatttttagaagtcaaattcaaatcaggatacattaattaagaaatgatcatgactcaagcttattttaggaaaacctcaacttcaataattcatcttccgatctttcattattgtttttctctgctagtgttaatactggtttgaagaaaaagtgaaactatacagaattagaacttcttactggaaaccactgttcactcattcgggatcatgaaattcaccaaaacatgttgtaacaatttttttatttagatgaaaaaacgtttaattgtgttcctttcctagattttggcagaaaattatattgtgcttttcctttccatttgtcggacccaccacacactccgcaaacttaacacggttcggtcgacgagagcgagtgttgttg

SEQ ID NO: 65879 - DNA, 1080 bp, Cannabis sativa
tttctcttcttatttcattattttttttcaccaagcacagtgatgcattatttttctgacaatttatttttatgatcatcatttcattcatatttttttataatgatttttgcagtattttttatataaatattcatgagatttttttctcctctttcaatcatcgtaaaaatttgtattgaagagtggaagtataaatttgtattgaagagtgaaagattggaattggggtgtgtttatcgagttttttgaatactgattcaatacaaaattaagttgaagaaaacaagattaaagatggacaaatgataatttttatgtggttggcgtgtaaattaagcttagtctatgactgaatattattagctctaaagatagagtatttttttttacaagatttgccaaaatttctaatgatttgcatgaaggaaaaatatgttagaattttatgttctaaataaaactcatctcaatataattttattagctaatcaataaatgatatagaagtcaaaatttatattacctgattcacatgatatattcatgattataattttaatatataaattttattaaatcatgaacttatggataatcatgattcttgtattgtttacatagtaaaaaataatcatgatcatatgcttcaaatatttagtcccataatttattagtgcactgaatttatattaacatgataatcagcgatgagatttacttagacttagataagtggagtgtttattccaaggaattaatagagtcactactacaaaaaggccattttttgtcagtttttaactgacatttatactattctcgtcggttcccataaccgacgtatatacaacagacgtaaaataatatttttctgcatcagttttggacagtcgatatcaaaatatcgcgttcctttataaccgacgggaatagtatttttatacctttttccgccggttttgtactgacacaaacttaaaaaataataaaatacacacacacacattcgattgagatactgtctgaacaaaacatcgattaataaacataaaccagatctaaaaaatgctcaaaccc

SEQ ID NO: 65880 - DNA, 800 bp, Cannabis sativa
atttttaaatatatatatataatataatactataaaattaattaattaataggattttctgttaaagttaacatagaaatccaaaaagtatcgttaaaccaaaaattatgttacacagccacactttatatagaatagatagacatagggcattttttaaaaatctaattcattacattagcataggtgtcgtttggtaacatttttttatccgttttccttttttaaaattaaaaaagtaaaaatattttttaaaaatatgttctatcaacctattttcacctttcaattttttaattgaaaatcaaaattttgaaaattttaaaaacaaaaaaaaaaaagtccttttcattgttttttatacagttctttttaatcaatgttttggacttcgaccagactcggacccagacccaaaccaggccctggccctggtgccgaacctagcacccaatctgaaaccgatcctggacccaaatccgacttaaataatgtaaaaaaataaaataaaaatgaacttaacagaacatacttttgttttctgtttttaaaaattgaaaaacaaaagtgcttatagaacacatttttgtttttcaaaaacaaaatttttaaaacaaaaaattctacttttatttttgtaattaaaaaattaaaaaataaaaatgttaccaaatgtcaccataataaataaattaatgtgtaatcaattacactagcataataaatgtgtaattttttttttttttagttttgtttccctggacaatatttcaattaaaaaaaaagaatgagtaatatgg

SEQ ID NO: 65881 - DNA, 593 bp, Cannabis sativa
aatagatatagagcagttcagactttacaagtttcgggtagggagaagacagtttctcaaaattgctatcagctcagcacagatgcagcgcttagtgtagagcaaagcaagatgggatttggagctgttattcaggattggcagggtaatttggtggctggtttgtccattcctgcaatagggaacttgcaacctttaatggcagaggctttgtcattgcgagctagtttaatgtggtgtcaaaatatccacatcaatttggcagtggttgaaacggattcaaaattgttggttgacaaagtccacagtcagaagaatgatcgttcaacactctcggatgtggtcgaagacataagaagttctttatctgccttccctaatgtcgaccttcggtacataaacaggaagatcaattgcagagctcacaacctggcgcgaagggcactagggcaagatgaagaatcctgttggaatgctttagttccaatcttgtagcttcttttcttgaagctttacccgtaaaaaaaaagtatgcactttgtaaaattttgatttgaatgttttaaattacaaaaagtaaaatataatttttg

SEQ ID NO: 65882 - DNA, 1448 bp, Cannabis sativa
tatgtcgttataatgcccatttttggttttttattttagtcaagtttttaatattatcacagtttttaataattaatgaatctattaatattaaactagtttataaaatcacacacgttgcgtccctatagattagggcgttacatcaacactcactcacagggtgcacatcaccccgaccctcaatagggagtcttagaggtaaggggccaaactcagggggagcatcaaacctcttctcgggtgagggctacatccaaatggtggtgtaattgtaatgccaagctcggggtagtgggatatgtaccccaacacattggttgctagaccatacctgagctatgtggttgttccaagccaaaaaagtgttccaaagtgtatcacatccctacaaatatatttttaccgcttttatgagaatcaaaattggaaaggtgaagggaaaattgaatttttttttatgttcatggtgttcttcaatgttcaagaacacaatcaaccaaaagcttcaaagttattcattttatcaccaaattacatcaaaccatagccaaaaacacattacccatagcctatgctacagaatccaatcgtcaaaaactcacatttgatcaaaaactcaaaaatcccaaggattcaatgccattttggccatggaaaaaaactaccaaaaagaagtactaaaaacttcatcaaattttaaatttcaagcaagaaaattacaagaggaagtgtagagagcctgcccactatgaagatggagacctcaaagtttctaagtaatttgtttaattttttctttgtaaatatttagattatttctttttcttgtaatttaattttgcttgtaaaggaaaaattatcattgtgatttattgtaaaatgagaaaaaagaaatggttagggaaaatatttttgggtttttagactgtaattttagtataggtgtagtatttttggtgccgctactccaagccgtcaataataaaagcaagacccaaactacacaagaaagttcctaccgtatggtcataccgctagaaactttaggggaaaatgtttacccaaatttttacgatgacgacgtgtcaagagtaacaacacgtggcacaaaaatactgggactaaattaatgaagaatatgtaaagtcatgaccgttggggtgaccgtcaaccatgaagggtagtcataactgttagagtggaactcaagcaatcacccttatccctagcttgagtaaggtgggagtctccacgaaagaaaaatgatggactaataccttcgtaagcggaatgaataatcaccacacacctacgggagtcaaaccaacctagagggtatatactactacccctacctcgattgcaaagcaatgatctatatggggtttagtctaggggtacaccccttaacccctaaagggttagtctaggggtataaccctacc

SEQ ID NO: 65883 - DNA, 932 bp, Cannabis sativa
agcttctcaaatgaagtggcaactgctatcttgcaaattcaaccacttcagacaagttcagacattctcttctggaaagcctctaagtcgagagaattctgtgtgaaaagtgcctatggtctgagtcaacaaccaagatttcaggatagaaattcggtttggagtgttctctggaaatcctccatccatcctcgtctaaagcttttcctttggaagatatggtcagatattttgccaacaaaagtcaggttaggcatgtgggaaaatcattgtgtattctgtggggaagttgaagaatcggcattccatttgttttgcaactgtaatatcactagagctctttggttccagagtaagtgggggtttcgtatggatatgatgaattggacaactgtgatggagttcggtcattagtggtctaagttagcagatgaggaggccaagaactacattgcctgtctgtgtgaaattgtttggaaacataggaataatataatctttcatggagactgctgtaatttgcaggttttgattaaggaaattcggttgagggcttcggagatgctgctctctatggaggcagtggaagaggctgagaatcggactgaaattcccatggattccaacatgtatgtcgaattcaccaagtatcaaactgatgcttcggtagtttgttcgaaggcaggtctgggtgtggtggagatcgcgaatgaagctctccaagaatggtgggtggctgtcgacttctctgaggtttctggagtgttggaaggggagcttcgggctattcatctggccctgcttcaggcaagatcgagaaaagttactaagatgttggtgcaatccgattcgaaggtaacggttttggctctcaattttcggagcttaccgtttgcctggggtacttctcctgtttatgaatcctgtcgatc

SEQ ID NO: 65884 - DNA, 615 bp, Cannabis sativa
  modified_base (232)..(235): a, c, t, g, unknown or other
gaattgtaaataaatttaaattagggtactaatatattgtcactagctaaagaataatatttttggctagttatatttaaaattttgttagttttttagtattttagtaattttgagttagtgatgtgagttgtgtgaaattttaagtttgtatattaattttattttgatgattgtcattctactataattattctactataattgtattttttggtttggtgttgtgatnnnnttttttttttttttaatttcattaactttagcaacaattattaataataggatggtatttcttttaatatgatgagtgttgtttgaagacgttatagctttattgtctaatttttcggaagcagttcccatgtggctcgcgatgaattttgcagctcatagtttggtaaaacatatcatttggttagacgatgagttattttggttcgaagaagttctattacggattataacttgctgctttattaattatatgactgttctgtgtaagaaaaaaaactagattacaacaatgtatttccttttattttactcttttatttttataaggaataatatttttaaaatattcaaagttagtagatttgaacaataatattt

SEQ ID NO: 65885 - DNA, 2450 bp, Cannabis sativa
tgtgtaggtatgggactacacagttgatgagggcttaaatggattgattggtactacctatatcaataaggtgtatcttgtggttcgatttagggtgagagagaaagaatgaggtgcaaaatgagggtgagagagaaagagatgtggttcgatttagggtttcttactttgttatatatattatcgtattattataaattatttatttaataaaaaagtctgatacattttgatcaacaaataaataaaaaaaaatatgatatcctacatttaatataaaaaaataaaataaatattatttattgtattagtgtatatagagtcatgctatgacggactgggaaagcgtgtcctgacatactttgcgcgtcactaaaactatatgataattatgtagttttagtggcgcgtctggctggtcactacacgcttttccaattcctcgtgatgcgtctttatatatcagtatttttcatttaataaaaataaaaaaaaaaatagatttttctttttagtgaccattcgtattttcagtgacctccattacgggagactaacacctaacatttaaagtgtaattatgcatgtcactaaacataaatcataactattttgtgacctggacttttgtgcgtgtcactaataatgtcaggtaaaattgtagtagtggtttgaagcatgctcaaggcttttgagattactggttttttacctctaacttttggttgaagagggttccaacaatgtcgttagaattttctgtttcgagtaagcacaaccatttccattcttttctctttaattccttcgtctttcaaattactgtcttccagttggcaagggagatcttgtataagagcttatctccaaattcattaaaggtaaaagaattagtcaccaccgaaaatatctggttggttggactgatcgctttgcatcaaagcatcgacccatacatttctcgtgacattgctaaggattttgcggaggtcaaggaagccataattgaaatcgtggcaaacgagatcaaaaaagccatcaagaaggacgataaattgttggcagactgggtgctgcctcatctgaaaccaatgagtaagaaaatggagctgaggagccactttgcaacaatcatcccaaacgatagggtgtcgacacctctagaagagataattcgctctattccatctgtcttgcactctgcctctaaaagagtttgtttggatcaaccaaggagggttcgatcattaattttgaaaaataaaacccaataggttttcgatggtcgagtattatgatagagtagatgaaatcgtagatgattgtgtttgcagagaagctgtctgaagcagtgggcaccatagttgcaggtatagcaggctagctatgtctcctctctgttaattaagtaataatttctattctggatcgatcttcttaattgtgttataagtatataacagtagctgtctcacaaattagtccactgatgagaagcctgtagtatgtagtatataaagggcgcacagaagaataaaatatgtagttaatatcaaactagtattatagtatggtatatatatataaatatatatatatatatgtattaattagggtacaaaaagaataagagtatacatacataggccgggtccaaaaggaatatagtataatactctagggcgctggacctcctctaggttaattaggttcttcagaagcagtaaaactcatcactaatatattagctactctctcaaatttatgacaattattatcatatatatagttcgcacaaacctatacgtatatatgggtttgtgtttaatattatttgatagataaatttacgtatgtgtcgtcatgaatttaaaattgtacagaggcgtatggatgttgctgtacacttttttcttgtttaatttacttgaagcacgcaattttgatattaattttaatcaacaacatagttttcttcaaaattaatggtgtatagactatacatgtattatttttgataaacaagtagagatcactatgtattgtttctcaaaaatttggagcttcagtaattaaggggcacattggccgagtttgttagtataaactcgggtgtgacctgtgtgagaaggtacatataaacccacctcgttcatgttatatatattagtactaaacaccatggcgcatgactaatattcactactagtttctatataatgcaaattttattgaggccaaacttaatgctataatcttatattggttgagatttaaaacctctttctctcttgctctctaaaaattactaatttccttcaagaaactcatcaagtattgcttgatttgaatgagtttcaaagctatcccacttcaaacaaatttaggaaacactaattggaatagatatttcaggcaataataataaatcaattgtgtcaaaccttttt

SEQ ID NO: 65886 - DNA, 4089 bp, Cannabis sativa
  modified_base (2681)..(2682): a, c, t, g, unknown or other
attatggtaagggattcttggctgcctgtcttgaagcttacaaccagaatcctgaagaggtgattcagagggttctcgagggaactcttcatgaagatcttcgaaacatggatacttcaatggagacgatgcctatacccaaggcagctgctacagtcgttggcaagaacgataaagggaaaggaaaattggttgaatctgtaccagtatcctctcccaacccaaatttaattcctggggaaagggtgcaacagagggaatcttcttcggtttcatcttcatctactcatggaaggtttgttaggaagtccaatgctaatgtgcttgattctagtactcttgatgataaaaaccagatggattcattgagaacggctgctcttatttcgcaatatgaattagatgatgagtatgattactctttcgatgaccttggcctgagcgtgggagattcagggttggatgaaaatcagagtttgagtgacaaaattaactccaatatggggaaaacttgggagaaagagactactgaaggtggctcttcccagaataataattctaattcgaaatggggctcgaaaaagaaaccgcagtattatgtgaaggatgggaataattacagttacaaagttgaaggttcggttgcagttgcaaacgctggcgaagcatcgttacttactcaggctcagcaagaacttattcatggcctcggccgtggtggcaaccttccacttggtgctgtgaagaagttgatagagacctctaatgaccaagataagcagcagcaacataaacaacagcagcaacaacaacatgatgttgccgagacacaagaaaactgatttgggaataatactagaggatggggaaggggaaggaggggaggtggccgagccaacggtgaggaacaagataagaggtttggggtttcagaaggtgaagaagtgagagataatgcagggaatttcaggggaagaggaaggagacgaggaggcggtggcggtggaaggaacaaccattaccgaaaggatcgtgccaatgcaaaacacttttctggactaagtggttattagggagagtaaccttcaagtttcaaccattttgaccttcactcaggtttctttcactttcacaatcagttgtaaatttgaacttattttttatggtttaaactttggtaagttttatagttgaaaagctttgataaagtatgagcacaactgcttaagaagatgagaacaacagtaattatttttggtcagttctccaaataaaatgaagtgtttgttttaaaagtgtcatgcgtaaaatagaactatatttcattgatgatgatacgtgataactctaattttacaccaacgtaatctaaaacttctcataattgcatacaccaataaaaggtaattttttttttgagagacctataaaaaatattgggtgattttacaatgtactattttggcatctaaaaaaatttttagtctaatttttttcatatttgtttacattatagttatttaaaatattttacaaaactttgagaaattcagaataatatacaatatagaaaatagtgtttaaataatctatttcacacgcgtataaaataaaataattacgcgtgcaacaagtagtaatttagctttaagtgtgactctaatcaaattatgcacatgagtaactaagaaaatcttttgctcaaaaatacaagcattatgattcctccaaataaaataaattgttgctgcacaagtagccgcaacaggcctatgaagcagactgcgatcacgattagcattcaaccacaaaagccaatttaggtaagactcgggccaaatagcattgccaagccaaaaatggatagcacgcatgagatgcttggaaaaagaacaataaaagaaaagataattatgacagtcaacaccaacctcacaaactggacagctagtaaaaatcatagtaaaacctcttgccaacaggtgatctctggttaataagttattttatgggaggcttgccagagaataaatctatattttggtacagataatttacaccaaatcattttataattatcaactttagcataaggagtaagaaaagagttataaagcttactaacctgaaatcttctctcttttccagcatccagaattattattattattattattattattaaactgaagcatgaggcggttttaatttttttaaatactttgatctattatctttctgatgtttgattttttttttttttaaattataactttcacttaatcataataagtaatgatcattgctcgcttttaaaaattatcaattcatcgataatttaattgctgatttttttttagttctatatattcaaagattctattttaaaatagcagttcttagtgttgtaaatatgggttagattttttgacacgacacgaaatcggtatgagcttcgaaagcacgagcacgactaggcacacaaaaatatgggtctagacacgacacgatacaatgctataaattgacacgacacgacacgagaagcgcgaaagacacgacacataagtataaatagtctatatcctgaaagccacaacacgatatattaatcgaatcttataatttattattaataataatagtaaaatatgaatttatcaattataaataagttaaannaataataaaacttaaatataatacttagtattataattctataattaaaactattaaaacataaaaaattaaaattatatattaatttatttatagtgcgtgatataaaaatttgagtattcataagtaaatattcaaatttgagtattgttcaaaagttatatagctacatctaaagctttgaaatatacatataattcagtaattgtaaaaaaaaaatataaaaaaataaagtacgaatttaagtcaagatatgaaaatggactggcctgtttaagaaatacgagccgacataagcaaaacacgacacgaattcgagcacagtacaaaaatgtcgggcctatggaccgtcccaagcctatccttgaaaaatgttagcacgacacggtacgacccatatttttccgtggcaaggcataacacagctcgtattttttaaaaagcaagaataagcacagaccgggctagcatgacacgcacagacttacagtactagcaattcaatatattctatttgaattaaaatcaattttttaaaaaacagtatttgctaaaagttaaatgatgtggctagacgaccaacaaaaataaaactgaactttcaagcagaaattcaaccatgttctattcagattttagaaaattcaaaacatgaaagttttagagttctttctcaacttttaaatgcatctttaatcaactcattcaaaattcgtattaaaaaattatgtgtattttattgagagaggtcagagcaaaaaaatgtcaggcactacagcccccaaaattaacgtcacgatgctaattgcgcctccaaggcgccacgacatgaacttaagagaaaagtggtaattttttcaaaaagctccaagccctgcagcaccctatgcttgcattgcgccgtcatcgtcaggctccatttaattttttttaggacacaaataattttaaataagattttattaattttagtcttgaaaaatgtttttaaaaaatgtaactaaaactgaaaatttcacaatattctataagagatataaacatttagaaatgaattataattatcaaaatatttattacaacttaaaaaaattaattttaaaattaatacaatattatttaatagaatttccatctattaactttaatataataaaattagattaaacattctataatctaatcagtttttatgtttctccataaaattagtattgttaagtattaaaactacaaagaataaaataaaattaaaacttacatgtggaagtggcataccattgtgtactactagttacatatagggttatttgcggcaaaacctcctaaagtaggcaggtttttgcaactaaccccctagtctaaaattttggtggtaaaacatcctaaacccaagttctgttagca

SEQ ID NO: 65887 - DNA, 1531 bp, Cannabis sativa
tctctctctctctctcttcataattcgaatgccctatactgaagagtacctttcccacaaaattcaagtgagtacacaatcatagtgtggaagaatttgaagaattccatcacttaagaagatccaggtacagatctcgttaacactttacaacagaaaggaataagagttagagatctaaacggaaggagcaataatattttgctgccactaatgtaaggttttctataactttatttgtgtttatttcattattttagaaaatttatatttaggatgttagattatagaatataatcaaacatacatgttagtaaatctagatcttgataaaataaattctaatagtctatatatctcaacccgaaggcttcaaggatagtggaaagaatatctaattgggtttgcaaatttacacgatccatttatggtctcaaacaagcatctttctaatgatacttgatgttcgataaggttgttacatcatttggtttcatagtcaacacgtttcaccagtgtatgtatatgaagataagggttagtccttatatttttcttgttcttttacttgtaagcagtgattttttattactaaatgaaaccaaattttttctatctaccaactttggtataaaagatcttagagaggtatttttttttggggattgagatttatcgtgacaagaataaaaaagttcttggcttatctcaagaagcttacattaatcttgtgctcaacattcaacatgaatttatgtaaggttggttttgttcctattatgaaagatgacaaatttactaagcaatgatgtcctaagaacgacttggaaaaagaagtaatgaaaaacataacatatgtaagtgtagttgggagtttgatgtatgcctagatttgcattggacctaatattgctttcatagtaaatgttcttatgagataattatctgatccttgctatgatcattgggttgcagccaagaaagtcatgagatatttgcaaagaatgaagagttttatgcttgtttataagcatgttgacaatctctgagttgttggttatcacaaattttagtggttgtgtagatgatttaaaatcaaattatggctatattttcactttggttggtgcaactctttcttagaaaagtgttaaatagattttaatcacttcatctactatgtatgttgagtttgtcacatattatgtgacatctttgcaagctttgtggttaaagaatttcattttagagatgcaactagtttactctatttcctctcctacactaatctattgtgataataataatactgttgttttcttttcaaagaataatgagattagtagtgcttccaaatatatgaaagtaaagtatctcactgttattagagactttgtcaagaaagaagacaatgtgatggaatattgcaagactaagtcgatgttagcaaatcctctaaccaaaggattaagcagtatcgtgttgtttaataaacatgttgttgatgtggatattttataatcttttgttc

SEQ ID NO: 65888 - DNA, 1130 bp, Cannabis sativa
ctaacttggttagaagataagctttgatataatttatatatttgggcagataacctctgttttaaaacttacatagttcaaagaggcgtatcattcaggtacttatatagtaatataataagtgattaccttttttttcctttttggaaggggataagtcataagtgattactactcactacaactaaattatatgggttgaattgttttggaaatttttgtcttgtactagatagtcaatgcccactgatattaaattctttaaaaataacatcacatggtacaagtttacacacacttaccctcaagctgatttgctatattaattcctttactaaattcatgaaattgtgcacatcaccaattgatcttattgctcagccgaccatgttgcttgctagctacttacgttcaactcccgtaatcagctcacatactcttcaaaacaccctcaaagttatactcctatgcgcgcatgcctttataattagaatcgccaaaagaaaagattaaacaccaatgacaagccttagtggtgaattatttagtcacgcatattggaataactacacacaaatggaaattgcatacttatagatatattatattactggttgaaatattttcttgcagcttttctttccttacgtgatagttgtacttccactggtaatgtataaaattttatgtatgagattgtaatttaagaaatatatagtgatagtgccttatctctctacaaaaaaattctgttaggagccaaacctaatcactagtagtatattatttggatttctttacaaatatcatcacgtgtacgtatttgaatctcaaatattttatatataaaacttctctagtgcacgcactacctatgaagactattaatttatatcatttttcaaatgctcagtaatgcaaatttacacatatacatatatgtaataacaaaaggtgttgattagacttgtacatagaatactgaatgtactttcttaaaaaaaacaatctttaacgataacattttagtcacaatattaattttttttgattaaatatgacttttagttacaacaaaaagttatttgtcactaaaatataatattaagatataagttgtcactaattta

SEQ ID NO: 65889 - DNA, 880 bp, Cannabis sativa
gtccacaccaaactcttgcttatagcctttagccaccaatcacgctttgtgcttgtcaactgcaccattttccttcaacttcgtattgtacacccacttaacaccaatagtctcttaccttttagaagctccatcaactccaaagtattatgtctttctatggtcgccatttcatcatccaacacctttctccactttaattctttagcagcttcttcataagctactggatcacaatttgaaaataaacaaaaatgcgtgagtgaatcctcttcagaatcatcaaaattagatacctcataatccatcatccatgcaggcatgcaggcatttccctctctcgttgaggcctttgttcactgggtgcttcattagcaggtggactttgagtgattattgttgttggttgttgaaatttctatacaggccgttgctctcttttctcttcatcaccatcaaaatctgttagaatttgttgttgaacaatgttctcgtttcatgcccaagttctttcttcatcagagattacatcgtggctaaaaatgattttcttggtgttaggattgtatagcttgtaggcttttaattgatcaccactactacaaaaaggagtttttgcgtcgtcaacgcatctagtcaaacttgttgactgacgcaaaagtcaacccatacttttttgcttcagttatccaccgatgcaaataattattaattagtgtcagttatgtatccgacgctaaaacaaaaactaaagcaaaatataaaatataaaaaaaaaatgtgtatacactattagcgttggtctacaaccgacacaaaaaatcattatatacactattagcgtcggtgcacaaccgaagcaaaaatacattaaaaaaaa

SEQ ID NO: 65890 - DNA, 654 bp, Cannabis sativa
  modified_base (593)..(596): a, c, t, g, unknown or other
taaaacagactctaatagccaatacctactactctacctccaaatccaaattataaaacatggattaagaatgtatttagaaaagaagacttccaatgtttggtatataatatatgattatttctttaatcttaagagaaataattaacttaataataataacaattgattaggctatatatatttctctaatcacacgcatcttatttcatatacacatatgagatagttaaattggaagctaaacatttgttaatgaaacaattaaagcatatatgtcaagattgttttgtgttgtatacctacctaactagaaggctaatacatatatatttcaataagttttaactaacaatagtatgataaagaaaattaagctgtgaaacactacaagatgtgatatattattattaatatattttaatattaaatattttacgtattttaatttaattaatattaaaaatatatagaaaacaattaatcataatatgtgaaatatgtgaaatacaagaaaataaataacaaactcaaaggataatttaagcacatgaaactgttatattatttataataatataatatatagattnnnnatgtgtaataaactaataatatgtaacatatgacaatgtatattagttgtcatctttt

SEQ ID NO: 65891 - DNA, 2028 bp, Cannabis sativa
tgagtgtcattttatatttacttagtggcttttttgaatcttttattgatttggatacttgtagaagctagtatgatttaattgtttatattttgtaagggataaatattttttttatctatttcattgtattggtttagaattttgtccaaatttaattttttatttttatcttatataactggtttcattttagttaatattttatataaccggtttcatttcagttaatattttttttgtaatgctttttttattctgaacgattaatattttaatggtattttatatgtgttagtttctattaaccggttattttttttttaaaaaaaaaaaaatctaatattgtgtttttatattgaaattatacttttatctttaataatgctcttattgttgttgtttctttactttcttgcttcttggttgttttgtttgtttttattttggtggtagagttggattagtgcatgtctttctgttgtggcctgtctttttgcaactgtccacactttatttgtgcctttgactatccttttgatcttattcttcttttcctaggtctccctggttgcttttttgtctggtggtggaactatcattccaagtactcaggcattatccatttactttcatttggtaatgtgtttgctattgtgtcatatgttactttcatttcgtctgttttgtagtaacccgcaacatagtcataaacttgcagtcctcttttcgagaatacagcgattgcatgagcatgcgatttcatcttgctggaactagttacatttacatgttttgtccagtaaattgacaaggaatttccctttctctagcacattcacttggtggagtattattgtcactagtgtaacctgtttttctaaacagaaaaaattattttataatcggttattttatactattcttgtatctctctaatatatattttatgtatataaatatatttatgtttagtgtgttatctcatattttattgcttgaataaagttatctctgagtatttttctgtcactgttgaacttttgaatgttccatgtgcttcattgttgtttgtccaaacccatttttataccaaacttcgaagactctatcattgtagtgatgggcagtcttcttgtagcaagaattgctgaatttatcgactcagctatgtgggatgtcatcattgtgtaccctctagtcaagctttggcatctacttcaatattcgtatcctattctttcgagatcaggtcttattcttttgtctattttgtcaagttctgacatataaacttcaaatgatttcatgttgtatgtttttgcggctttaacaaagtttattgtaagatcttccccatgtactctaaaattgaccttaatgttgataagcaagtggaatatgcatgctccatggaatatatttgggtagacttttgctactactttttgtatgcttttgtgttgctctgagatgattgtcatgtctgcaagtcaatatttgtcaaatatcagtttatgtctgttttaatcggtttctttatttttatttttgaaaccaattatttatgttaagtaagtctaacaataataggaaaactcttacactaaagtagatgtattagctgtaaatttttatttgaaccagtttcttaccttctctttctctgaatgtttttcttagtttgttgaaaaaccactcccatgatgaattattctccgagtctcctattccaaatgccatatgaatatgtggttattagcatccattgttgaggttgtaaacaatgtccctccatatgttgtttttaagaatgtgccatctaccacaattattgatcttcaatgtatccatcatctgattgaatttgacaatgcgaagaacatgtacttgaaccggttcttcttgttcgtaatcaattcagtaaatttccctggatttgctatttttctcatatgaaggtatattggtagttgctggtatgagtcttctggctttcctctagacaattatagagccttttctctt

SEQ ID NO: 65892 - DNA, 636 bp, Cannabis sativa
actgctattacaatgacacttgaatccatatccaacatccctttataaacagttccgaaagctcctcttcccaactcttcgctaaacacttttgtggcttcctcgagctcttgataagcaaagctacgcaaattaaagtcaggtatgtttttcggggatgaaatctttttacttctaagactcttctttttgcgtatgaagaagactcctgcacaaattgtggctgtcaacaaaatattaacgaaagccgaagtacccaaaagagctgcaccaactctgattgacaagtcttggtttttcctcttctcttgttttacataaggaatcctaggtacagtgatactgatattgtctttacgaactttgataaacaccctcgagttaagactctggtcgaccttgccattcgagagagggagcttcttcttccaacatgatccgtctctagagatagcaacagcacacaaacaatctttcaagcaagaatctctacaatcatccccattaaaaggcttcagtgcaacataatctgataagggccaatctacattgcgcagctcctcaacatcatagagatcttctatgtcgggagtaagctcgtcttcagcgcagccttgtatgaaatcgggtttgcag

SEQ ID NO: 65893 - DNA, 1631 bp, Cannabis sativa
tggtaaaatattttcaacaatatcaccctctcattagagatctgcctattgattcatgttttgtatttttatagagagttatataagatcccacctatagagatctaaatagtattatctctaggtatcaatacaaccaaaaagggagtaggtcattactcgctatcacaagggggccgaacctctataataaatctgtgtgtattatactttttcattctgtttgtgtaacacgtgacaagtatcaactctatacgaccctgctgtcagtttaacattttttgaggtcaataattatatttaaaaaaaattaaaaattgagcttagagtttatttttaatattttgaaaaatacaaggttcatttatcatttaacagaatagaaagttcaatcgataatttttgtaaagtacatggtctaaaatggtatttatctttttaagaaaaaagagatttatataccacatactaaaatttttaactttttttcttttttactgtggggtgtggaatttttttaaaaaatattattattttttacactgtggtacatttcatttgatgttctactgttgtttttaattattctatttagtgttttatgattttttatattaaaaaaacagtatttttgtcaaaatttctgtgatagtaaaattataaatttttatccaaaatctaatattttggtaaaacctcctttaaaaaatttgcataattgtatcggtaggaggatgacaggtgtaaatagattggatttggcattgggtttggaaagcatatgttataatgatgaaggcgtagtaaaccaaagcaagtagtgcataggatataacatagtccaatacacaaacacatgttagtgttataattagctagggcataacataataattatatattaaggatatattaattagaaaaagaaaagtaaaggttaaaatatatatgtatgtttaaattaaattaatataaaagagtggtgtggtcagaataagcagcattagcgaggggcacgcccgatgagtccactagggtatgttccctttggtgcacttgtcattgctaacaccacaccataccacaccacagggaatgatttgggaaacccgcccacacaccaaccaaaacataccctcactcattctctcccctacctctcttccattttcttattttgctttgctttgagtgcacattatataattaatatatataacatttatacaatagaaagaatcagcaagaagaagaatcagtagtagtagtagtacttgaagtatatgtatagtagaatataattttgaaaatttgcgagtgtaagtattatatatatataaccacacacatacgttatacataaggtcgaccccagctagtagcttggtctcgtatatataatcagaaacaataaggaatattattgcagagagagagagaaaggggaggctgcatgtcaggtgtaatatataataatattaaatataaaggaaaaaggttgagagatatgaatagaatagattccacaaagtaggaaaaatccgagtcataaaatggttgagcaactaggtttatagcattctcccccaaaccccagagagacaactcaaacaaattaaataattgattat

SEQ ID NO: 65894 - DNA, 861 bp, Cannabis sativa
aagtaacgtagtactacgtagttgatgagtttataaattaaaagttttggataggaatgtatacatatatagatataaaatatgtataaaatacaagggctttgacacgtggtgatagaagaggatttgcatgtggaatatttgggtacaggtgttgggacacgtgtcgatgtctccataaatgtatatattttttatttttgatgaagaacaggtctagtactttttgatttctttggattaatctcgaaagttcaatcaaaacggtgcgtatttgtcctatggtggggtggaccatgcattgtattgtattatgtactctcaccaaatttttttttttttaaagattaattatgatttttttctataaaaatttttatattactaaattatattttgaaattttattaattaatgatttttttttttaattattgagatggttagatttaaagatttttatctaattttattatttatgtactaaatatacttcctacactttaatgtctattaaattatacttcaatttgacatatattaaatcatgcattatgaacttttattttatgttagacattttttattaaaattaaataaaaatctttaaattcaattattttaataatttttaaaaaaattaaagactataaaaattcaaagtacataatatcaacctatttactttgttattgtagatataaactctttatttaatttataataacaagtattttcactcaaacaaaaaaaataatatcaaaattcaaagctaaaaattctaattagctttataaggcatatggatccacgtagagaccaaaaagaataatcatctcttcttagaaaaaaaaaaaaaaa

SEQ ID NO: 65895 - DNA, 631 bp, Cannabis sativa
  modified_base (230)..(238): a, c, t, g, unknown or other
tatataacataagcatattctcttaatttgcctcatcattctttatgaaaatctcattataaataataattcttatattatcattaaaaaaataaaaaaattgtgactaattataagtaataattctgactaaatctatgacactaaaagtattagttacaaaaaattataatttattatgattaaatatattattagtcacaatacttattgtgactaaaattaaattnnnnnnnnnttgtatctaaatactatatttaagtcacaagtaattttttttttttataattaaaagtcacatttagtcacaaaaaatttatgttatagctaaaaaattgtcactaatttttttttaggtagtgtaagtacgtataaatgtacataattcagcaaaatatatacagtatttatatataaataaaagtatgtgtttgaatatggtggcatagatatattattataagtaacaatttttcattgctttttaaacaaagtaacaattttattgaaaataaaaaacgaaaacagattttgtgatgcaaagaatacattcgtggcacgccaacaagctttttttttttttttttgggtaaatatcattttggagtctgtgttttgtaaaagttatcaa

SEQ ID NO: 65896 - DNA, 1113 bp, Cannabis sativa
aaaaacacatttagtcacaacaaactgtaatttttgtgactaatagtcacggaccttttagtcacaacataaatttttatgataattataattagtcataataagtttcattataactaaaaataaaaatttttgtagtacaatgaagacatacaattcttttgtcttagtttctttcctttctttgttcttactcatgtctagacgatacaatgtgttcattggttttcttattattattttttttttttttaacagtactatggaagaaattaatttgcttaattaataattgatacctttcacctgatgaaaccaataagagaaacttcaagaaccaaaaacttccatagatggtgttagcagagaagatatagctgagaaaatagaagagatcattaaatagctggataaatcaatatatatattaatgaaagagcttcaatcattacaatagataaaaaaaaaaatattactcttactgaatatggaaaccgaagagaagcaaataactaccaacaacacaattagcagtcttatttgcacttagacttaacaaaattattaaattgagattagtaaggagtgaagctagctcaataagctgggtaaaaatggatattaatacaacttcacaccaaaaaaaatacaatatatataaattgcagccctatcaataatgtgtaggtaaattttgaatgggtctgtctagctattcaattgtattaaaatttagtaccgaccttatttaatgtgtttcaacggcatgaaaatgatctccattacagcatatgaatcacattttcgatcttgtgtatttttcttaattgtattctttttttgaaagccaatttttagttatttgaaaaagaaaaaaaaaacaaatgtaataataccatttatctaattaaagtttaggactaaaacttacagaatttgaaaaaaaaaaaaactcttcaatataaataaaaaagtcattactatatatattttttaaaaaaaggttcttagataaggctgatatacattttttaaaaaaaggattatttcataattacacaaaaataataaaaaaaaaattacaaaaatacagttttacggaattttaaatat

SEQ ID NO: 65897 - DNA, 922 bp, Cannabis sativa
ttttactgatgtaatagacttggtattgtatgctgttctcttctttgattagcacggcactaacagcatgctccctgacagctaagtatattccaagttcttctccgtctagaggttttgagagtacggggggttttgcaagttgtgcttttagcttttggaaagttttttcacattcctccatccactcgaatttcttgtttcctcgcagaatattgaagaataagacacacttgtctgttgattttgaaataaatctactgagtgcggcgatctgacctgtcaaacttggcacttccttagtttttgttggcgacttcatatacaggagggcttgaatcttctctggattggcttcacttccccgggcattgacaatgaagcccagaaactttctcgagctaactccaaaggagcactttaagggatttagtttcatattgtactttctgaggaccttgaagcattcgtccaggtcatgtatgtgccccctagccttcctggatttgacgagcatgtcatccacatacacttccatattttgcccgatctggtctttacgggatttgcgacccaagctaggtagaaagattcaattatgaaattattgttgtgtagcattctacttcttcttttagggctagtgcttgctctttgcccaatagcttttgcttttgttgaactggctagaaattgggatcaatattcaatacgtgcgaaatgatagaaggatcaattacgaccatatccgcatgcaaccaggcaaaaacgtctaggtttgctccctgaaattttatcaattctgattttacttcgagcaacaaaccttttccgatctttagctttctggctgggacatctagatcgatctcgatctcttccaactcttcggcaagtccaacattgctgcttgggtccccaa

SEQ ID NO: 65898 - DNA, 685 bp, Cannabis sativa
aatgtgtaagtctcctcttctaaatatttgtcgttcaaacacacattatgacttgaaacttgcatatttttttctcaacatctattaaggttaatatgtattttaaaaaatgaatttatgaagattttttaaagcataacatgattttgtcatttttcatgtgagagatagataaattttgagcaattttttatttgtataaaattattttaaatatatataaaaaaataatgtatttctttttgagaagaaataaaaaaaaacaagggagaaaatttcgaatggcttaatttgtgggctatgaaaattaatgttcttttgtactcagtggcgattgtgatcattgaggcgcatcgagatgttgtgattgaaatacactggttctcaatggtgttgagctctggtctaagcaacttcagtgctattgaatgttgaaccattaattattggagatccttgcagcaccaacagtagtcatgttagcattaaacggaggaaactgctctgataccatgttgaagttacgagccattgacaaagaacaaatgcagaaagtaaagaagaagaaggaagagaaagaattgagaaagaaacagagaaaaagatatggagaagaaaaggaaagatctcattgaatgaagcttagtacatattatatatacaacatgagaacaatacaaactaa

SEQ ID NO: 65899 - DNA, 833 bp, Cannabis sativa
gcactaccatagaaaatggctaccttcagtattgtgtgataatatccaattgtgggatcaaattgaaaaatgcgaaaaaataaaaatcttgccaatgtatgataattattttcaatgcacacacttatgtctgacaagtgaatacaagtgtatacgcctcctctgcttaaataaaaataaaaattatccagattcacattatttgtaacttgtctattttctctcaacatttgttaagtgtgattggtatttgagatactaattaattatcctattttgaaagcataacatgtgtatttgtctctttttatgaaatttgattagttgcttgctctagaataacttattttttttttgtttattcgaatttttacaaaaaaaaaagggagggaggcgcttgtgacttgacttgtgggctaaggaaatttagtcattgttttgtttggtaagtatcaatattttttctaatttgtttattatgatgagtttccttttaacgtttgatatcttattcaacgtattttgattatttattgatcttgaatgattttttttttatcttaattggcctattttttgtgagaatctttgtttattcttatttcttttatccattttagagtttttttctttaaatattattaagggaaaaagagtggggcggttctctctttgttaatgggcaagacagttttttttgtttccttttaaattggtttcctttttgctcctctttcatatctttatttaaaccaattcttttgtcatttaatctcaccattttctcttctatccgatccctgttctcctcggtatcttgtctctttgttttt

SEQ ID NO: 65900 - DNA, 819 bp, Cannabis sativa
aatattaattaattactatataaacaatattaagtttttacacaaatactaaatattttgtagaataaaataataaaaatttatatgtaattattatattatattcaaagaaaccatagatatataaatatatagtataattactagactcgcttacatgggcaaacctacatgcagattaagtgggggtggtcgccccatgtaaaatttgactcggttctaagttatttagggcttaaatttaagtaacttttggagcctttatataaatattaacttgtattgtttaatttattggtaaatctatgtttaaagtttaagctggtcacaaacttaaaattccttatcttaactttactttttgtattatttttgggatttaaagtaaaattaatttaaaatataattattattttatgttttatatagtcaattctataatttttattaaatattaaagtccacataactaaggataaatattgttattaagtactataatatctttagtaccattatgaggtgattttttataaataatttttggttttcaataattattattaaaagtaaaataagtatgattcgataagaaatttcccttaacattttactataaaaataaataatcctcctacttaaattttatttttagcttggttcctgctcacttacacgccctataagtagcctcttatctcattataattaatatagttgaagaaacaaataaaaaacgacccacaaaaatggccaacttgatcattgatgtgtcatgtgtgtatgttttgaaatgatatatatcagataatattatta

SEQ ID NO: 65901 - DNA, 840 bp, Cannabis sativa
gatctaatctttgtttattttatttgttgaaccataacagggagtgctcggtatcaaggttaagatcatgctcgactgggatcccaagggcaagcaaggcccaacaacaccgttgccggatgtgatcaccatccatcctccaaaagacgatgagtacattccttcagttgaggttgctgccgacattgatatcgttgaggttccaccaccagtagtagtcgcctaaactttatttctcgaagaaaaaaccgattcttgtatttgttttatgtaggttttgctgaagcatagtttccccaccattgcagaagattattaggttttaaagataatactcatgtttcagtaaatacattagctttggttttgttaactctatttttctagtatttattggtgattttaaattttgggccatgcccattttttttttctttttataaaaatattctatccttattttcaattgaagttttctattgtctagatagaacatatttgtagcattgaagagagaaataatcaattcattgctatatctattttttttagcctattcataaaatttaactttaatagtattggcttaaagaaaatatggtatggaataaattttacaccacaattaatttatttttttgttacttgttaatgtttagaatttttttcaaaatacgtactagtttaggaagcaatcaagaggtaaggggactaatgctgtaggacactcgccatgtgtactaagagaaagatacgcgaggactaatgagatgtgacatgtcacttaaggacaaggaccaaaacgaacattgtatatgtatttaatgcgacatgagaaaa

SEQ ID NO: 65902 - DNA, 858 bp, Cannabis sativa
gaaacagttgtcaaatgaaaagatatctttaaaagtagctataaattgagtaaaagatttattgctcactccattttttactttgatgttgtaaaactttattattgttgctaattttagttttttacaaccatcgaacaagattttatctgcatcacttagaaaattatcgaatctttcaagatcattaagaaattcctcatgtgcttcatcaagcaagtccattggatgatcatcgaaattattatcttcaatatcatctactcccacttccctaataaatatggatcatcagctaaatatttgccatgccaatactaagtagtataacttctattgaaacttgttaaatacacataatccttaatcatcgtaacgtttcctttgatctattataataatctacacaaggacaatgaatacattcagaatttctagaattcgttaggaaaaactctgtaaatgcatcgaaacctacttgaaatcccagtgtgtctatctcctcatgcatccacgatttatctataacaaaaatcttaacaaaaaaaatctcactatttagtaactaattataactagttactacttacataatgtaactaactaacattctcacatctatttaatatttatatattactttaattcttattttagtttagatcatgtaattatattactcatttcaaatattgacatgataactagtaactaattgtaaatagttactagttatataagttgtaattaaataagtagtttcttacaaccaactagtaattaattaagtatttgtgttatgtgtaaaactttttctttaatatttatgcatttttagtaaaatttatcataattcta

SEQ ID NO: 65903 - DNA, 996 bp, Cannabis sativa
gattctcttatgtaagggtactttaggtacaatacatataaaaagaggtatgtttcaattaaatataaaattagaggtaaatttgatcaattgattaataaaagtagtatttttcaacttgcccctttatttttagtcattggatcattattaaacggttgtaattaatttaaaaattaaataaaaataattaataaattactcgtaacttgctactaacctgatttatttatttctttataaataaaaaataaaaattagttatgaaaaatatcttattaaatattttaactaaaaaattaatttattttaaatatataattaatttaagtttaaaaatagaattttatctattagtaacctgttatagcaggttataaaaatgtaaccattaacctaaataaatatatatttataaatatttatgttttttttaaaaaaaaatatacatatataataaaatccatgtgtttatatgtaatagggtctagttatattaagacaagatcataatgtctattccaatttaattttactataactttttaattaatgataatattatggagaaacatgatttacgtgactttttccactctataaattatatatacgtatctctctatatatactgtatacacattaatttaaatacatatagtacttgattttttatggctataactataagcctagaaattaataattcatcaagttgtatgttttatgcttgagaaatgctaaaagctttagtgtttattatttttttatgtgttaatattgttgaagatatttatagtaaaacttttttaacatttgcaattattacacatatgattttaaaaaaagaaagtagcggtaaaagtagtttattttacgattttgttatagtcatactctttttagttgttaagtgtcaattaagctcgttaagtgccagcttaaaaacacgtggcaatatatttctttaatttatttagtatatagtctaataat

SEQ ID NO: 65904 - DNA, 711 bp, Cannabis sativa
  modified_base (54)..(56): a, c, t, g, unknown or other
  modified_base (654)..(658): a, c, t, g, unknown or other
cacgggccgcctatttggacaccaaggtttgctcatgttacaaaatacccaaannnggtgcttggtgcaagacttgactaatgatcaagcaccaaggcatgctcatattgcaaaatggccaaattgtgggtgtgcaggcagcacgccacacattgcatacccttacgcgcgcgaatgtgggctggtgtgcgtgggagaaggctgcacgcagcctctgttggcctagcaagctcggcatgagcagaccttcaaacaaggccttgttcgagtacctcagttaggcactcttctgaagatacgtgcttactgagtgaagggcctggtccgcgcacacgtgtagtgccaactttcaaatattttcatccaaattcaaaaaatcattactaattcataaaaaatccaaattgagttctgtaaaagcttaaatttattattttccatctactttccaaaaaaaaatacttttagaacgaaaccaaaaatatttatcatcgtagaattgcaatttccatacaatcatcaaatatgcatataaaccaacatgaatgcatccaaatcaacataaacattgttttaaatctatattttatgaaggtaaatcattacgatggttttgataccagttgttagggattattttaccaggatctagannnnntaccatgtatgttgtttaacatcgtaaagatgaatttttaaaataatggaatt

SEQ ID NO: 65905 - DNA, 942 bp, Cannabis sativa
ttaatcaccaatactatcaaacaccactatccaatattccacaacaatatttatctttaatatcacacaatccacaatcaatcttcctcaattcaccgaaatatagtgagaaagaatacttacctgtagaataaaagctttgtaaaccttgaagtagtcctcctccaccaagaattcccaaaaattaagtgatgaacacaatggattaggtatttttaggctttgtgattttctgaaaatttttggatgatttgggtgaatgtgggcaataaattaataaattgatgagtgagttttatttattggtgattagaattgacattggatgaagaaatttgggttgaaaaggttgagaatgatgaaatttttgtttgagaggggtaggcctgtgtagaagaagaggaagaatgagaagtttttgaaaaaaaaattggaatggcatgattcaatacatctctgcctggttttagggggtgtatgccgtggcttggtaatcatatgtcgcggcccgtgtaaaaaaaatttcccctttatttatgcgattcaacataggtgtcgcagcataaggtttccatatcgcgattcatgttggttttttctctgtgatattttttttaacaatttttttttctttctaaagctacaggtgtggcggcatagagattctatgcctaggcccgtgtgtaatcaacttctcctcttgcttactgcctattttttccactcgcatgcctaggcattgaattttaatgcctgggcactactattttattttatttttttaaattaactagtttttacgattttcatggttccacatattttttttttctaaaacaaattctaaaatcaaaataaaaatttactaaaaactaaaaactaacaaaaataaaaattgtaattgtctctaaaaaattacaatagaaattaaaaataaaattt

SEQ ID NO: 65906 - DNA, 971 bp, Cannabis sativa
gtgatcgttcctctactccagaacccgaactgcaacaccacttctataccaagcagatcatacgagaaggttatggtcactttatttgggaaataaagaagggttgcagacgttatcttccgtccaactggacgtatattgtccgaccaggtgttgctgatacccttcccgtaggccatccaagttctggtaactttggtattccaatagttgtccctaccgttactgttgcacggcatacgaaccaatattcgtccaagagaaggatgatggcccgcacaaagcagatgatacagaaagttaatgcatctaaccctcacgtggcccagcatgccactctgccaagtgccgagaaagatatgcccactgtggaggagaaggattatgagggggacattgaggtccaagagatagaggagcagaacgatgtccgtcctgatagcccttctaaagctgaggaggaaagagtggtcgggcctccacactttgggggatataatgaagctaggaagccgatatccaagtagggtgacgttttggtcgagggagaagactatgtcaccgaggagtttaccacgacggtcccccacagaggcaaagtgccttaggggtcagatgggtgtgcccttcatccaacataactgagggctatttgagggacctggataaggctggatacctgtgcggacttgagtgttatctcacttccccaaatcaccgagaaactaacccaaagaaagggttctgtgcctggtcgggtgctcacactaagcaaggggcgatccttcctttgcactcgtacttcaagagggttgcagattatttctgcctctgtccgacccagttcacacccaagggcatcaagtacttatcttccgtattcgttctatacgccactcatggatggggtgtgccgtccccgcacgacatcaactagatttttcatttgaagtctacccttaagaagagca

SEQ ID NO: 65907 - DNA, 1491 bp, Cannabis sativa
aacatatcttgggctaacaataatgctaaacaaaagaaactttcctttatttccaatcataatatagctaaaacatgctttgagattattcatatagatatatgggggtcatatcatactatgacacaagatggtttcaaatattttctcactatagttgatgattgttctagatacacttggattcatttacttaagcacaaattgaagctaaatctgtcatgcctccctttattaaactggtgcaaactcagtacaatgctacaataaaaggttttaggtctgacaatgctaaggagcttcaatttgtggatttgtttaaatccttgggtattgttcattatcatgcttgtgtgcaaagaccacaaaattctgttgtggaaagaaaacatcaacacctcctaaatgtctctagagcccttttatttcaatcctatattcccttgatttaatggggtgagtgtgttagtatggccacttatttcattgatagaattccaacaccaaatttaggcagcaagtccccatttgaaattctaaataataaaccaccagcatataaccatctcaaaccttttgggtgtcttgcctatgcctctacgtacattaagccaaaactgatcttagttttctcctagagctgtgtcatgtatttttctaggatatcccatgggaatgaaagcttattgattgctcaatcttgaaagaaatactatttttgctctagagatgttcaatttcaagaatacattttcccttttgtcactaatgaagggctgcctgctcattatgaacattttttcatactgttcctagtattttttatgctcctggttcatctcaggaccttattattgatgttcctgaacctgatccacctcccaatccacctattacacaggtttgtgaccctgttatgcactagaattcaattccttcaactgctgcaccagatactaaaaatccttccccatccacttatgcacctgtcacttcctcctctcgacccattagaccgattagaaaaccctcttatcttcaagattaccattgtttcttaactaatcagtcttcttatgtgaattcatgtcataattctaacagtactatccattgcttatctcaggttcttgattactccaagttgtctcccaccttcaaggcttttatttgctctatctcaagtcattatgagcctcaatattatcatgaagctgctggtattcctgattgggacaatgcaatggacattgagattgaggctcttgaaaagaatggtgcttggactattgttagtctaccagcccatatcaacatgctattgggtgtaaatgggtttacaaaatcaaatacaatgctgatgggtctgtggaaagattcaaggctaggttggttgccaagggctacaaccaataagaaggtattgactgctctaagacttttgcccctatcacaaagtttgtcacagtcaagctaatcttggccttagct

SEQ ID NO: 65908 - DNA, 1778 bp, Cannabis sativa
catcaatagtccacctatcgacctctgctcaccaacgatatattcgatgactggcgacccacacatccagcaaccgacgactcaaatgaaccttgaatatgagattttcaccactaaaaccctgaaggatcgaacacatttcatcacagttggagatctagaaactagtttctcaaactgaaaaactagtttcataataaacaaattttatatgaattttggtattcgtaactagtttctttattacgaaactagttataactacatgaaagtatctgatttcttaatttattgccttaataatattatttttaacttgttttttcatcaaaaaattggttttttttatatgagaaaatcaggaaactggttttgattatatagaagtaaaatttgtatatgaagttttaagttttttatagtattccttctacctatatgatgatttatcctatatttttaagtttttttttttttttttaataaaatgacatatttaatgaaattaaatttgggtgccatatatttatttatgtatatcaaaactttttttctcacttttttttttttttgtaaatagccatttttttaagagcatctctaaaggcaagtttaatggagttggtgttggaaattgcttgttgggggtggggtcaagggagagtgatgtggatgagagaggtcgattcgtgaagaaattgtagcagagtagctactgagtagatatggtgctctgcccttttcttttgttttttttaaaatattttttttttttgattgaataagagctgataatggatccacttaagcaataataaaaattgatccattgttaatttatatattagaggaaaattataaaataattaatttttaggaggtaaattattaaatactatttaattattcatatgtgaaaacatacatataaaattgtatgtaaaataatttgtatggagggctacactcccttagtctcatgagtggctccatcaatatctataatcatttccaataaaagatttaaatttttttttatatttagttacaaaaaataatttcgtaatatattcgtatcaaattttagtattatgctttaatgtataattgtaaatttcgatataaaatttaatatttaaataatattttaattgaaataaaaaagattaataactttatcattaatatcgaacaaagtccattacacgtaaatattgtcaggcgaaggccatcgccgaagagcgatgggtacttagctcttttctgaattcctgcatagtgaaacgttaaaagaaccactattgaagagtacaagttggttagtgagagtacttactgagttgttctctattctagtattttggtagaagagccaactctaagttgtcgttgtactccccaagcttgtatgcacctttatggttatcttgtaacttggtacagacctttttcaatttgatccaaacatgattgctacaggatctttgttatcaaagaatattctttaaagcactatgtctgttatgaataattttctcttcttgacttgtttgttgaagtacttggtaatgctggtagacacaccgctttaagttggcttggtctcttctttcttcccttttgtcaagggattttgctagcaatatatggtttacttcttggtcatagtagaccaaaagtatgagagcaggctgctggtggatgaggcctgccaaattacaaacccggtgcccgaccaggctaagggagcatcgtttggccagttggatgaggctatg

SEQ ID NO: 65909 - DNA, 740 bp, Cannabis sativa
cagtttttaagatttaaataggactttttaattaataaagggtatgatcgtattttttcttttaaaagaaaatgcatgcttcattttggtggttcagtacttcgagaaaaaatattatgcatttcaacatttattgatctgaccctttttttcctaatagttatcatccgttcagtcatcactacgatcgaatggtttccattgttggatataaggttagcattttccccatgttttgccattaccgttttacattacatagaattcaaattccaatccttattttctctgaaattttattccctctttatctctcacatacttccttcgagtttttgccagttttttctttcagccacagcatcgtcacgaaccaattcctcggcattagaagttctcagtggggaattcttcgagactttttttcttccagcaaaccagtaagtgtatttccaccattgttctttttattattcattctttttttattgtttttcatatatctttcgttaatttcttgtatgggattgtctttatatggattttcaacaacttaaggctataactttagggttacataattcacaagtcctgagtttttatgttctatatttccagagttttgaggtattttttttcttttaatcaagataatgtctcattttgatcaagattacgaatacccagaccttgtaaaattcgataatccccaattccaagttattatttttaaacctcaa

SEQ ID NO: 65910 - DNA, 1509 bp, Cannabis sativa
catgtagtcaacaaaaataaaaattcgtactattattaaatttctttttttatatatatatagttatttaaattctatttttttagaattaccttttttttaatccgtttaaattttgtaaggacacattttacatccaaactaaatttaaaatgggaaatttataaaaattactatttttgataaaaaaattactgttacatttaatttttttatatatatttttacaatgtttataaaaataactcaacaataacaagaaaatcatataaaaataacaaaaaaacagcatccaaacaacactaaaacaacataaaaaaaaatatacatacaattaacttaaaaaaaaacaacacaataaaataacaagagtacaacataagaatacatcaaagaccgtattttatgtaaatgaaattttaaaaattataaaaatatttaaaattttgtaaaatcgtatttttataatttttttttttgttattttggtgtatttttaaaataatcccttagaaatataccaaggtcaaaatttaggaaactaaaattgaaatatgagtttccaaaacttttaacatgtaactttggactataataaaaataaaaaaggtttagatttgggatctttgtctccacacccaatgttttggttattattaaagctgggcttctcaactaaaatgtaatattacaaaaccaattttgtgacaccaattttggaaaaattaataggttgaaaacactttttaggggaccaagtttttcttgttcattttataaagcccatttataaagattacttcatgaataaagtaaaaatgtgtgaccccaaatctaaaatctccaaatttgagcttagaactattactttctctctctcttttttttttctctttcaaaaataataataaaataaataaataatgaatttcacaaaaacaaagatgaaagcaaaattggtgattccaaagccttttgagaaccaacaaaagagaatccctctatcacaaaaaatggatggctcaaattttaccaacccattaataataatgaaataaatatatacacatatttctatacataaatatataaactttacctttctcaatctttcattatttatttttgcaggtaaagttaaaaagagcagaagaacaaacagaaaggaatagttgttgtatggttttgtttgaaaggttttctattgaaattttttcaatactctcatatagtcatatcatatcatatcataagagagagaagagtaaaagctaatccttttggcatcaacttaataatttttatttttttgaaaaggaaattaagatttttcttaggtaagcagatttcctttttagaacatttcaaaaataaataacatattttatattttttaaatgacctttttagccctagtgacatgcaaagaagaatttagtagtgataatctatttatataaatatgtagggtaaattgcggcataaatactcaatgttttagattttata

SEQ ID NO: 65911 - DNA, 715 bp, Cannabis sativa
tttatttcttcaaagtgattcaagggaaatgtaaagtagcggagcaattagaggggccaaactatattataaatttaggtaataaatattttgaaaagactttattaaatgagatatttttgacaaaactcgttttatatttgtatttattacacatatgaccctaataaaaaaagtgacagaaaaagtactttattttacgactttattgtaaccgtaccttttagttacaactaagtccgttaagtaccaacttagaaacacctgataatattttattgggcaatttattaaataaaaaaaaactttaacatttttctctaatttatttattagggtcatatgcgtaacaactgcaaatacaaaacgtttttcttacatattacaaaagtcattaataagtgaatttatgctaaaatttttggcgacttctctttcaatatatactagcaaataatcatttaaaagtccatttcatcttgttgttgagttagccttcactatattcatagttaaaaaagatcactttgtgacagctatatagaaatgataatttgtgctgagtaatttgtggtatttatattacacttagtagctactaagtcttaaccccatgataaaatttgaataatttatggtgtttacattatattttatatataagaatattttttatttaaggaaatatatttctatttaaagaaataaatttcta

SEQ ID NO: 65912 - DNA, 1169 bp, Cannabis sativa
gaacataactttattaaattctaagttctaatagaaatatccccaaaataaaaaaaaaatcaaagtgttatatggcttaatatgcaatatataaatttctataaatatcattgtggagcaaaagtatttccttgcctcacacttaacttcaatatgttgaatttttacattagtcttatgttagttggttcctaaagcttatgtcaataaagttagttgttatgttcaacatattcttaattattgttaatattaaaaataaagtttaaaatagtataatgtacacacaaataaaacaatatgcatgtaaatgactgtttgaagtactataaattatttcaaaatttctcattgaaaaaaaaaaaaaagaaagaaaacaatttaaaatataccaaaattagatatgaccgtaggagtttaattataattgtttttataattgattaagatttttaagggaaaacaaaaaaattgaaactttaagaataaaatatagaaacttttattaaagtttttaggaaaatgacacaaaatataagataacaacacataagtcactcttatctcaaaaaagaaaaaaaaaaaaccacataagtgagcatagtgagcatagtaagctgaagaatagcaacactgctccgcctttgcatttttgcttgattgaagcctataaatgtagcagtcatttttagtgttgaaaaagttgaaggcagtaaaaaatttagacagtaaaatcaagcagtttaaagaaaataataagtacctcttttcatgcttttgaacctctgatgctagggctattaacgaatcatgtacattatcgtgattaagtgaaacccactgctgcatttgcgctaacccagcaaatgtgttttttttagaaactttaagaataaaatatagaaacttctattaaagtttttaggaaaatgacacaaaatatcagataacaacacataagtcgctcatcccctgttgatcgtcatcatcacgaactgctccgaattcgagtacttccactgatacggtgtcgtttcagttgctgctttccgagtcgcctctgagttgaatatgtagctcagccgcgttgatttctgactcggagaaaattgacgtagaagagagcaacgacgaggaagaagaagaagaggaggacgagtactctccgc

SEQ ID NO: 65913 - DNA, 568 bp, Cannabis sativa
caaacctgtaatgacatataggggtagtatgtgcataccgcatacaaacttggcagttgcacaaagggcgatttggattgagattaggaggtcgagagtaattaggataattagatcctctgccattgaatcctgaagagtgatctttagcaccgcctttgccattatagtgatcttgaccacttcctctgcaagtattaccataagatcgataatttccttgtcttgagccaagagtgagattagcagacatctttgttgaaagatccattatagatgtgtgacgctccaattaagtttcatgagacattagtagcgcctgaacttcgttaagagacaaattgtcacttcgagaagtaatgttagaaacaacagggtcgaactctggtccaaggccattcaacatatgcaaggtccaatcgaagtcagtgatgggatgaccaactacagctaacgaataacaaagggatttgatcttatcagcatagtcagagatcgagcgagtacctttttgaatgttagaaagctcacctttgactttgaattaaagcaaacaaaccttgtatta

SEQ ID NO: 65914 - DNA, 687 bp, Cannabis sativa
gttactactttaaaattaacacaaaagttaatacattttttataatatactaaaaagatattttcagcataatataatataataaccgtaaattataaaaaaacctaaaaaatatttattaattagtataataaccgcgtgaagcgcaattatgttgcctagttttattatattagaatatacttttatattgaagtgttattttctgatgttttatcttttatgaattgaattttattatattaaaatacatttatattgaagtcttatatgcattaattatattaatagtaggtttaaaacaatatattaaagatacgcagtaatgaatattgttttaaatgcactataataaatagatgttgttataataataattattattattatttcacatatatatacttttatcttattcgattgatatatattatataatatataataaattttataaattatattttttattaaatttttctatttgtgacactaaagtttatagcttttaagttaataaatcttaaaaataatagaatttgttgacctcgcttttagccaacaacagtgaatctaatttgataatcgacaagtagttgataacgattgaaagataataaagcaatataaagacacatgaattttatagaggttcagccccgaacagttcggtaatagcctaatcct

SEQ ID NO: 65915 - DNA, 693 bp, Cannabis sativa
ccagccgttatcttaacgggagcaattttttattttttttaataggacattaatgaaaaatattagttttgttggaaaaaagattacaaattttatagaaataaaaaataaaaatattagtttttgtatcattgactctcaaatactatgaaccgtaacaagcaagtcatgttcggctttcttaaggagaagatgaggaagcggatcgaagggtgggataggttaggtgtcgagcttgggtgtacccatgacccgctagggtttttgtgtaaactaagcccactattgaggcaaatacgtgaaatacatgactgtaggcccactagcagagttctggctcgtggaacaaagacatccgtacgtctggggaccacgcaaactaggacagatgtcctactggcatcgcacatgtgtattgtggtgtcaacgacatgttgttggacaaagggaaggttttcctttcggtggtgagcgcactatcatgctctaacacaagggacaagtcctgattcggtgggaacaagcatcagaaggcagtcatgtcaccctatactaggcttttgagacgcctattggaataccctctgcatatgtgctcctacgttcattcagacggcttcttttattccacctcgagaaggcaggagaccttggattcggataagcctcgatctagaggcgagtcttctgagc

SEQ ID NO: 65916 - DNA, 716 bp, Cannabis sativa
atcccatagttttagtaaatcggttagggttaaggaaataggttttgttttctttaagttaacggttccgttaacttcacgttaactttcaattttcaaaataaaaaaaaaaaaaaaaaaagaatcgttaaagaaaatcgttaaactaacaaaaaaaatcgttaaactaacaaataacgttagatagacactttttatatataaagatatatatttgctaaagaacgtgctattatatttggctaaggttgtttacctgttattacataagagaggctttctaatatgaatttataagaatgttttttttttttttttttttaaaaaaacgttaaattgtggttaaactattgaatattttttaaaatgctgtacttttatacttaatattgtttggtgataaatataactaatgctgtcaaagtattgcacttttatactcatatatataataggttgatgttaagtacaatgtacgtataattagttatttttaattaggtttagggtaaatagtggcataagtacccaaagttttaggtttgtaagcggcataaacctaatgatttttttttagtggcataagtacccaatgtttataaaactgtaatttttttttctagtttcatcggtacagactctgttattgtcttaaacaggacacatataagacccaaattttagattatttggtctggacgaaaaatatgtagtat

SEQ ID NO: 65917 - DNA, 716 bp, Cannabis sativa
atgacaagctcatggccatttgcattatagaaatgagcaatttcttaccattagccacagcaactgtttcttgaccagtgaagggggtaacagactcaagattgtctaaagagtcagcaatatggttggttgcacccgaatcaacataccatccaacatcatcaccaaaatcaggtacagattgagcaagaaaggcctgaggatcataatcgagggactgttcagtgaggttggcttgaggttgagcaattgaagcctttggtgtgatccaatttctatcaaaccgatagtggcaggtgacaacagtatgcccaaatttcatgcaaacttgacataaaggtctgttattgttggtaggtcgaggtccattgtcacggtttgagaatcttgatgaatttttagcaccttgtcccctccctgagccattaaagggtttgtactgacactgaccattccttgtaccaatagtaagatttgctgtcatttttgccgagagatccaagacagcagagtgtctttcaagtcttgactcatgggacatcaagagagcttggacttctattatatttgtttaaaaattgatcgatgttaatgcagaaaatcatatacaaatttcatgaaaatcaatgatgaagaattgttttttttttctaaaagaaaagaaataaaatttcaaattctattacgaaagaagagctcttaccaatattgacacc

SEQ ID NO: 65918 - DNA, 3637 bp, Cannabis sativa
tatattaaacctataatcatgcataaaacatgtgaacaaagcatatgacaaggtcaagatatgatttccgatctttattgaaagtaaataagattacaatgaaattgggttttatttagggcataaaatcccaacaatggaaacatattctaattttagtatgtgggtgtaaccattcagtgtgcagttatatggttccccatgggcaaagaagattatgtcatctcagtcaatgaagctgtcatactctctgaagttagggaaagacatagtcgcaaaatgatccactctaacagtatctagagatggctctaggttactaggactcataataatttcatataccctgtctatatagtccttcatgggttactttaagatgatctaagtctagaaaatagctatcgaatcccccttggtccatctaggacatacgatggagactgggggtacagaatacacacacacacacaggaggtagagccttggctttcccttttcccttagattttacggctacctcggatggagcagcctccagattagcctccagggtaatgtcatgttgaagttccccggcagaagcctctattggaacttcttcagtggccacctcctctgcaagagaaattgttggattctcttcaatatacactgtctcaaggtgaaattcctcattcaaatcaatcattggaaaaatgaaaagaaaagagaaaccaagcaattagacacctaacatccaaatgaaaatatgggcatcgatgaaactctcccctaaaatttcttgaagaggtccccaccggacacatcactcctagaagcctgtccctaccaggagactcaaagtgacaaattgggaaaccatgggaaaattactagaacaagttttaagcaaattctagaaatcaactccatttgaagtcctaacaactccaaatagacgtatagaagatggacggatttaacactcacttgaaagttcatcttgctggttcaaaccctaattttagaatcctacgtacatgcaaaagtttataaggttaaaatttccataccctaattgtccaaacagtatcagcactcccttggcaagaaaatttcaacataacctatcctagaaatgtaactctatgggcatcattttgccattcacatgtgtcatatatcctaaacctagcttgaactatacctttctatcctagatacaaaatagcaggattcaacaagcatccgaatacttacatggtatatgactaaaaaataaaagattattgtggaaatcttcccaggagttgtgtactcagtcaattacgcgatcaaagctaacctgaacgtcaaaatcctcatcgggctagggtggaatagtttgaggtttagtggctccatgtctagaaaacatgctaaataaaggtttaagaagtattggatcaggcagtcaaaagattcttgcattcaccgctgggaacgatagcaaggttaaagttttttagaattaggggcttatgtttgaagtttgaagacagaggttttgaaaattctgaagtaatgtaaaaagagagtgggttcgatgaatccatttatatttcggccaaatccttgcaatttgaaatgaatgatccagatcctttctccaaatagcatgatttgattcgaggatgggaagttaaaaagatggcatttaaaacttgctcattgcattcattttttatcattgtttgcctcaagttaagcatgcattaaagaagggtcatttcaatcgaccttccatcattgcaacttcttctgaaagacgtgccctctgcatgcgcgtgttatcaacagatgtattaaaggcgcaacatgcatgccatgcctgtagcaccattagttcttggtcctttaattgatgaccgctcaaggaatacattcgtgatctcagcaatcaccacgtgttttaaacttatctcagaaatttggaagaagactgcaagctcccacaacttgaagagtcccaaaagcttgggggtaaatgttattcatgttttcagatgggtgacacgtgacataaaaaggaaaagatattctcatgatctcactaatgaaaacctctcaattaaactaagtcacatagaagtttcactaatctaggaatagggcaagaccgagaggtatgtagagatccacctttccatactttagcttccttgacacggaagacttattaccactctgggacctggagtggtccaagctcaaaggttgcccaagtgatacctggacggataatcaaagggcctaacacggatgctgactgcctaaaaggatcgcagacgtctaccttggatataaacctggatcgcccaacgacggttatgctttttctaacacaggatgagatcctctcccctgtgccaggacatggtagtgcgcacacctcacacacctttttgccagatagttattccaggcatttacttttcaaggtcaaatattttggcgacacacgttcattatgtacaatggtcccctattgtccagctacttcagcgcacgagcacaaatccttccaagagggccaacaatcatctatttttgcatgtattttaccctattagtggaatttttacaaaaaccttaagcgggtcatgggcatgtccatacccgccctttagcctataaatacccttctattttcatacggaggggatcacaacctacatagacgaagctctactaatattattctaaggtttcatcttcttcaagagaaaaatagaatacggagttagagtttcctgcataaacacttgaaaaatatcatatacgcattctaaggctaataggccaacacacggactaaggttaattaatacttgaatcatgtaaaaatttccatctcatttactactgcattttattacttcttaagctcttaaataattagtttccaaaaaatttagtaaataattatcatttaaaatacatttaggtaatccgaacaattattttcgaaagtaatgagttgttatgtatataacaagatactattttatatactaattattttatataattttttattattttaaaatttaattagttatcgtataatatagtataattcaattaacaaaattttaaaatgaatgttcactaagatttaaaaaaattataaaacaataaatgatcattatattagtaactaaacaaatataactgtatatatatataactttattgaaacatatccaaacaaataaaaacgtaattgatacttgaccaagtcaattttaacaattagataaaaaataaggtgccaaatgtaaaattctttttttttttttgtttattgaaacatttataaagctttttttttcttctttcttctctttgtcttcttcttcatttatttttagctgactatctcgttttttttcttcctctctctctttctttctctctctctctctcatctctttttcttctcctctctctctctctctctacacacacatatataaatataataaatatactaatttatataaaatttttctaaaaaatttactctctcacaaaattttattttattattttttttaaaaaaaaaaaatatgaacacttattctatatctttttgaaaaatttacatggtata

SEQ ID NO: 65919 - DNA, 922 bp, Cannabis sativa
aggcccgtcaataaacagatcgaggaaagaaattcctcacaagagaattactccatgaagaatattcattgatagcaaatcccttgtagcaagcatgttcgcactaaactaaaaaggtttgcaccatgttacaagataacagtgaaggtgcatacaagtctggcgagtacaatgagaacttggacttggaacttctacacacacactgaaatagggaacaacttggtaagtattctcactagccaacgtgtcaattaagttcctctaatatttcatcgtgtaggaacccataaaagcgctagtacccactgccttattggcgtgttctcccaccgttgtgtaatggtggcctctgcttcgtaaagccacccaggggtagccgctatgtaatttcaaaagcggacaccaagttgtaagcttttattacacattagactgactgtgtctaaccacttgctcacaagactaacttgccaaagttactctttcaattccacatgcgtactatgcacaccacccaaaggaagaacccagacaaagtctatgaaacttggtgaatagtaagtgaccaagggacttacctgcatggttgcttgaagggtgcccataccgtacaacggatcgagctggcacaatgaacttatgcaaagaaattttaaggcttaaaataagctactaaacctgcctctaagtcgtgcaggcatactttggcttgacaaagtaaatctagacagccaggtcgatcatatgttcgtcatagattgctttaaggctaaataatagtagtgttcgaaatagagagcctatacaccaaagcaagaacatgaaagccaagaggcctaatctcagattggtttgcatgcatgaggccaaggccctactagaaccatatagtcaaaaaagacaaggatagagctcctat

SEQ ID NO: 65920 - DNA, 952 bp, Cannabis sativa
caatcttggacacagaatcggaattgaaccaggactgggacgagaacccaaacctgggactgtaacaggatccaaacctaaacccaaattgaacctaaacccataccgagacttggacccagactgggacctgtgacctgggacataaacaaagacagggacccggacctagacccagacctaagaactggggctggagctaggaacaaagaactaaactcggacccgggattctgaccccagacccaaaccttgacctaggacacacctcgagacttaggatccagtactcgatgcttggactcgacccgtaccccatgacttgaaagtagaactaaaaccagaagccgatctagacccaagaacaagaccaggaccaggaccaggatctggacccaaacccaaaactgtaactggaccagggcgccgactcggacagagacccacactcggattctgtgtctgggttcgggtctgggtctgggtctacgttggggtttgagtccttgttcgagtttaggtctaggtttgggtccaggtgtggatcctgacctggacccgaaaccatagctggaccaggacccagactccaccccagacctagacctgaaccgggaaccagacttggataccaacccagatctggactcggtgccgaccctagacccgaactaaaaaccaaacatggaaccagactcgggacaaagaaatggggccggaacctagaaccgcaccccagtctcggtcccgaacccaaactagtacctgggaccggggacctgaactagaacaagaccgggacatgtgagagggatctagatttgggactcagaccaggacccaaacccggaccaggaccaaaaccgggaccctgacccagactcgggacccaaaacgagaacctaaacaaggactgacagactaggaccctcgaacaagactaggatagtga

SEQ ID NO: 65921 - DNA, 1002 bp, Cannabis sativa
tatatataaatggggagttttatttgcatcctaaaaatttataaagacattttattttaatagattttattttatataaaatatatatttttagtttatgctattttttttttcaaaaaatggggattttttatttttatagcttttaaagtataagtttacaaaaatattactttttctaaaaaaaaagttattttatgggaaaatttttgaaaaaataaaaaaaaatcaattattttctatatttttcaactttttctttaattttccaataaaataacattttttttttttaaaaagccatatttttgcacaaaaatattaaaacccataaaatttataatttcatctaaaaaaattcttccttataatattttcaaaagatataccaagaaaataaaaaataaattatattttaaatattataaaaaaaaaattatgaaattttatcagaaaaaaaaattatacataatttaggaaaaaaattaggatataatataattaaaataggcaaagaaattaacacaaaataatgtgaaaaagatttttttttttaatattaagactaattttcttaaattaatttcagtttattttttttaatattagggtgcatttataattttgtgcggtggaaataaaattttcctataaatataaggcaagttacacaaatataatattataaataaaaatttaaaaaaaaattataaatttctcactttcaatttatgtttatatatatttgaaaaattataattaataaaataaatatgatattaaaaatgtatgtttcaaatatgattcaaaccgcgcaaagtaagattttatttccaagtttataaaatattctaagaacactcataacaagtaagttaaaatagataagaagcataaatttagctaaaaatgttcaaaatgccactacatcaagtgaggaataatatctcaaacttttaattcacaatttttattagctaaatgtagctcaatgaatagttg

SEQ ID NO: 65922 - DNA, 1059 bp, Cannabis sativa
cttgaacgctcaaaagcagtcgaggtgactctatcaatatccaccgtctttgcttcaaaaatgatctgatttctaacataccagtcaacaaactgaaaatggtgctgcaagtttaaaagatcaattttaataccccattttgattgaaaccaagttgcacgagcaatagtacaatctttgaacagatggatagtcgactcctcacagctacgatagcaaacacaaatattttcctgatgcaattttttttttttatgtttaaacatttttatatggtaatttgatcaaacattaaatattagtacatatatatttagatactagttaaagggtgctaattattttagattaaatttaatttcaaagaataacttgcattatgaaagtgcaacatttatagtgaagtaaaatttaaatattaacatttacatttgatgctttggcataacatgacaatgcacacaacaagaagtggaacaaagtagactataacaatatttagaaaccaatttcttatcaagcaacgacatcaaccccagtaagcctaagctagagagttctcttccaataacccaatttaaagttcaattgagccaatacaaccaaagtaaaagctacaaaccaatcaatgatcagtcattctacacattacaaacatgaaacataatttatgttgaggaaaataaaaaagttggaactcaaaacagaaaaatgatatttcaaaaggttgaaaaccatatttaacgaatgttgagcacctgcaaacatatgtcatttaatataagttccccttctttgaattatttgtgagcaggcacctttataatgtaataatgtaatataaactgtataataaaaatgggttagaactaaatccaataagaagactcagaggagaagcccaaaaaaatatttttccttctgaaaaaaattaaaaagaaaaatcattcagtcagagctttcataatttaaaaacagaggtacataatattatataattcaaaagaataaccgaaaaatagtggcttacttgcaatgtgagcaccaagaaaatcacaa

SEQ ID NO: 65923 - DNA, 1499 bp, Cannabis sativa
cactaggttatgcttaggggttatctgattcaattacaactcactgattcaattacaatcgatctaatagaattagatatacaattataattagattagatcggatgtaaagtctgaaaatttaattggattggattggatgtaaagtttaaaaatctaattggatcggatcagttgttggatgagacattgatctgttttaatggacaacttatatccaattatatttatatatatttatcttgttttaaaaagatatattaatttaattcttaatatacacacatgaaatcacgtaaaaacaaaactctaaatctaaaatatcacataccattttcctaaaagattaagcacaagagtgattaatttatatgatatgtgtattcaatgtattgaacttgtttatcaagacttatagtatgaatcttttgcataaaaatatgagtacaacctcgtatatatttgacacgtggacctacttcctaattgaaaaaggatgatgtgtcaataatgactccagtaaagctattctcccatgataagaactcgcgagaaagtgtgatttaggcatggtcacacactacgcatcaccatagtaaagtaaaagtaggatcaagagaagtttccataattcgcacatgtatgagttaacttatatgcgaggaccaagtgattctcccctgcgtcccacgtaaagatcgcatctctacaagtgctaggtccgaatgactaaagtgcgccacaactcatcttgaacccgtaagatttgtcagtacatgaatgtccaatatatgatcagtatagtcgcagacgttctatctcataaatgacctcgagattttagtctcgagactttatatgcgagtaataccaaagaacccacaagttcacatgttactcaagaaagtgaacattcagtatgcgactctcaacgtcgcatacattcgagtattaactaagaacgatcgaaattattctctcatttattctgtaaatattttatatcttaattaagtgtaattaatattgtgacggtcctgtctggtcggttatgtaacccaaatgatcacttgctttctatataaatgagtgattcaactcgaaataaaagcttacaaacactcttaataaagtagactaagcagaccaagttttgactaaaccactataatatactatctctccctttacatatacgatgttgttgctttattattcgctattttactttgagttatcgtcattctaggtgaatactataagtgaagtattcttgtttatctcgaatactcgcaatttttagtgttgtttattttcttccaacatttgacgctaaaaggaggggatctagtattatatactgtgattctagagaaagatcacaatagctacgaactaaaataacaacaataatgtcaacgtcaacaataatggtgcaattgacaaccatacaagagtagatgtgagccttgcaggctgaggttgcaggaatttccgcg

SEQ ID NO: 65924 - DNA, 1190 bp, Cannabis sativa
  modified_base (833)..(834): a, c, t, g, unknown or other
  modified_base (1153)..(1158): a, c, t, g, unknown or other
ttacgttttttccaaacatcctttaatattttgtttatttactatttgttttacaactttttattacttactaattttagtacaaaactaatatttttgtatattagttcgataaaaaaaatttcaattatcaatgtaaatattgtttttttttttaattatgcttttataaaagataattttatatttataattaatttattgattaaaaaattattttaccagcacattttgtgccttttccctacattgacgtgaaaggttttgccagcgcatgtattgcgttggcaaaacattttgcgccaatgtggggaaaaggcacgaattttttgctggcgcataaatgcgtcggtaaaagttttttaagatggcttagggcagataagggtattcatttatcccgacatagaagttgtcctggcactaataagtgccggcacaagctagttttgctgacgaaattcacctttgccctgacaaaagctcttttatcgaccaagtatcattgacttcttttgatgggataattatgtgccggtaaaggtttgccgacgcaaaagtacaatttcttgtagtatttttttttctcttctttatatttttttaatcactttttttcctctttcttcttctcgtttctctctctctctctctctcttattattttttatcaaactatttctttttatttttgaatatctttatatataaaaaaatagttatctaattacttttgttagtttaacagaatatactttaaaaataaaaaaatattctgttaaatttaacggtattaatatggttagttttataaataatataaatatatatanntattaatattatttattttagattaatttaaatatgtataaatattaatatattatctgtaatattattttttttattatttttaatattaggagtatgttcaattttaataatcttaaactttatatttatcttattcaaaattttaaaactttttaattattcttttttaaaaaaattaaaaaattaataattgtttttttttaaatttataaaattttaatatatacataataaaaataaaaactaaaagtataattgagtatacattcaatgcacgtaataataatctagtatatataaatatatctattctatnnnnnntgtgcctatataactgaaattcttggtttatg

SEQ ID NO: 65925 - DNA, 2324 bp, Cannabis sativa
aagtgatttgcatagtacactagggtttataagtacaaaatttggcccactcactaacttgtgcgacaagttttctcacccgatagttcaaaaaaatttttaattgactttctaaaccacatttcatttaactaagagaaaaacattggaatttttgaaatcgggtaatcaagtaaaaagttatgcacgttttagtccgaaaaattgcacaatttgccattgttagccatccaaaattctggttggaatctagaattctggttgtcatcaattcagaattccggttcccatccagaatttgaattcacggcaaatttcttcttggaatgcgtgctaacgactataaacggctatttttcacccaacactatataaactcaattttcactcaaaaatttaagttgactgagcatttatgtcatacacctaacctattcaagtgagattaatgagcttccaagtttaaaatccaacaaacacttttcacacactttgagccaaaatttgtgtttattcatcttaagtgtgcttgcttattactctaggtttttattgtattatcgtacttctagagtgattttgcttataatttcacacacattttcatagtgtgattgaggtgagtttggcaccggtattgtaaacaacccggttatagtgagattgtcgagaaagaggttaatagtccttggcggttcgaaactattgtaagaggttcggaaacaccttggtgaaatttcccgattgtaagggttagtcaagcccgttaactcaactcaatattggaattcaaagctaggtccatagctttgaagaccagagacgtaggtagcttagctctatcgaactttgtaaaaattgagagtttgtaatttcttacccttaaactctttactttacaagtttgattatttgttatacattattgcttgccatattacttgcatttatttgattaagtgtttaattgcatagttttgtgtaaaagttttaattttaccgagaaaaattagagcttaaatttcaaattcacccccctcttggaaacatatattgggttaacaatctgcacgagagttatgaaattgacaacaaaagtagaagaagtataaagtcttactggttggatagctgctataagcaggttcgtgtcaaaatctactgataaatgtgttcctttcttcaatatcctccgaggaaacaaaaagtttgagtggaaggaggagtgtgaagaagcctttccagggctaaaaaaagcgactcgcacaacctcatattctctcaaaacctcatattctatcaaaatctctacatggagaagagttgggaatttacttggcagtgatagagtttgcagtaagtgttgtgctgatcaaagaagaaagtaacacccagcactcgatctactatgtcagtaaaaagctaattgacgcagaaatttgataccccttgatcaaaaaattaacctactatttgcttctagtatcaagaaagctaaggccttactttcaagctcacctaatttgagtctatactgatctgcctctacatcaagtcttgcaaaagccagatgcttttggccagttacttaaatgggcgatcaaattgggacagtatgagatcacttaccagccatggacaataattaaagggcaggctttagcatattttgtagacgaatacacaggagaagaaaaagaaattttagaagagattcctaagccagaaaaagaacatgcacctaaggaaaaaatgcccatttcgaggcttcatgtggatagatcatctacaaatcaactgtctagagcagggatagccttgatcacacctgggggcaataaagtttggttttacaacatcaactaatgaagctgaatataaagcactaattgttggattaaaattagcacgagaagtaaatgctgaatacttagaaatttgcaacgactccagttggttgtgaatcatactctaggtgaatacatggttcagggagaaaaaatgatggcttacttaagtagaatacaataccttctcgcacacttcaaagggtacaccatcaggcaaattttaagaaaggaaaatgcaggtgcagatgctcttgcacgattagtaagcagtacagtgacagataaattaaatatagtactaatccagttcgtgaagaacccaagcattacctgcacagaaaaaattgaaatgctaaatagtactctaaactggatgaccctaattgcaacctaccttagcacaggtgaactaccgtgtgacagaaatgaagtattaggatattaggaaaaagatatttctcattacccaataaa

SEQ ID NO: 65926 - DNA, 1078 bp, Cannabis sativa
attactaaaatgtataattgatttttagtatttttttttatatcatattgttatattaatgtaatttattaaatattgagtcacatataatttaattaaaaaaataattcttaaagaatattattaactaattataagacacttgtagagaagtactggccacacagcaatatatatttggcttgaactaaagttcaactgatagatctaataatgaagaagtctggttgaaatgttctcaccatccttgatatttaattattattattattattattattattattattgcaatactaaatttgcatatgcacttcatatattttatatgtttttttttttaatgaaaagacatatattttatacgttaatgagtcctctttatgaaaatacacttgctttaatatagctagctactcttcttcaactaaacatacatatatagagttacatttatgcaaaattcaaattgagcccctatatatttccatttattttaaaaaatagatagcctcgtttattatatcatcacatttggagtaatttaattaaatatataaaatgttccttgtatataatatatttccgtttaaaatatatgtatatttaataattattattatgataagtcactaatcattaacaaaatgctatttttaatagaggcagacctagtcattcttaaaaaaacgaaaaaaaaatgtatttacattttagttagttaagataataaataataatatttatgaacgtattaatattagtgtaataattaagttaaataacatataagatagaggttataatgatttaaattatccagtatattttttttctttttaagcttacttttgtttttgcttttcaaatacaaaaaattacttcctccactttatttaaatcttgagtcctccaccatataatagtgttagcactatgtactaatatctaattgttatattattttataatataataagtgtagattaaaatgtagtaatatatattattatgtgaataatatgtattaggtgtttggtaaataaattgtgtgacatataatttatttaacctaaaa

SEQ ID NO: 65927 - DNA, 1101 bp, Cannabis sativa
  modified_base (943)..(943): a, c, t, g, unknown or other
tttttattttattttataatttatttgtagttaatttataattattgtgaattattttcctttattttttagttgtttttctaatattttttatttttataaaatatatatttttttaatttttaaattttaaaatggtatttttggggaaaaattatttatataattgtaaaatatatatatatatatatatattcatatttacatatattgtcgttaaaatatgtaaataaaatataaaaaaggtattataaaagatgtattggaggaccaaggcaactaattttgttaggtgggaactaatggacaattatttttgttaattctattggacaagaatttagtttgacttagtgagagtttactttgacttgaatcatgcctaatttacaagacttggaccgactccattccatttatggcataagatcaacaaaaatagttacttaatttttataatagcaccagtgccatacgtgggatacattttttgcctctctcttctctctcttgctaaaatgtagcccaccatctttttgtccatttattaattcgtggatacgacataaaataaaatcataaactttaacctctgactttacaaaaaaaaaaaaattaaaattaaaattatttggtgttctacccctaaaaagaggtaagcatcccctaaaatgaagtaggatgtacttatttatgttttctgacatttataattgggtatttttttacaaaaaatgtgcagtaaaaaaaaaaaattattttaaaaacttatatattttgaaaatttattacatgaaatcatacattttaattattaaataataaagtatgtttattaaaacttaaaataaacaatttcataaattaattaaacagttttataaaaataaacaaattattttttttattaaaaaataaatatttattatctattttagtatgnattattataatttaataagattttttttttaataaaacatgatatcaaaattataaacattaatgtatataaatacaaatcaatacttaaaattactaaaaataaacataacacatagagtgatataataaacatatatgaatattattattttgttt

SEQ ID NO: 65928 - DNA, 1690 bp, Cannabis sativa
  modified_base (795)..(796): a, c, t, g, unknown or other
ctggttgtcctcttatggttttcatgttttacgtatcatcgtaccgaatggttttagtcatgcctttcgtgagaaggtcttttatgttgcctttcgtgaaaggtctttgtattgcctttcgtaaaaggtctttttattgccttttgtaaaaggtctttttgttgcgtttcgtaaaaggtttttttgttgcctttcgtaaaaggtctttgttcctttcatttttgacttggacgatattttccgaattccccccccccctttttttatttattttaaagagaaaattcgatgacggtttccatggactttgaagttcctagcttttggtttatacatagaatttcttgaggtaccttgcattccagcttcttgtgatctcggttccgtccatggtggacagcctgtacgccccgtgtctcgtcgggcttatcactcggtacggcccttcccagttggtggacaactttcccgctcgggcttcttcagtgttctgaaaaacttttctgagaactagttctcctgggaggaaattccttggccttactttcttattgtattgctttgccaccgcagaatagtaattttgcattcgggacaaggcgcgctccctcctttcctcggcgtcgtcagcagcttgtagtctgaggaaagtgttgtcttcgttgcttaactcggatcccaaagtaggcacttgcgtttctgtggggataactgcctccatcccatatacaagcgagaatggggtttcgcccgtactagtccgcggcgtggttcggttggcccaaagtacgccgnncaattcttgggcccatcttcctttggcactttcgagtcgttttttaatgttgtttatgatgactttgtttgatgactctgcctgcccattgctctgcggatagccgggcgtggagaatatgagtttaattttccaccgttcgcagaaacttctgaatttgttgttgatgaactggggaccattatccgctacaatctcctgtggcagtccgaacctgcatattatgtttttccagacaaacccttctacttctctgtcttttatttgagcgaatgagtcggcatcaatccattttgagaaataatcggtgaaggccaacatgaattttttctgagctggtgttgttggaaaggggcctactatatccattccccatttcatgaatggccacaggctttggacggcggtcagttccgctgggggggataggatggacggagcatgtttctgacacttttcgcacgctcgcgagtgagttgaagaatcctcctggactgtgggccagtaatacccttgcctttgcaccctctgggcggtcactcgtccgccggagtcgctcccacattctacttcatggagctctgctaagattagcttaccctcctgcttcgttatgcactttgagtatggcccgtggtaagatcttttatataattggttccgaagtatagtgtatcttgatgcccttactacgatttttctcgcctgcttggggtctggtggcaacttatcatccttcaagtatttgaggattggccgtctccagtcttcgatcgtgtccgtcggaatttcagtgcactttatttcttcctccgctgaaatactaggttctggaataaagtcaaatggtatcgtcctcgtaatgtggaggggggaagaggaccccaagccggc

SEQ ID NO: 65929 - DNA, 913 bp, Cannabis sativa
ggtcattaacgggtcaattttgtgttagccgtatcaacccgaacacgacccttctattaaacgggttaaacaagtctcatatagtttaatgtaataacttttagagagtatcgttagccaatcgtaaggtgacatgcctaaaaggtgttaggcaccactagtgtccaatagcaacggtcgttgtagaattattccaaaaccaaacacaaaaacgacatcgtttaactcccaacaattgtctaaaactgacaattcataaatttaaaagaaataagtaaataaataaataaaaatgttaaatctaacgttaaatattgaatcatttgccctttctttaattaaaagaaatggtaaataccacttgaatcttgtattttacaaaagttattaattagactttctgttttattaaataataatataaatctatattttctaagatggtaaaaatatgaccctctgctcaattttcgataattttattttttaatataactaacttatagactatttctaacacgaaaaatacagaaaatatatctagttttgtcacaacatctctagatgagattattattaagttttattttgacaaaaaataaattcaggatcctatttgtaccatttaagaaaatacaaaatctattttattattcaataaaacagaaaatccaattaataatttttgcaaaacaacacaaggtccaaaaaagtattattgaagaatcactataaggcactactagcaccttcattggtgtcatactagtctaataaaattttgagttctatataatttaaaaaataatctttttataaatatcaatcatcaatcatcaatatatatataaaggaaagcattagagagttgaggtggcaatctatatgtgttttctatcctattctttatttt

SEQ ID NO: 65930 - DNA, 860 bp, Cannabis sativa
aaaacaacaacaagattatctgtcagatttgctctcgtactggtcatattgcatccaaatgctaccaaagattcaacccattattccctggctatggttctcaaagtcaggaacaccctactgctatgcttgccactgcagacacgatttgtgatgattcttggaacccaaattcaggggcaacacatcactgcacaactaatgaagataatcttgctcaaaagactgagtgtcaagctaatgagcaggtgtttatgggcaatggcagtggcctaccaattcaaaacataggtaaaactcaaatcttggcctcagataagtctactttacttactctaaataatttgttgcatgtgccacaaattaccaagaatttgattagtgtatcacaattctctgctgacaatggtgtttattttgagtttcatcctaacttttgtcttgttaaggatcagattactcagaaggtgttgctacggggttcacttgatgctggtctctatgtttttcaatctctgaatctgcctaacattcctgacagaaatcagccttgcaacttacatgttcctctaaatgcatcttgcaataatgttcaatccttgcatgttcacaacctttgtaacactgttcacaatgtaacatcttcaaacaatgagtcattgtttcatttatggcattctaggcttggtcacccagctaccaagactgtcaaacatgtattgaacagttgtaacattcataatatcaataaagatttctctgatttttgctcagcctgctgtctaggtaaaattcataaattcccctttcctaactcagacactatctatactcaacctttacaattaatccacactgat

SEQ ID NO: 65931 - DNA, 713 bp, Cannabis sativa
aatctttgtcaataactttaagtttagtgtttgcatcaaaaaaaaactttaagttagtgtttcttctcgtctcatattcatattcatgttcttctttttttaatttaacaaagtttttatataaatatgatttaggattttaatattaacacttttagaagcatgcataattaaatttaagattatatgtatttttgagtgtttataaattgagtcactcaaatgattagacaaagagttgtctcgtaatttatggaatcattttttaataaaaataagagttctaaaaaactctcttttacactttttttatactcttctcaatcgagtgaccaatgtaatcttttaaatcatatttcaatataattactattatacttttattatcaaatttatttaattgtagttaaaataatattagtgctagtttcatataattattaattttaataatacttagttgtaataaatatgatatttattattgtaatataagtaaattgtaattagtaacaaacagtaaattttaatactatgtactatttggggctctgaatgtttagagaccgaaggcgcacacctgatttacctaccctcaaaaccggtctgtgtactattttattgtaatatagttactaattattaaatgttttaaatataatatgtataatgttagttattaataaaaagataaatattattttgaactctgt

SEQ ID NO: 65932 - DNA, 584 bp, Cannabis sativa
tacaacaatgtgggataataatcctgcactactacaccttatttcttgcgctataagaggttgtcaagtcttggatctataatgaaattcgtagactcttacgtctaaacaaatggctcggattaatcttctcctttttctttgtgaacatgaatttattctcaaaagaggagaaatggagagactcctagtttttctttggcgaaattagtaccgttaaaatcattgaatatatatgaacataaactactcgatgtcgaaggggtgttgggttggacttttttgtttgtatgctcggaaatatcaagaagcccaagggagattggacggtgtgaccatgttggaagccaattgtcaagccggaggagcaaccccccgagcatccatggtacctaccgattgactggaggtacaagctcaacgttgatgctgggttacatccctctgatgggtgtatggggtttggagtggtgattcgtagggccatactggacggtgagtggcgtctgccgttattctcgtcgtcggtctccttgctcaatctgtagctgaagctatgactatattggtgggatcacaattat

SEQ ID NO: 65933 - DNA, 963 bp, Cannabis sativa
gagagagagagagagagaacatcctcgccgaagctactttggaaccaacgataaaacaccaattagttaatagaagacaaaaattgagacacgggaaacaataactaaacccattaatctaatgggacgtgaataaccaccactattagatcaaataaaataacaataaaacttaaaataacaccacacagattcatagccatcaaccctatactaaatctcatacactcaacgaaataggaaatttctcaggacatcagatccacgaccctcaatggaggatctttgtccaacaaaaccatggctgtgcaacgactctactaacatcgacaaccccaaatcacatgaccctccatccatcctctttaaagggaagcccttcgaatagatcggcaaaaaagaaaacaccctagcaaagcaaagagacactaaccaaaaaccattccaagcaaggaagagagcagagaacctgaaacgccttactgtgtgaaatttataaccccaaccagagccacacccaaacccagtggagggtcgacgggccttggtcagagaaaaagaagaacctgacacgactactggctaaagttagggaagagaacgagagataaaaccttaggttatacaatagaataaaaatcaatagatattttataaacctacaaagaattaaaaacacatttataagattttggtcaacatttttgcccagcctagtaaaaatgtacaattcttaagtgatttatttactatttatagtgtatttgattaggaatgggcatgattagaaccaatttaatttaattacaaaattaggggtggcaattcgcgtttgtaggtgtgttcgtgtcatgtcgaggcttaagtatataagtaaatgtcaacttatttattaatcgtgtcaaaaactaaaacctgaatcaataaataggttgacttgacccgacctatttaacccattta

SEQ ID NO: 65934 - DNA, 728 bp, Cannabis sativa
ttttgtcaaagcggtagtgacataaagccgcagtgtgcccacttttgagacataattgaaaaattaatctgggctgaaacacaaaggaactacgagagttactcctggcaccatttcttgaagaagtctctatggctttcctcgagcaggtggtggaatgtatcttcctgagttagatttgttatttccaacaacaagattttcctaaagtttcatggagatgtcagtcatggagctgtgatgttctaagcggctctcatgggacataagtaaggcttgaacttcatcaagtgacaaggaatcacttcttgaagtaatcccagaaacaacaggatcaaactcagcaccaaaaccatttagaatctgaagaacaatatcttgttcacttatgttagaaccagtgatgattaaagaatcatcaagagattgaactttatcaacaaaatcagaaatagacagatttcctttctgaatattggaaaactgacctttcaattggagcaatcttgcacgtgattgactggaaaatcgttgttctaacgcatgccatacagccgaagatgtgtgatgattagcaacggaggcaagactcccttctgtcatggacgaacgaagccatgacagtaacagttgatcatgtttcttccattgctcataaacaggattggtttggccagaaaccatgaactgaggaggggaaatgccactgaagagaatatcatccaact

SEQ ID NO: 65935 - DNA, 888 bp, Cannabis sativa
ctgtagaaacaaataaacaccacccaaacacataaacaaaacaagccattgaagccgaatgttaatttccacattataatatttgaactatttcaagttggattaatgctcatttagtgagtccttaatctcttcatggggccagcatatcttaagatttcagggaataatgaagctccaaacacaaacacaaaaccaaaggcaactccaacaattatcccatttgtaaagctttcatctctttgtgattgatgggttgcctcccttggaatattggaagactcatgttttgcacaaataatatttgtgtaatcatcaccacaaagatcaatatttccaacaaaacttgaacttggaaaggttgaaaactgaccccctaaagggatctttccatgcaattggttgtaagcaacattaaactttgatagaaagcttagactttccaatgatgagggaatcgtcccagaaagtttgttgtgtgaaaaatccaatgcctctaagtttctcaaccctgccaaggtacttggaattggtcctgataggttgttaaattttagatctaaataccgaagcattttaagattaccaaactcgggcaagattgatccactaagcttgttgtaactcaagtctagagttggtggaagactcatcagttgattgtattgcaacccacttaactcagttattcttattgggattttgccactgaatgagttgtttgataagtctaagtaaaagaggaacttgaaattaccaaaccatgaaggaattgttccatcgaagtggttccatgacaaatccaatagcttcaattggttgcttctgttggatattatattttaccaggatcttagatctacttacaagtatgttgtttaacaccct

SEQ ID NO: 65936 - DNA, 4143 bp, Cannabis sativa
aaaaacacagtatttttgaaaagattttcgtgtactaatatttttgtaaaaattaacacaaattcctgtatttttgtaattttcccaaatattatgggccaggcccaaaaagggtagagccatataatgcataacccgaaaaatgagagtattgtagaaactggaaagaagattactgcacaggcttttttgtatctttactttggacgtggcacgtttttgcatttcgacaattttgatcaatgtatagatcaatgatggtgcattgctattagctactttaataaattgtccaatattactacctcttctgatgctccttagtatttttctaaaaatttagaggtatgtgaatggattgtgcaattcaatatcctaagtaacatgcttgatctttagatgttcatgaggattaatggtgttaattatttttgacaatggaatgctcattgcaaataaaaactaacaaaatatactcaaaattagtaaagcatagtcttcaaacattaatatatatatatacactaaattaatattatgtacatacaaagtatgtttagttttattttaagttattttttaaaaaaaaaaaaatcatatgtaagttaaaagtaaataatatatccccttccaaggacatgatagccatgtttcagacccaccattttcaggtaatggaagtgcagtgcactgtgtacacgtccataaatccaaacaagagataagaaatattgtaaaggaaactaagaaagaaacaatattggaacgaacttttcattactatgaaacaagaatgcagagttagtatttatataagtatgaaaaaacagctagagccagtactgtgctacaaagaattacaactaaccgtaactatatttgtatatgtagggtaataaacatattttaaaaaatataaatagtacaagttaaacatatttatttaaggatgatatattgatatatgatacaaatagaaaataaacatctaaaaaaaatatcacatatacagtcattgatgtctattttttttttttgaaagtacatagatgtctatttaattgttttcattaaaataaaatgttttgtatatatttttcataaaaaatgaataaatatatttgaaaatatatttcttataataaactaattaatttaaaacatgatatatatataaaacttaatgactttgaaaatatgaaacacaaatttgtttcaacataaaaactcatttagtaattaacagagcaatttaaatcgcaattaaaattcacatagcgacccacacaaaaactatcggaacaactcaggccgtatatttgaaagaaaattaaaaaataataatggggtaatttcccttcaaaatatacatgtaagtttattttataaaaagttaaataaatttctattattgtgtatctataattgagtgaactatgagagaaaacaaaacaatacatattttcaatgataacttttttaataataaacaatgataaaactagttaaatttaataaatgtaaaaaaaaagtatatgtataagaatgtctgattaattataaaatatatttatctattatttttacctttaatatttaaatattgaagtatatacgagtacactttataaaataatgtgaacaataaatcatgttctaatatagtacaattaataaacattatagcagagcggccctatgttaatttgggccttaaataaaaataaaaattagagcctaataaaaaagtgaaactattgaaaattgaactctcaacctcttagactaatcaaaatgccattaggctacaacaaatatttaacattaaaagtattattatttattttattattgactatattttaatttttttttttcgaaatgagaccctgagtggtggcagcttaaagcagccgcctccttcgtcttagctcaggaccgaccctgcattatagtttattttataatgacaggaaaaaaaaatgacaaatgtttgcatatattatagtggaatttgaggagattgttctacatataatgattataaagtgtttgccattttaattttgaatgattgatttttttaaagaaactcaaattatcaaatgattttgattgtataaatatataaaataattaatactaaatatatacttactaaaaaattaatatgaaaaatgctataatatatcgtccataactcttatacgtattagtatcgttattagtgcaattaaatattaagtctcatataatttaatataataatttataagaaatatcaccatctgattacaaagtaatacatcgccttctaaaagatattagacaccattaatatcttttagtatttctcatttgacaacagggccaaccttgaaatttagtgggccatagggaaaaattatttttgggcccttatttagaaaaaaaaagtgttattttttaatatcagcaaaaaaaattgtgtaattttaaaagggaaagatttcttttttgggcctttcgactaggtgggccctaagcacaggcctagcccgcctatgcccagggccgaccctgtttaacaatagtcatatttttgtggaaattgcattgtaacctactttacttaatttgttttgatttttaccttcaatactatattctttaagatatactcatttttataaatgatgttcccattataccctttgaattaatgcaaattatgtgctacacttaagtggaggacaatgatatattaggcaagtcactcataaaagtaggtagattttaataaaatataatataagagtatttttaattaatgcatacaaaaaaaaagtattcttcaatttatccccatatttttcaataaaatccaagagcataaattaataaaataaaacttttaatatgccatatcaagatagatagattttgtagatatttatttcatttcatacataatgcaacacttaaattttgagcattgattgggtaggttggaaatgtatggacacaaattaatcttcgtttccgattccttttggcacgttctaaaggtttttgtggtctttcttttcttttttgagataaattgtgtgtgtatatatgatatatcaaatctctaaatcacaatctcatacactttcaatacttttgagaagaattgagcaaaaaagtaaaaaaagaaaagaacaaagagtgtatataatcatatatgggttcagtttctaacaacatcaatattacatcatccaattccaatcatgatcatcacattcacgcagttttgtttccatttatggcaaaaggccacactattccattccttcacctagctcatgtcctcctcaatcgccatgtaaccgtcaccatcctcaccactccagccaaccgacccttcatcgctcaatctctctccggcacacccgcttccattctcgaacttcccttcccggaaaacataccgggagtccccgccggcgtagagagcatagacgctttgccttctgtgtcatttttcttgatccaaaccatcgtgttgagcacccaactcatgaaacccgacttagaacgagctctagagaatattcaacctccagtgagcttcatggtctctgatgggttcctctggtggacccttgattcggcctccaagctgggattcccacggttggttacttacggtatgtcacattactccatggctgtgttccattctctctttttcggtaaaaaatctgttcttcacacgcatgaggtaaaggttaataataatatggagacaaagacgacagtagttcctgattttccctggattaaagtcacccgaaacgaatgtgacactagtgttgaaaatggtgaagatgagtctattgctcttgaattcataacaaaaactactgaggcgacacacaatagctttggtattattttcaacagcttctatgagctggagccagtgttcgtcgactactggagccgagaagctggactcaagtcatggcctgttgggcctctctgtttacatgccatatcatcgtcgaagcccacgaaagcagagggcagagccgttgttattcatcaatggctcgacgaaaagatcgagaaggaatcgagttcagttctttacgtggcatttgggtctcaagcaac

SEQ ID NO: 65937 - DNA, 777 bp, Cannabis sativa
gttatcatgtctgtggcacctggggaattcagctgttatcctctagaaaggataatacgcgaggagtgtgatggtcccagcactagtaactcctcgttggagcttggagccttgagcatatcagggcaggggcaacaatcccccttcgtgattactttaaggattttgtaaaccacctcgggcttgccccttttcaactaaatctcatctcctaccgaatccttgccagtttgaaggttttatacatgacgagaaaccattctacgtcaaaagtataaagcgagacatcaacctccttacatatgaagaaaagtagacgagacatgttgactgctaaaagacttagcgtataatatacattatacaagctaagtataacaattgaatgaacttgaacagcgaatagtgagacatccatctcgctataggagggcatactcatggttccttcactaatcagcttcaaacatctttcaatgagattcactgctccgtcgagttagctctcgcagatagaaactgacattcaaatgatgttgactggtgaagttcatcttgtcaccaagaactgcgattgtttgatggagtgttatgtcttcaatcgcaattacgacgagatttaaattatcaaccttagaaagacatgggaaaagcttcagcttgctgccactgttattattgctatgttctcaatgagatgtcccagcacgatacatttcgcaatgtatttaatgcacgtatggattgacccgataaaagcggaccaatcacagttgt

SEQ ID NO: 65938 - DNA, 659 bp, Cannabis sativa
tataaaattggcattcaaatcacagataatcacatagagctcgaaaagagctttccaacggtataaaagaatgtcccaaactgagtcccgagtcaaaagttatggccgcaaccagacctatgatagtcgcgaccactgtaacttccaacagtaaggtatatgttgttagcaatcaaatacgaccgtgtccttggacgcttcatactattatcaataactttagcgtcaacatgagagtaatcaaataaattagtggatttagacatattttcttccacacacgagctttttgtctcctcacaatcaaataaacgacacaattacattaatagatataccttaccgcttgcactgagataatttatcttctcgctgaaacttgtgtctgacaaggagaatttattataaaattgtgttccttccaaactccaatcgttaatcacacagagaacacttttttatttttaaccatcaatggaatcaccaaacaaacaaagtctatcactaaatcttttattttttttttatgaaaatttttactccaaattctctcaaaaagaatatttataatacttcttcttattaagctaacttttttttttgacaattattagtaaattttttttttaaaatccgagtttggaattaggggcggtgta

SEQ ID NO: 65939 - DNA, 989 bp, Cannabis sativa
ttttatttttttatttttgaaaataagcgtacttatcattaatcaataaagcagttagacttcgtggtcattacaaaataagttctctagtaaggaggaggtcagaatagagccgtacaactagtgggtgaaagcccacttaaccacataaattatgagcaacataattacaagtcctgctaacatgagaaaaattacagctaataaaaaaaggagaagacttaatataaaaagagctagacatggttctcaagagcccaatgtgactcattcccattgagagcattgatagctagcctcgaatcactctccataataacatacttagaccctaattccaacaccaacgaaacagctaaacagcaggccgtaacttctccacataacgcatccgagaaatccaatcgagacgtgtggacccgaatcaccctacccaggtaattccttgcaacaacagcagtgcacatactctctaagcccactctaacatcacaattaagttttatccaatcctgaggaggtggagtctaggtctcccgcaagatcggcgtagggctaggcaagaaagaagcatgtaactatgcaaaagaagtaaaaatatggtcaatacatttcatcacatgcatcacgaggagaattattgtgtacaatttcattgcgcgtcctccagatggtgtcaacaacaatcgatgcataaagaaagacatcctcaactcgaatacccctattttttagatcccatatgaatttaactcaatcccaaacacgaataccagcatcacaaacagggtaaatgccccaaggcgaagatcgccataagtgaaatgccacattacatgaaaaaaaaaataattgttcaataaattcctccctcaacccacacaacggaatgttcggaaaatatgagatatcaatagaagaataacaataagatgaataaagagaccaagaaaattacaactctatgcaacaaaattacaaggactata

SEQ ID NO: 65940 - DNA, 878 bp, Cannabis sativa
  modified_base (28)..(46): a, c, t, g, unknown or other
aaaatttcaaaaaaataaaaaaaaaaannnnnnnnnnnnnnnnnnntgtaaaaatgaaaaagcccctaactttttttatacgattaaaaaaacataaaaagaaataaagaataagatatcattaaagagaaagaaaataaaatatattaaagaataggagggttgaatagtcattttatcaaattgtaatccttattcattacatatacctatgtaattagaattccactgagtagtgtaatacccatatacccattaggttttcaaagctcgatattaccctcgaggtccattcattaatgcagagttgggtaacaattcaagctatatctggagaagcatacttgaagcaaaatacttaatttctattatgtgtctattgcttgttggtatataaggaggtcgattgcttgttggttcaggggagagtgtctctattatgtgtgacccttagcttcctgatgaggacaatcctcatgctacctcatctcatcctagtcttttttatcaaaaattgagttgtttgttggaggttaatgacaaaagatgggatgttgaagtcgtctcatatttgttcaatagtagagacaaggaattgattcttaaagtacctatatctaccacaaatgtgcagatatttggtattggagtaaggagatttcgggggtctactcagtcaaatcggcatacaagttaatccaagagttgaaaccttcacccgtctcctctattaatcctggtttttggggagttttatgggccttgaaatgtcccccaaaagtcaaagacatgatctgaagatctgtgtcaaactctttgcctacctgtggactactactccaaaggcatgttcgaatatcttcttcttgtcccagatg

SEQ ID NO: 65941 - DNA, 863 bp, Cannabis sativa
  modified_base (152)..(163): a, c, t, g, unknown or other
  modified_base (235)..(261): a, c, t, g, unknown or other
tttttttttttttttggttcaattaagaagaagaaggaaagaaaaaggaaaaggaaaaaaataaaagggaaaagaaaaagaaaatattttttttatataatttatttatttttaaaattttttaatttttataatttttaaattaatttttnnnnnnnnnnnnaagaaaaaagaaaaaaaaagtaaaaaaaaatatttttttttctgatgttttaattttttttaaaatatttannnnnnnnnnnnnnnnnnnnnnnnnnntggaccactaaaaatttgtcacgtggacaatccaccgtggcacttaactgtaatttttagacggaaggatacagagcaaaatagaatgggagttcagtaggtattgccaccaaaattttaatttttgtagttaagtgtttcaaaacgtaaagttcaaataatttaaccgtcaatatccctattaaacacacatttagtatggtggttaaattatctaacatacataagctcataggttcaaattccaacaagaatatgcttactttttagtgttttaatttttttttaacatctatcaataacatttgtatttagtacttcaataattgaagtcatttttattattttattttttttgactttaaccatatttaatactacaaatatataaatttttaacatattatatcaacttacaaaaaaagtaccccttcaaattctgagtccgtgtataatacttatgaaataaataacaaaaatatattctaagatatagaaaggggtttaatgataatgatgatttgatcaaaaatttaagggaaaaaaacaggaatattctaaaaatggaaaaatattacaacaatactgtgggccggcccaat

SEQ ID NO: 65942 - DNA, 992 bp, Cannabis sativa
acaattagacacccaacccgaaattgcaacgaccggagctctaccaactgtactatatccccccaagccaagtggagcatgcatgaagaaaaaatatgattccatttcaaaatggaatagtctttctaccaaaatggtggtgggaaagtaattccatcagaatgacattaaattactttaaaatgcaaccaaacaaaagattggaatgaaaattaattcatttccattcaatttcattacttccaaccaaacgcaacctaagtataggatactacaatgcaccgcattcttgtgacaccttcaaattaaggggcgaaccccaaacataactaggattttcgttctaatctcaaccatgaaacaagttttaaaacaaaagctcgtgtaacagtatacgaaaacaacgatgaatgattaagaataggaccttgccaaatgtcttttcaccgacaagaacagctctgcaattgtcgtgcaatgcggaagcaacctgcaaaagaccacgacggcttgaaaatactacacatagaagccaagccacacaatgtagttttgtcagttaatcaagttgcttacaatttcactagcactggcagtgttgttgttcactaatacctgcatcagaattaaagtacaaaatacttgttatgaaactgtttaaaaaggctgagttgttaaattcttagttgttcagatcaaatgtttctaagtgagcctgtcctaaggttttagcttaaatcagtaggaatgaattagtataaatcaggaattgatttgtattgttaaaagtaaaatttactcgagtgtctcgaaaagcttggaaaaattgtaatcctttctttgatatctttaagattcatattttctaattctttcagtattggaatggaatcatagtgtatgattatgatacatattcaggttgcaaagaaattaaacaacaagagaaaaggttggtttcggagaagtttatgcatacgattagaggagct

SEQ ID NO: 65943 - DNA, 1045 bp, Cannabis sativa
aaaagagattctaggtttatttgttaattaagagactttaaatgtctaatcatcaatatcaatatatatatatatataaaggaatctttttaagaggtgatgtggcagcctcattgcgatccttttctaatctctcatttcttaattttttgatttattcttattttttctaatttatttgtttaaactcattaattgattttaatgatcttaaatgttttttgcaaatttattttagagtaatgtatcgtattctctttttcattattttcttttagagttttatccctttccattcaatttaaaaaaaaaacactatttttcatggcctctcttttccattattttcttttagagttttatccctttccattcaattttttttttaaaaaaccactatttttcatggcctcttctgctacgtttggacgaaattgttcttggcaaaattacatccttcaggtgagatttctgtggtgtgtgtattttggttgaaggagttttttactattttcaaatcatcaatcatcatcatcatcaacatgtataaactaatctctcttcttttaattttttcatttattcttattttctctgatgatttattttcaatagcaagttttagatttggagcatgcaacataaatcatagattttttgtttttggatttgataatttctaatctgatacatggatggatgacaattgccaaaattgaatagaaagagagtgtgggagtgagaagatgacaagactaatgtatattttacttcgtaatattgtctctgcttcttcccccctcttcatcttcttcagtttggtatcttccacaaaattgataatctagataaatttctattcccaaatatgattcactaatattagtatgatttttataatccatataaatctctaatatattattatttatatattaaaaattaataaaaaaagatttggtataatctataattttttaccaaaaacatctccaacccaacactacagtggattttctcacttttcactcgaactgggaaaata

SEQ ID NO: 65944 - DNA, 835 bp, Cannabis sativa
acatgatcaacatgtattttatctttagtagataagacaaagctttaattcgtctattctttccatttgttgtccaaagttgatactaagccatccacgttaccacgtgaaaaatttatttagacttcagtcaatccaaaaattgtcatctaattataccgtagccatattcaaattttggtagcaacaataatgtgatatagagtacacacgcattaacacgattatcacatcaaaatagataattgtaatcatacatatattgtaatattaatccaaaacttgtccacttatgatctatgccttatattgatccttaagcataaaaacattgtaataattgattcactagttccattgaagctatttcaaggcacaaaacaaaacacactagtcccctgaactcatcattatggagcaaacataagaatttcacttcgagtatccagggaagttcctaagcgaattcatcctcataaaacttgtcatataaggatcgatggaaagatatatatacctcataataacaagccgacacccattgcaatactcccactgagcatgcagtaacttgacatcttttacattcaaatgtgatttcaagattaatttatcaattttgaggcctagtccaatttttcaatgagagatcaatatgacaagacatattatagtcccatttgataactatgtggtagaaattttaggattgtttaaaggtaaaaagaatatcttagagcagtgccactatgtgaaaacaaggattatgcaatctgctcgttttcttagctttctcaatgatctatcaacggaaacgatcatgtcatgctagagt

SEQ ID NO: 65945 - DNA, 787 bp, Cannabis sativa
acttaccaataaataataggaacacaataagactaagaaatcaaaatgacataataaaaacattattcataacctacatgaataatatttgaatagtttttaagccatgtgagctttttagatttaatttatttgtagaaaaaataatatttatagttttatatgtatagtttatttcttaacttatttatttatttatttttaaatagaatttatggttttcttttaagtaaattgaaaaacctcaaaaagtttttgaaataaaatgaaaaaatataagacttcactaaattctgtgttaaaaaaattattatttaaagtattaatcaagcacctatatattaaaaaatattatttatactttataaaagagtattaaaacaatgtgacactttttttttcttggtaaataagaatatttttatttacaaatttaaatatatatataaatttaaaaaattgtgtaaataatatattaaaaattgtaacatatttatatatataaaaagtattgaattagttatagtttatattgtattataaaaaatgtgtttttattttaaagaaaaatataaacaaagaaaaactatatataatttgtaaaaaaatataattattaaagatatataattatttatcgaaatatataaattttttatttttatatatttaatacaaatttaaaagttattgggtaagatattaatcatatgtgggactttaagtttatatttgtagtagtttacttctaaataaaatatgcaaatgtcacaaaatttttaaaata

SEQ ID NO: 65946 - DNA, 679 bp, Cannabis sativa
aacaaaaatataaaatataatatataagaaaaaaaatattttcaaaaattgaaaactccattttgatgttttctattttctagccccttgatagttttctagctcaaggggctattcaacttaaaaaactgttttctattttcacattgtactgatttgtaaaatttatattacatttattaactatcaagccataactcatgtgtaatccttccacggtcacaggataaaattttaaagagtgtataattattgatttttttttaaataattgtaatatttatgaagtttttaattttatttttaaaatatatatttaacatgataataatatatttataacagataaataacaatataaaaatattttggtatgatgatcgaatttttaaatttattatttattttttttaaaaaaagtattagctcatttaatttggttttttttgaaaaaaaaagagtttataaatttgagttccaattatatcttatcttttactaatctgtacattttaaatataaatcaatataataaattgaatatagccaaattaatttcaggaaacttggtcataaacataacttccttgtacattttaaaaatctccctctcccaatatatataaaaaaaattgggaaactcttttaatttttatattcttttgagtaaattttggga

SEQ ID NO: 65947 - DNA, 1773 bp, Cannabis sativa
tgccatgactccagcaaccactctttggcccccgtctgaccccacgtgtcggaccattcgaatcctcaggtgctagcgacctcaacccccaagcagtggcgcccctttcgccgtcgtcagcccagaatcgcaagtcaatatttggaggttcaaactttgaacaggttttctgaccacctctggtgtccgtttgacgagttgtcttcaccattagactcaactcattgaggagaacaacctacattaaagccatttttcccagctcgctattttttccgatgacatttttgtagctccacccctttttggtaacttttcggcaatatcgtgtattattttgacaaatagttagcatgggtgtgatctactcgtcgaggtggtcgttttgatacatactacccctatttttagtgacattttttgtacactaattttttaccgccaccaatagttaatgtgcactgcttaggtgaggttttgagacaaattttaaatatagtcatattatctgtcgttggattcggttttaaaagtagaatacaatgatgataattatttagccatttgatgatatatgtgagagtgatatctaagattgtactaaacaattgcagctcgggacttgagcgcttaagatcgtcttttggacaaagtttaacgacttgagagaggtagggactcaacttgattattagacttgatttttatatgtgttgaataacattagacacattccaatttttatgatttgcaaattgtttaaaaaattaaaaacttaatcacacattttcctcgactattctggggcactaagtgccaaatatagttttgtacaaataattatgcaggttataatttttgaatttattcaaaatacagccgttatgctgccaaattttctagaaaataaaaggtaatatgttcttttgttattcttattatttttgcctgttttttattatactgatgagagccatgttgattatgatttgtgaatattgttgttctacgacctagtctctttgtcatcataggtagatcaggtgtgcactcacctgtaggtgaaagacctaatgaattgaatttgaggcccagtattatggtggttatcaagtgcgactatccaattttggatgtcattttctatgattggtattgagcgctaggggtctagtggacggtgtgatatgtatttgacgcttgattttgtgattatatgtggtttttctactttgttatacgttttgataatagtaatgaggtattttatttttttttaaaagctaactatgcatgaatttttattaaatcaaaggtgcttgtataatagttatttttctactgggctttataagctcaccttctattttctctcattccaggaactaaatttaatgctagtggatgaggatggtaccgttgaggaagaaaattgttattagtttagtcttattctacataaaactgattttgtatttaagctgatctggatgacttaaattaactttgtactagctagaaatgagtaatgatagatgttagatattatattagtattttattgacttattatatctatctatccggtgattacataactgtgggggatattattgttcttttatattaatgaatcgtcctagttttgttacaaatattttcatatcgatataggaattaattcataaattgttataaaataatagaaagtagatgagaagaaagaaaaagaagatgaagagagaaagagaaagtgaatgagaatttctgagt

SEQ ID NO: 65948 - DNA, 654 bp, Cannabis sativa
gattaaggattctataattttaatgtgttgatgactattttattcataccttgtgatcttaattctccatacaatacaagttacaaacttataaatgattaataaatattctaatatttatataaaaattactaataaataattcaaaatagtcaaagatatatcaaattgttcaagctataaaccctaacataaattccattttgcttgtagtgaaaattagagaactttgagagctagcggtagagagtgggaaactgtgcgagtaagattttctaagtctacaaaaccatatttatagtgtgggtagaatcattagtatcaacaagtaggattagacacaatgatcacaaacaaggatgtgtgggctaatagtatacacaaaataggatactcatatttagacaccctgtacgatcacaaacattttgggtaatcttattgttgatgagtaaaaaaaaaaggaaatagaaaagattgtataaataaataaaataataacagtagaaggagcaaaatagtaaatagatgtatataggaataaaaatatatgtgaataatagccgcacaaaacctgagacgaatgtatacctgggtttaggtgtgaatgcataaagataaaagcagctgccacttgatttctttacgaagata

SEQ ID NO: 65949 - DNA, 622 bp, Cannabis sativa
gcctaaagctttctcctttaaaaatagaggtctgtaatatctatctgttaagaagggggctgaggtgtgcacactatctagcttggatgtaggagacaaaatttgatcttcgtcagaaaaaatataactgtcacttggtgatttggcgtgcataaaaggtagacatccgcgacactccaaggtggttgacattcacattaggccctttgagtacccgtttgggtattagttgggcaagcttccatgttttagacacctctgggccttgtagaggcaatgcgccatctgcgtccgagaagccaaggcaaagccaggtagacttccgtgtactcttcaatctcaaccttttcttggtttcaggaggcttctctgtgataggatcacaatgtaggaatttaactatggtattattaggctaatcccttccataataagccacgtgtcacatgctcagaaacatggataacatttactcccaagctttcagactctctgagatctgggtgcttgtagtgctcattcgtttcttggggatgaattcttgacatgtgataactgctggagttgcggatgcatcccatgacttgtcatcaaataacataccataagttgaaggcattgc

SEQ ID NO: 65950 - DNA, 787 bp, Cannabis sativa
accactcctcaataattctaactatccttatttgaatgttagaatgagagcatttatcaagtctcaagatgagaaagcatggataataattctttcaggatggtctcatcctgttgtggtagattccaaagttaattctaagttaaaacctgaacttgaatgttctaatgaagatgataaattgtttgtttacaataataaggtcgtgcatgctatatttaatggagtaggagagtgttttattaaacttatatattcacgtgtttctgctaaatatgcttggcaaatccttcaaactcaatttgaaagaacttctgatgttaagagttctaggtttattatgctcagaccaaatttgatgatcttagaatgtctgaatcttaaattttatttgagttttatgaaagattatctgatatagctaatgaatatttttctcttggtgaaaagcttgatgaatttgttcttgtatgaaaaattgttagagttcttccaaacatgtttgacactaaactcttggctacagagtaagcaaacgattttagcaagatgaatggggaggagttaatgggttctttgcagaattttgagttgaatcaacaaatcaagtagaaggctaaacccaagtccatccctgatagaggtaaatgtattgcttttaatgttgatgaaaaagaagttttagatgaagaagaagatgatgagatagatgatttaactaaaaactttcagaaatacatgaaaaagataagtgacaaaaagaattttccaaaattctccaaaggta

SEQ ID NO: 65951 - DNA, 1579 bp, Cannabis sativa
ttacttcactaagaagtaacctaaccacttaggggtaaaatggtccaacaccataaccccaaataaaacctaacattttaaatgtctaattatctagccccgctaattctaagatactacagcgtatctaaatgattctattttctaaatcgttacattccactgttatcaaacacaaaacatgtaaattataaaatttcatatacaacatatataatgcatctagaattcaaatatatctccataattgagataatattttcctaaggactatttctagcaataagacctaatttctactgagagacatataatcataaaataataattaaatctttaattatttactaattttcttgatttaagtctgcggtcattacaattatcctccttttaaaaggatttcatcctcgaaatcaaatctgaatagctctggacataaagccctcaagttggattctaactctcaagttgttttctccaccttaatgtttcttcaaataccaccaatactataattctgtttcaaggaacattatgtttcttattgagaattccaactatttcatcatatatgataagtctaggttaagttctaaggttccataacctttgaaatatgtgtcaaacttcttgatacaaacaacatggaaacatcgtgtgtgctatccatgctgatcataaggttaaaggagaaattatgaatatgattttcttaaaaaactctaaaatttttaagaacctagggcatatcttacccttatcaccaaagtatttacttctttcactgataacatacatggactgacatgttttcccctagttaggaattcctctacttatgagcttcatattaacatgtctttcactatctgctttgaaatgcagcaccttggccatatataattttctttaaagtcttacagattcgctgaactaactttggatctatatattttttgttttgggtttcaaaaatggtacttcatactgttcaacatcttagaaaaaaccattcctatcatactttgatagttgtttgttgtatgaaaacttactcgaaggcatatacttgtttcatgaattcttgaaattcatcaggtaaacttgcaacatatcttttattatctgaactatctcttcagactgacaatcaatctaagggtaggaaaccatactagactttagttttgtacttatggccctttgtaaattctatcaaaatgtagaggtaattttagttttctatccgaaataataaacttttgagtcacataaggtcattctatctccattaaataattccctgactaaccattatactaaaatagtaccttaattcatattcaatcacacgaaagcaaacatgcttacagttcaaagtactccaattacagaagttctagtaacctctttctatttttgatggtttaccccaatttaatgtcaaattaagcttcttaatacataatctaccacatcattttgcattctaccttatcagtaagtaaaattttaagtcttggtacatcctaatagtaccaacctagaaacgatttaaagagtggtgtaagttttc

SEQ ID NO: 65952 - DNA, 609 bp, Cannabis sativa
caaaccaacagcaacaaacaacctttgccccatcaataatttgacttcaacaacacttcctgacccacataaacaatccaaaagtggccgatccatctacaaaccctcacatttaaaggactacgtttgtcacaccacctctacagcttttcctattgaaaagttcatctcatacactaaactaagtccacaattcagggtccctgccctcgcagcctattcacatattgaacctcgttcatattccgaggcctcacaattcatacattggctaaaggccatggatgatgaaaccgaggccttaaaaaaatcatacttggattgtcaccaaattacctcttggacaccaagcaattggatgtaaatgggtttataaagtcaaatataaccaacaaggggaagccgttcgctttaaggctcgccttatcgccaaagggttaatcaaaaacaaggaatagattatgatcaaacttatgctcccgtagctaattttaatacacttaaaatatttcttgcccttgctgccatgtacaattgggatatccatcaagttgacatcaacaacgcgtttctccatggtgacctccatgaagaggtctacatgaaaat

SEQ ID NO: 65953 - DNA, 1327 bp, Cannabis sativa
ctcgatttctaactcaaaatcaacaagtaaacatcgatactagtcccatagctaccaaagaataattctacgaagtcagaatctccataactatttaaattcacgaaaccctatataaaactaatcgttttagcttaaaacgtatttaaaccataccttaagtttttcctcttcaaggatttactatcccgctactaccagagcttagatcggtaggtttcaggttgaaaatcaaacaaaatgaatagaaggagagaaaatcttattgaaggaggaggaagaaggttccgttcgtactgttctttgttaatgtttactaatataacttataatatatactagcatacacataaatttaccacgtaaacaaaatataaaataagataaaaaattagcatcaattaattttaaaattctagtaatagatgagtatcaattgtaagagaaaaaaaatgataatatggaaaatgaataatctcacattgtaacatttatactgtcagtaagctttttaaattctagtaatagatgagtatcgattctaagagaaaaaaatgataatatggaaaatcaataatctcacattgtaacatgtatactgtgagtaagctatttaaaattctagtaacagatgagtatcgattctaagaggaaaaaaatgataatatgaaaaatcaataatctgacattgtaacacgtatattgtaagtaagctaaatatagataactaactttcaaaatctagaattttcttttttagaaaaaaatttgctaaataaatataattagaacaaatacacccaaaataaaaatccaaaagaataaaaatcaaaattttattttattatttcttatatatacagattgacagagagaaaataaatcacaaaaagaaattgatcacgtgaatcatgaaaattgtgtgcatttttattatttgctggtgcaattgggaatttttacattaaattaggaatttttgcatttttatgtatagagataaaagaaaaaaataaaggaattaaggattttaaaatcaatgaaaaaaaaattcatatatataagcatagttacaattgatgagaaagactataattgctcaacactgttggcacaccatctgaactgctctagaagccatgacttcgataggttaatgggtgtggttagagaaaaagaaacttaaattgttggatcacccattattgcttgctgcttgcaggaagttgaaaatcaagagattaaggaggcaatcgcgggagagaaagcgatagaaaaaattgcataagagaaatatgaaacgaatctggagagagagagagagaga

SEQ ID NO: 65954 - DNA, 918 bp, Cannabis sativa
  modified_base (167)..(168): a, c, t, g, unknown or other
taaagcaaacacacaaaaatactaaaataatattcaaatacattgatataaattaattaaccatagtaatttgaaataagtatatccataaaaaattagaatttagaagtcatggctcttagggggcatgtcttcttagagtgaccagactttccacataacccacnncttttaatccattttttgccatttacaattgatgggattttatttatttttcttctaccacgcttgattgggacatttggaggaaaaaccttcggaagtaattcaacttcatcgatatcccaatcttcttattgaggcactggataaatcgtatcaacataagccaacgcccaagtttccaacttataataattggagcacaaatcatatacttctattctagcttgttcatatgctgctagtgcatgcacgcaagtaagtttatcaaggtcaaaaacacgacaagagcattgtctttgacccaaatcaactatggcatctttgcctttaccagtaacctcgtactcaaatcgattaagctgcctgacattcatttccaatgctttcttgaatcttttccgaatgatattctttgccattggatttaaaggtgtatatgatgtattgatagatgccacaacatctgattgttgaacctttcagagacttttgcttgcatagcctccaacaatgcaattataggatactctattggttccttcatattactgcattaatagatttagcaccgttcatagtcataatattgtagcgacaacctgtaaagtgagatcttgtccatttgctaagtggtgtatttgactcttcaagataattcacagggccaggatatctattcttcaattcatcataaagttggttgaactcggaaactttataggcgttagcagtttcttcaaataatttttc

SEQ ID NO: 65955 - DNA, 1834 bp, Cannabis sativa
  modified_base (849)..(857): a, c, t, g, unknown or other
  modified_base (950)..(963): a, c, t, g, unknown or other
  modified_base (1026)..(1030): a, c, t, g, unknown or other
  modified_base (1666)..(1682): a, c, t, g, unknown or other
tcttagaatagtctaagtggattctggtcacaaaatacaaaactcataatccatatactatcatatagttcacatccattatagaaaatgaatattaaaaacttgtgaaagttatactgtattgtccaatgtatttgggaaactaaaatttaaaatttctagttagaatctaaaatgtaaagtcaaagacttaaatttataccaaatatcttttgagtaattattttatcttggtccaggatttatatcattttgggatagaatgtcagaatatagaagaaaaatagagtgacatcataatcatatgatttataatccttcttctccaataatataatttctaagcaatttcttaatgaaaaagctaagagttaaaggataattttgcttaaaataagaatccaacaatgtccaatttaggcaagagtcaaggttattcttattttataaactttttcattgtttcatattgtaagcactagtcaaagttgtcattttttgatgagtcaactagattttgcatttacaaatatttatctgtcgagatctaacactattattttgtctaatggatgacaatcctttgggatgtcccattaaaatcaaccaacaaagttagaccaacaatgaagtttgaaatttatactacaataattaataacaacaaatattgaattttcaatataaattcatacacaatttagaaattattaaacatttatcaagcaacaaagacagcttaaaatacaaaacaatcatatcttaaataatttccaaagtttctaacaaacagatacaatatcccgtttaggcgagagtcaaatatatcattcattgaatagagtagtnnnnnnnnntaaaatggacaccattctagcaactttttattcgatcaagacaagaatttgttatgtcccgttaaggtaagagtcaaggtcattctatcttannnnnnnnnnnnnntgtttcatactttgtaagccctaccattagccgtcactattggggtgatcattactaagaatnnnnnacttacaataatacttatctttcaatattctacggcgttaaattgctaatgaatgcacatctattagggatgaatctcattaaaacatgaactatgtagaaccaaccatggagatcgaatatccttaagctaaagctcattattttaaaagaaatatattttcatttgatatatattttaatctatttattttaatattcatatatttgtttgattaaaattactaatttagttaactctaaatataaattttaatttattatttatcaaattataaatacttggatagatctgaaaatgaaaatttattttctatttttaatattaatttacaaaaaataataataaaaattacttaatttaagtttctccaaaattaattatcaactcaaatttaattttctataaatatatatctctaattaaatttgaaatctaatgtatataaaaatatattttcgaattccattaaaaataaaataaaataaatcctgaaaaattgttataatttatgttgatctaaaattaattatttaatttttcaacataaatataatttttctatttaattaaatctcttaagacaagtatcaaatatttaagtatcttgaacaaaatcaacttaaatattaattnnnnnnnnnnnnnnnnntatctagaaaaataccaaaaagtatacatgaaaaaactacctagatacttcataaactaattattgattttctaattaaaatataatatgttttagtctatttattttaactaatcattaatgaaaatattactttatttaagttgatctaa

SEQ ID NO: 65956 - DNA, 944 bp, Cannabis sativa
aagatttaacaactccaaggatcaggttgattttcttgtctaaatcatatttgtacttattttggataatatgaatttttcgtttcaatcttccatgtttgcatatagtcttttgagtgataggtaagtcatcatgcaagacgaatctcttcaattttaactttagaatcctttcgtgccgagctaaagatgaaagttgatattttaacaaaaaaacttcttcagaaatatttcttgagtctcctaaatctttgatgattgtagaaattaattccatgtaatagattccgtcttaataaaaaaaatagaagaatacaaaagtgaaaatttgaataaatagagacagagattcaatttatatgtacgaaggatatattttttacgaaaataaaaatataacaaaaatatttcttatgtgttctttaatcaaatgtcacctaaatgataatttaaatagatttagtatatgtgtgtatgtgatctttttaagtcattattaacttgaacataatattaaagtatacatattcataaaattattttcaagaacaatttaaagaaaaatacatgtaagtactaaaattaatttctacaatatttttttagtacctgaagaatgcatattttgttgatgttttattctactttcatgaatgttctttaaagatttcgtaagaaaaagaaagaaagtgagaaattttttaataaaagcaattgtaaagtaaataagaatgttaggtgtatatatatgcataaaaagataattattaaatttaaatttttaattctatatgtaaacaaattatattatgtataaaatatcttgtatttattttattaaaagatatatattattattatctttaataaaatattttgtattattttatttttaattgtaatattttttatctttttaaaagcatcatactaataaaaaccat

SEQ ID NO: 65957 - DNA, 933 bp, Cannabis sativa
atatcaaaatccagtggaacatatgttccatgtataaagaaatcagcaaatgcagcaataaaagcagcgcagtcactatgtaataaaacatcaattaaaatagttaaatcagctataatgaaacacatcaacaactaaaatacaacaacataaataaaaattacatgacttgtaatgatcagaaacaggaaatttacattctcattcccgaaaacaaattaaaaatttaaatgataacaaggaaataagaaaatatttccaaacaaaaatgagaatatacctattacgaaactacaaacaaacagctaaatattaaaccatacccatttgttaaaaattaggcctaataccaactatggacataaaaatacaaaaaaataataataattgtaaacagatttacataaaacaaaaaccccaaaattagaacaaactacccaaaacacaaactaattacatgtttggaaatatcaacatatatgaaaacccataaaataaaaataataaaaatacaaaaactaaaccctaaaatgtaagcaaaagaatataacaaaccaaaaacaaaaacaaatgcaatttagagctagggcaaaactaaaatgcaactagaaacaaactttaggaacgtcccctgcttctttcttcccttcttgttgtcggagttggaatttttttcaggcaaagacaccttcgacttcttcttcactggacgacgaccacctttagccacgaggagaccaaaatcagagtcttcttcgttgataactgggcctttctctttagccttgttagcaactaatttatgacctattttgaagctttttttgacaatagagatagataagcagagccacagggaatagccattttatatacgaaatataagatacataaaaaatttggtaaaggaggcacttggaagaagaagatggc

SEQ ID NO: 65958 - DNA, 685 bp, Cannabis sativa
ttttatcttcactttcatttcacttatcatcatcttcgatcaccttataaaaacctttacatataatatttataggaaaattctttggaaccatatatgtgaataaaagtaaataattaagactaattataggatctttcttagtaactaaatggtttgtgactaaaagtattagtcacaaaaatcataatttgttataattaaatatgttttactaaatatttgttatgactaaaactaaattaatgacaatttatatttaaatactatgttttagtcataattagtaactgtttttgtcactaaaaatcatatttagtcacaaaaaatttatgttgtcactaaaaatagttattttttctagtaaattaatttcacatgcattaatattgggggaatggaaataaataactaaattagagtaatatcgattgtgatataaaaaaatgataaaatacaccttatacatataattaagtatcgagtctcgcataatttaatttaatataactattataacatgtcactaactaattacaatgagtaacttttaggtggtgttaaaacatctctaatggtgacatttttaagagtgtcaaaaatctctacaacacttaaaaatatattattttattttatctctctttcacatcgttttagcatttttagttctaaaataatttaa

SEQ ID NO: 65959 - DNA, 918 bp, Cannabis sativa
  modified_base (70)..(70): a, c, t, g, unknown or other
aatcaaaaaaatcgtaaaaatattaaaattccataaaattatatttttataatttttttttattattttngtgtatttgtgaaataatccctacccaaaacttactaacaataaagtgtaataaggccaactaattctactaacgaactaaaaataaaaatttacataatacacctaaaaatagaaatttacataatacacctaaaaataaatggatatatatatatatatatttacatttttacaatttttttatttacaaaagatttgttttaaaagccttcaactatttttttttaaaaaaaattgttttcatgttgtttacccgtagtaacaatatcaagataatatttttttaaaataacataaagaaatcatgttattttcccctaatagcgagtcagcaatgttaaaacaataattttttaaaaaacaacaaaagaaataacattttatatttttgtaaaaaatagatttgtaaaaatataaaatttttgctttttttttaaatttatgaaataatccctactgattattacttttaataggtttatcactatttacatgatttatttatgattttaaataataaaaattatgagaagtatagaaataaatttgttataattgaatggtggtagtaaatttgatattgtgatagaaaattatgacagcttcacaactaccatcaaagggtcacataaataaatacactaacgagtttttataaaaatatttttttttagagaaaaagcgtttatattatagattcaaatagttagacctcgcggtcgttacacaatatattgttaggtaaagtcgaaaccgggatagacccaaacacctgatgagcaaacacccatctagccacattatgagcggcaaagttacaaattctacttatataagtaaaattac

SEQ ID NO: 65960 - DNA, 911 bp, Cannabis sativa
tgtgtttttgagttttaaaaagttggatttgtgattggttgggaatcttaaaataaaaaaataagagagtatttgaagagtttttaaatttaatgatttgaaaatatagaatacataaaattgttgttttcatttttaagcttaaaactcaaaattatattcaaatttagtttttgaaaacaccataccaatcaactattttttatgtggactcccaccttttaagttttcaaaaacataaaattattgttttcaaatctcaaaccaatcaaacatttgatcactttattgttgttaaagtcaatcttcttcagagttttgttttccttaagaatcacatggaggtggagcattgccaaaagagccaacttacaaacaaaaccaaaaattgcttgagcttcatagcagcatattattccttttagttaaatgctattgatgtaacaacaaattagatacatccattaccaattacaacctttttttttatgaggattcctttgttgttggatccaataaacctttgatatgattctctactttcttctggattgaagggtaaggtatcttttgaaacacctcggctccaaaggagaatactagagcctttctggctgtttttaagtcgatcccacgagcctggaaatagaagagttgaccttcttcgagatcactaattgcagctccatgagaacacttgacatcgtctgcaatgatttggagattcggtttgacattgacggatgctcgaggttcaaggagaaggcttctagtcaactgacctgcatctgtctgctgagcatatctgcagagaaaacaaaattctattagttcaaaaaaccagaaatctacggaagaaacaacatcaagtcttgaaagtagaaattgttacaatggtgaaatttccttaa

SEQ ID NO: 65961 - DNA, 2341 bp, Cannabis sativa
aagactgttcagtcagccgagttataaacatactctgttaattatgcttttaacgagttattccacatcaagtgtacttacgattgcgtgtttgagttctacattcttcctagctcaacacgtgtcttcttctaatgtgttcatcaaattttgggtataacaagtccttgtgtgcagtggaagatctagaagatcaaggtgtgaattttgtcattactgttatgaggatataacatatgaaaagacttgatgataccttgataggcttcgagaggtaaatattagtttcatatatttactttcagtttaatatatatatacatatggtgatcttcggtatatggtacaattataataaaaaacaactctttcattgtgtacttgatttggtattataaaacaaacaatatgaagtgttcatggccagaggaaagatcaagctagatgaagggatcaatctagaggaagggatcaaaacataagagattattccaaggggcatcacaaatctcgatcgagatcaaaattcaaaggaaaatacaacaaggacagaaagttctttttctatggtaaaattggtcatatcaaaagtttttgcactgagttgaagaataaactcaaagataagagaaatcagaaacaagattctattttaattgcaaaagatccagatcaatgttcctctgatggtgacccctacatggttttagatcaaagaatcactaaagaataattcttgattattgtaacaccctactagtttaggcgtactaccgtacattcttaattattgtgcaacatttacaaatcaaagggtttaatgaacaatgtgatttaatttaaacttttacaataaatataaattttaagacatgtttaaaaaatcaaggatcctatttctatattttacaactaaatacatcataaagtatgagcccatattgtcctacagatctaaatactccaagtctaaccgctgagatatatacaatcttcactaagctctaaactcactggtaattagttgaagacaagcctttacctgcacaaaacatagtatctatgagtcgacaaaattagtaggaaaagcattaacagataattgatttgtgactaggcacccatacatttgtcaacaagtcaaaacagataaccgataatttcatatatgtatagtttgtctcataacctaagcacccatacacctggttacaagtatgttcatgtgaaatgcgctctatgagtctcaaaagctcttaacaatagtacgacttctatattgcatgcacccaataaccttccaaaacttgtgttggtagggtttgtttatagtatgagtacaattattcattatacacacgcactctatacccatttggtactagtgtgggtggtgctactatgatattattatgtgggaaacaactgctcgttatacacgagcacttagtaccatttcagtactagtgtgggtaacgctactatgctatactttctttataatgttggatacaactgttcattatatacatgcactcaatactcttccagtactagtgtgggtaacgctactatgttgtatcctcacaatcaagtaatacattataccatatgcgctatgtactacaactacactagtgatggtagcaacaattcatataatcataacatgtaatatgcactaacatgtatatttttaacaatcttattaacatgtcatattagtggaaaatacaaccatgtccacatgtatatgtgttatactagtcttatctcaattctaaattcaagtacgccagccaacgggagaggaaattagtgcttgtcaattagtggccctaagtcacaagtgtaaaactgataagtgtttactctataacacttattgatatctgtaaatactctatggtttcctaccgaactatgcggtgaagacaccctaaaataaataaaataatttggaccaaaaatatatctcatgctgaaaatcttctcaagatttttgaaacggtatataaaatgtctaaaacgaacatccaagtgaaaagttatggccaaaatacaaatttcggtcgtcccgaaatcttttaaaaatagcaggccattttttctggtccctgtaaaaatggttgaccattcctacaacaaaaaaacattatttttcatcgtcaattctcacccaaaccttatcaaactttctaaaaatgaacatgtttcatcaagaaacaacaagcataactcaaataatcctaaattgctattgttgaccgaggttttcggcaaccaatataataataatatttaggaaagctgtaagaagttaatgcgcaagatttttacg

SEQ ID NO: 65962 - DNA, 1050 bp, Cannabis sativa
gtggtaattttttcacatggaacaacaaacaacctggaggggataggatctattcaaaaattgatagaatccttgctaatccaagttggatcactaagtttccgacggctgaagtactttttctaaatgaaggaatctttgatcattcttcggagctgcttacaatacatcctgaaatacctaatgggaggaaactcttcaagtattttaggatgtggagtaatcacccggattatgataggaagattagagaggtgtgggcgcaacaaattaaaggaacaaagatgtaccagattacctcaaagctcaaagcattgaaaggggtcctcaaggagatcaacaagagtggtttttctcacttacatgctgcagaagccagagctaaggatgatttagccgactgccaggccaaattacaagcaaactcgagaaaccagatgctacaatctgcagatatggaggctagacagcagtttttaaagtcccatagcgacttaatgtcgatgttgcagcaaaaggcgaaagtctcctgggtgaaaaatggggatgataacacttccattttccatgcaagtcttatagatagaaggaggcaaaatagaatttggtccatagagtaacaagatggcacccgaactgagaaaccgaagcaggtaacagatgcctttattagttattataagactctgttgggtgctacaatggatcataggagaaaagtgatgaaacaggtagtttacatgggaccaaaagtctccaaccaggaagcacaaatgctattggataagtttccaaaagaagatgttaaagctgccttatttgcaattccaggaatcaaagcgccaggccctgatggtttctctagctattttttccaggacactgggagctaatagggaacgatacatatgaagcaatggattctaagaaggtgataatgagattgaagctatttgccgagttgtggaagggacagagcaccatgaatggttcgggtcccattgcatgggaatctgtttgtcaaacaaaatcagaaggtggtattgggtt

SEQ ID NO: 65963 - DNA, 1234 bp, Cannabis sativa
cgattatactaaaataattggaagtattggaataaaaaaaatagtaaatttgttgtggcttacgacacgcatcatctatctttctatatatctatcacacgaactattataccaatcccatttactggccgtgaaggttaacttatccaacctattcatcaagaatgggcaaagctagttggatggtctgaattccataatctttttccagcaacgaatctggacaccaagtttcggatcaacaatctacacttaacaggaaaacggcgtgatctcaaggtggacaccccaaggggtcattcgagaacaaaaagtgaaaagacgttcgaaatcactaggtgtcccgaaagttgcctacatggcccttctctgacacgatttcaaaaaatcaagtggcttgtccccatccttggaaaggctacaacgaaaaggaaatcatctttttaggtaaacacccaccattttgacattccttattccccacgacagtttatgcccctcctgtcactatcaataatatgactgtgtacgggcctcacctactcgaccaaatagctcaaattatattatattttaccccatcagtaagattttacatacccttaaaaattaccctaatagatccgtatcaattaggtccatttaggaaatatacttataaatatgacattaacctttgtgtattggaattttttgtcaaaaaatcggaaataattacaaaataaatattcaatacttttatattctttattttaattataaatattaacaaaccacattaattaaaattttatgaaatattataatattatttctatattatataaaattttaaattataatttacaaaatacataaatacaaagttcatagtaaaactttttcacgttaaactcactgttgaataaatcagagatgtaactagtacttattaaaataaaataaaaataattctagtacaagtaaaaataatcagagatggtagaataatttgatacttttttttaaaaataaaaatataaattgattcatcaattaattagcgaaacttataaaatacaataaaataaaaaattatatagctccaagggaaaagaagagagagagagagaaatacgtgagaattatatagctcgtgtagaaactagggttttgtttccttttagttgaaacttccaaggcttccttctttcttcagcctccaaaccctctaaggtctctctctctctctctc

SEQ ID NO: 65964 - DNA, 577 bp, Cannabis sativa
caacaaattaaatatcaactacacaacataatataattaactatatgccatatcacaaaatcttaatcttaaatttcatctcaattaaaaaaaactttgttattttctttatatattttcaaaatttaaatttactatgtagccaaaccataattattcaactcatataaccgttcaaataagaaaataatcaagtaataaataattgtgttgcatttataatatgggtacaatattatcataattcatcttatgcctattattcttttattttcttatataattatatatcgttaaataaaaaagaaaataagatataattatagaaattatttaaaatttgagattattgaattatttattatttttttcagtgaatcaaataaaataggatataaaattataaatttaaaattttaatttatgtaatcacttttaaattaattttttatattagtatataaattatttttgagtaatcatattcttttgaatcacatttttattatatatagatagttttttaaattgtatcttttaatttttttttatttaagttagttactaaattatagat

SEQ ID NO: 65965 - DNA, 1041 bp, Cannabis sativa
  modified_base (158)..(167): a, c, t, g, unknown or other
aacataacagaaagttagttaagttagttggtttaagtgagttggataataagttggtttagaggatcaacttccacattgtatgtatgcataaaccattgtacaaagttaagcaatgacccttttccaaaagaattgttaataataataataataannnnnnnnnnaataataataataataataaggaacttgagaactatgtctaaactggagtttgctgatgctctatgtggggaagcgacgacttgctgtttggccatggaggaagctaaagcacgaggatttaaatttatcattgttgagagtgattcgagggtagcgatcaatgctcttaatgggaaggagtcccgttgggagcttgagaactatgtctcattttgtaaaagaaattatagctttcagcatgttagtagacaatgtaattttgtagcacataatgtggctaagtggactttttctcttcagaggtttggttctgtgcaactatcctctttgcccgataacttattctgtaacgaccgcgagatctaactatttttatgttatataacagcacgcttttcttcaaaaaaaaaaaataataataataaggaactttttgtcaatagaaaacaaataaaaaaattggataaaaacaatctcatttattatgtattaaaatataaagatgatataagttagattactgctgttaattcatttaatgacatgtaatgtactcttttcattaattagataggaaaatagacatcaattttgaatagagcatctcgctccataaataatgttaattaattaataacacaattaattatatagttgatgacacaaattttaataaaaagatactaaaaagtactagtggtatttagactattttatgtattaatatcgctattggtccaactaaatatttggtctcatataatttaatgtaataacttttaagaattatcatctgatgtccaataacaatggtaatccaatagtagcaataatatgaaaataattaatacattcaattttaatcccaagccc

SEQ ID NO: 65966 - DNA, 1200 bp, Cannabis sativa
aagtatttccttaccagctcgagatagaaaacgaccactccagctatgtatgcgattcaccaccttagtttttaaaaagccaagtattgccgtcttcttcctacccatggtattaggtaggccgaggtacatactttggtcatcagcttcagccatctctaatgttgaacatatctgattctttagcatttgatcagtattggggctaaagaaaacagaagatttagtaacattcaccttttgaccagacgccatttcaaaactatgaagcatactccgaacattcaaagccgcagcattggtagcttgacaaaatagataactatcgtcagcaaacagcatatgtgagattgcaggggcaccattagccacacgacagccttgaataagttggttagctacaaatttttggatgatagaagagaatccctcagcacaaataatgaagagataagttgaaagcggatcaccttgtcggatacctcttgttggaatgataggtcccatggagtggttgttgtgaacaatagtatatgtgaccgtagtaacacattccataacaagattcacccatctcacagcaaaccccatacgaagcgtaactgcacgcaaatagtcccattcaacacggtcataagctttactcatatcaagcttaagggccatgaaccctttttacctcttcgtttccgcttgagatagtgcatgacttcaaaagctaccatgatattatcagaaatgagtctaccaggtatgaaggcactctgagtttctgagataacatcaccaatcaaaggacgcatccggttggcaaggactttagcactaatcttgtaggcaacattacatagggcaatagggcgcaagtctcccatggtagaaaaattcttctttttgggaatgagaaccaaattggtagtgttatactcactaggaaaagtaccagtattgaaaaagtcagatactaaagcaatcaaatcggcacttacaatatcccaatgatgctgatagaagcccggtcccataccgtccggtccaggagccttatcggggtgcatttgaaagagagcatgcttgatttcctcagcagaaataggactaagcagctcatcattttgttcacgggtgacagagcatcggatgttttccagcacactgttacaagtagtcccagccgcagtaaaaagattagaaaaataa

SEQ ID NO: 65967 - DNA, 916 bp, Cannabis sativa
  modified_base (683)..(684): a, c, t, g, unknown or other
ggcataaaacccaacactactaaccatgtttgctcttcattgcagctgcttgaaacttgggagtacttaaatcccggtgagttgaagcttagagttggttatggcgaattggtgtctgtccaagctagaggataagctcacctcaagttttagaacaaatttttaattttagataatgttttgtttattttgaattgtagtagaaacttgatttctgtttcatgtttacaattacaacattttcaattgaattttttgagttctaattcaactatttctcgtaatgttattcgattatgtgttgcttatatggaacaagggcttcatgttttaagacctgatgtaccgattgcgcttatgaacaaactttttcatattgctaaatctagaaaccattaaaggcaaaagattgataataaagacaaaacatatctatgacatttacgtcttggtcatatagggtatgatagacttcacaggttaaccaaagatgatccattgaaaaatgtcaccttgggtgaattaccagtttgtgaatcatgcctaaaaggaaaaatgactaaacgttctttctttgcaaaagggagagtgtgtcaaagaaccactagggttactacattagatgtctacggaccaccaaatgtcaaagccagaggtagttatgagtactttgtcactttcanngacgattactctagatatagttttatttgcctaatgcaaaaaaaaaaaattgaaacattcgagaagtttcatgaatttcatgctttgcctcaaaacctattaggtaaaataataaagatcttgtgaacaaataggggtagaaaatatatggatatgcagttcaaagataatttaattgaacttggaattgaatctcaatatactacccaaagcactccacaacaaaatggag

SEQ ID NO: 65968 - DNA, 561 bp, Cannabis sativa
aaatcagcacttcgttttcacccagccttcaaattaatttttccattgcccaagtttgtggcacatacataaattgggaaacgaaatatcatttgttagtaaggaattctcttcgagaggacaaatctataaatgtactttttaaaacaatatcaatctttcaattaaattgatttttttttttcatttcatatctaatagtacacagtaatatatttataaatttttgcactatttgtaaattactaataaatccttacactataaaatagtgtaacattatttaggtaaaattagaatatgagtaatggtaattaattatgcactcaaatagtatatggtggcgatacaatgctgtttcaaaacaataaatcttatctaaaataaatatataattggttgaaataaattatcaaatggataatatttagtgtgcatattattacccttacacatatttttttttatataacattgctataagacatactcaaaactttagatgaagtggtatactattattggtacacttaagccaattttttaatttaaatataaata

SEQ ID NO: 65969 - DNA, 3142 bp, Cannabis sativa
catcgcttctcctagcaataaagctgaaaccaaatgaatttgtagcttcgaaaatagcaccatctacattgaccttaattgtattagttgcaggtgtagtccaatgctctacctcataaacttgtatatcatgaacaagtagaggttctattcttctttgttgagcataactccattgattaaggttagatcttgcagatgaaactacttcagcaaccatttttgttcttttattccatatgagatcatttcgagtgttccatatagcccatgagaccataagtacttcctttagttttagaatttggggttttttttctttctctaaaatatttgttggtatatttttgtgagttgttttgaaatttttatttattttgtgtacattttatttttgtgatgttcatccgagttggtttagtatttggtgtgcttgatttttttattttttattttttttgttttttttttcaacaacaaaaaaaaattggattttcataactgttttttttagttgttagtatttatttgctttcttattttttttttttaaatgaatttgtcatctttcatgttgatgccaagttgtttatcattttagatttgtttatatgttttttttttatatagttttagacttgtttgtgtattttttttaatgattttagattttttagttgttattatttatttgctttcttatttttttttaaatgggtttatcatttttcatgttgatgctgaattgtttatattttatatttgtttccataattttttttaatgattttagacttgtttgtgtattttttttatttggtcgtgcagtgtatggtttctcctctttttgttattttctagatagttgtgtttgttagatagtttggttgactgaagtatgttctaatcttttggtttgataaccaatttcttctcattttcattttttttagcagataaaaaatttcttaaattctaaggtttcagaacttgttaaagatgttgatttttctaaaaaaattaaagtttaaattaaaaaaaacatcaggacaatagtatgctctatgtttttttatgaaaattggtttttatgtttttatgtttgtcgacttcttaatttatggtttttgataaaacttatttttatatattttgtaaggttgataaagttgaaaatgaaaatacatctaagcttagaagcaatattaatattgatattggtggtgatgataatactaatactggattatatatatagaataattttatggtagaacattgattttgttcttatcatatagagacattttttaaccttcgatacatgtgacttttaagtgagtattagattaaatatttaacaactactgtttaaaaattctaaaacctcttttttttttgctaaataaaaaacttcatcattaagataaggagaaaatagaagaaaataccaacaccaattcatggctgcaacagagggtgcaacctccccaacagtgagaaaattggatatattaaaagaagctgctcaagcagcaatcatatgagcatctcaagcaacaatcctatgagcagctcaattgttacaacaaactatcccagaaattcaaattcagaatggaaaacaaagatagaacttttttgaaaatttcctatctgaaacacgatagttcaaaagttctgacatttaaaaacatgaaaaattatgacatttaatataaaatattaaagaaaataaatgtttattaaaacattacatttttttgaaagtaatgacattaaaacattacattgatacttagatagaagcatctttggtggagatctttcttttccctttaattttattttattttttgttctaagatggttacctgcatgaattgtattcctattgtatttgtttgggaataagcaaaccaaatgttttgtttgaaggtagttgaatccaattttttcttaaagctgatacatttgctttcattatatttaacttttctcactctcatcacttgcatgaataaacatttggtgtgcttattcccagtgaagactaacaaaaataatcaacaaacaggagacatgaaattaaaaaactatgacaaaagaaaaatgaataactaaaacctatttttttttctcaggacagagtataatcgaaacaatataatattattggtatttacatcgttgcgtttgattccacaagacaaaagagatgaataccaataaatgaaagttgaaaagaaccattataatccttcttcttaattttgtttgctttaagcacaggcacaatctcatcatcatcttcaatcacttctcctcctttctaaaatttacaaatctcttcaatattggtctgcttctactcaatcattagattctgatcaagaagccaaaaaaccaggtcaaacccacaaagaattttatctccaacaagtataaaataaagacaaccttccttttattttcttctcattgcatcacaaagaaagctccttcttcctcatctaaatcatggcctcgccaaactcaacctctccttccagcgattccttcagtttcttcttccattccttcaacgattcctttagttttgataacagatgtggacagtgatttgggtacggatgatttgagaagcaacactattttcataaaggttttagttgaagaaatagaagatgagtgagagagacagaggaagagacttcattaagaggaaattttttatttaattgtaaattattgtttatattccactttgccgaaaaggttaaatatcaaagtgtgaatttgacttgtcataagtcgtagctctcgtttacttcgaaaaaatagttagatgcttgagacggaattcgaatcgaataatcggaacccagtacactaggttatatgccaacctgggcgttgggtgctcctcggggatttcccgaggctcgctttgatacttttatggcattccaggttttgcgaatgaggtctcctaccctattttgaccaaaataagaagaattgtcaaagcaaaattcgtgtttgaagagcaaaaaacatgcaaaccaacttgtatgtcaacctgggcgttgaggccctgttttggctctcaaacgatctcgtttgcttcccaagatcactt

SEQ ID NO: 65970 - DNA, 1142 bp, Cannabis sativa
aaaaaaataagttttataaaagtgtccgtatataatttatatctatatttatttatctatctatatctatataatcttcaaataaaaaaaggtgattctatttttatagtagtgtaatgttttaattttgtgggtttttttataatttttttatttaatataaactaataataattattaatttgttagttgaagagataaatttaatatataattgagactcttcattatttatagtgggattaatttaattttattatgtattattacaaaattttaatcatattaatagtaatcttaataggagttatgtatttaaagatttctaatataaatgagagaattagactactaacaataatatatttagttaaagtgttttatctaccacatttattgttttagagcaatataagaaactaagagtatctatatctacatttatatataaatctgaaatttttaaaaaataaatattataggtaacataaaataaagaaaaaaaaaataattcacgttccaaatttatttttttgttactctagattcatagaataatgttatgtattataattttacatattataataattaaactgaaatattttggaaaataaatcacattattattaataattaattttaatgtgaacttcttaaaacatataaatatttttcttgtatttgacataatataaatacacgtatatgagattgtcctatacatataaacattattatacgttttgaagagaaacatgcaataataattcttaacaattagagtcgccaaccaatatatatatataaatattaattcatatttttatttttattttactttctatattatcattttatatacattaatttattattttatattttgataggtggtgttttattttaaaaaaaatgatgctaaatcataaagtaatagaattataatgagtttctcttatgtatttttcaacaatttatatacaatttaagtgtttgaagaaatttttaaaaagaaaaatatattcctatcaactatattgaccaatatataattattataagaaaaattaattgtaaaatatatatagtccaaaatgataattggtcaaaacacctaaattctttcataaacataaatt

SEQ ID NO: 65971 - DNA, 870 bp, Cannabis sativa
tttcgtcctttttgttttttttttcatatttaactgattgaccactatcgagacaataaaattatagtgtatcatttgtcatcccactagctatatgtggtcacagttgctcctatcatgaagtggaatccttatatgtttcgaatttactctagatccctttacaactatatatgaatccaacaatttaaattacatatatatattaattaaatgttcaactttactataagtctaaatttttctttcagtgatttcccattataatttaacatatcaacattgccattaacatttcgtgtgtcattgaaaattcaaataatttaaaaaaagaaagatgaaattaacaaaaataagttacaaaggttagagatttttttttctcatatccatttattttgctgaaaataataattgatttgttttgttcaaaattatattggtcagggcaacaaaatatgaacataggaaagtttaaaaatgaaatataaaagagttcatgtttgttcattatttatatcttacaatgacacaaaatgtatattataaaaacacataaaataataatgtatatgggattgggatcttgattaagtactaacgaattcattattacttcgataagtttcaacatctttgtagtaaatttttgttagtggatttttttaaacaatattaataaaactaagattcatatcttgagtatatatatatatatataaaaaaaaatttctcttgatgtgttatgaatgctcttaatatagtactaatgaaacaactaaattaatagagttgagttgatggaatgatatatttgattattattatgatatgtaatactgacctgagagagcaaccatatcttgggca

SEQ ID NO: 65972 - DNA, 1442 bp, Cannabis sativa
catatagactgtattgtaaatattaatgataatatatggcattttacgtgtttctatggttctcctgttagttcttttaagcatgttacttggagattgttgtgtgatttattttctaatgctcctaaccttccatggttggtcatgggggactttaacagttacttgtatagttcggataaaatagggagtgatcatcttgatacttcttctatgtctctttttgctgattttttgactaattttaacatgtttcctgtacagtttcttagattgggttgtagtgtcagaatcttggagtgatatttatccaaaccatagtcttcagcatcttagttattatggctctgatcaccgtgttcttaaacttagcttagctccctctaatattaattacaatgctaataggactaggcgatttaggtttgagaatacttggcttgaggacccctctttttatgatgtggttaaaaatgcttggactagtacttgtgtttctaattctgttcaagatcagcataaccatcttataggcgggtataggagtttcctcaagaagcaaggggcttgtatctcttccctaaaaaaattggaatagggacaataatctcctttttaaaactagaatccaacaccttactcatgaaattaacatgcttcaggatcagttgtttttaaataatgaagatagggctcagttgggtaaattacaatctttacttgatgctttgctatataaagaggagatttattggaaacagagggctagagttaaatggcttaatgctggagataggaatactaagttttttcataaacatgccacttcgagacgtaaaactaaccatattaaatatcttaaaactgatactggtgaggttatcaactccttggaggggattatgggtttaattactgatttcttctctgatctttttacctctcaaggaagtgatattgaggctgctgcctccatttttgaatgtttaggctctgggcttcctgatcaaagtgtagagagtctttctcagccgtttgttgctgatgaggttaaaagggccgtgtttcagctttctggggacaaagctgtagggttggatggtcttaatgcctttttttatcagaaaaattggtctgttttgggtaatgattttacaaccgctattttggactgtctcaataagggtgctgatttttctgaaatcaactccactcttgtagttttaatccctaaaaaggctcgtgctaatatgcttaaggactttaggcctattagtttgtgtactactttttataaagttatctctaaaattttagcaaatcgtcttaaacatgttctggataatgtaatttccccttttcaaagtgcttttgtgtctggtcgtattatttatgataatattattttagctaatgaattagttcataatataactaatagg

SEQ ID NO: 65973 - DNA, 1177 bp, Cannabis sativa
agatcaaagcccaaagggctgtttttggccgtggagtaggtaggataatatattgttattcttgttcgaaccacgtaatttctctcttcatttactgttttatgcttgattgttttggttcttattgtttgttgtgtgttgtgttctattttgtactcgttgttctactctgtttttgtgattgccattgtgttcttggtcgagtcatcctccacacatattgctactcagaaaagacaaagaaccaaactaaccaaagcagaaagcttgaagagaaagattgaaggatattaaaatctgcctacctggaatagaagttggatcatcttcacccttaaatatcacccatcttttttctttcactacaacatgatgaaatttgacagagagaaacaaaaacattagaggttgttcaactacaaattttcaagtcaattctccatagttagtagaattagaaattatggcccatttataaagttcaatattactaccagagaaagaaacaatcaatttgacattttttttctttttttcttgtttttcagccaacacaagagtgcaatatatgactgttttataaaacccaagtaagaaaacaattaaattcaatcaaaaaagaaaaatctaattcaaatcctgtagccaaaccaacttttgattggaaccaaaatgttagagcatgtaggccaagaaacccagtttacaaatggaaatattgctcataataaacttcaaacaagaacagagggaaatctgaagaaaatccaagaagcaaatttgcaagtaaataaagaacaaccaatacgtaagacccacttacatacaccatcaatctcctcttttctggcaaagtaacggttcccagctttgtcgacacccatcttagtcctgttgctgaagaacccagcaaccctcgaaaacagcttcgacattttgtcttccttccgatgctaactttgcttcaccaaacattttcttctaacatgtaacatcctatcaaaaaaaaaaaaaacattttcttctacagcaaaactctaaccaaacgacatgtcgtttcgttacgatgtgagtgacaagtgacaacaagttgtttagttatgatatgagcgaaagtcgtttcattggtatctggaagcgagaatgctctcataaatagttgatgcaattttttttt

SEQ ID NO: 65974 - DNA, 979 bp, Cannabis sativa
atatgtaaaataaagcttagttctttactgcaatgcggcgttgctgtaagtaattgccaattttcagtattatttatttagttaaaatgtgtggatcccatatgttggtaacagccttacacaactaaatcagaattatggggttacatctcaaaatcaattggtaatgaatggagaagcccatgttcttatatatggctcaatactttaccatttattcaatgtgagacaatatctacaataaattacaacagattgtaaccaactttagcttggtattacaactcagaatagctataaataaaggatcagaagttttacagaatctcgaaccaagaaatcaatttcagctctgttgtaatccataattaacgagtacaaatatgatagaaaaaattcaaattaagttttctatccaccttgaatatatgcactagtaatcagggccgtctcaaggtgttgagaagctaagggcaaaatttaaaatgaggctttttttttttttttttacaaaaaattaaaataaatattatattttttgctctgagatattatttattattgaaattttgacacaacataattaactcttttatctccatataatacataatttttctcacacataacctaacttaatgtaatatttgattgtaattaatagcatcttttattgaagtgttatatattttaggactttttttttaaaaaaaaaaatcaatggtatatcaaaaattatgttaattttttttttaatatatgctataagtttttataaatttaagatgataaataataattaagaaatatactttttatttaagttataatacttttgctagttattttttttacaaatatttgatttatttaatagtattataatagataattttatccgtttgattgcaccgtaatttctaaaataattgtttaccaaatataatctttattctttttttaaataatgtactttttt

SEQ ID NO: 65975 - DNA, 1305 bp, Cannabis sativa
aggaatatattgagctaagtggtagaattaaatttgtgagtgttggaaaatccttacaagcctagaggaatttttgttatctctgtgcagaatgttggagtaatgctaaacagatgctgtaacacctgggaaaaaacctgactagaaggaattagctattcaagccatttttaccatattacatttttttatcttgcaagcaatttttctagtagcagtagttttaattttagcaagtttaattcatgttaatttcaattttgaatcattactcaaccatttgcatgttatttcctcttactttaaattgtaattacttggttttacaacatatttttgtttacaatccctgtggagacaatcttacttatcattgtattacttgtttgactgcgtatacttacgtacataattttcacaacaaaagtactagtttagtcgtactactaacagagctctaggaaaattaagtttatccctctcctttattgcagaatcgaccataagagggttccctagttggccaattattttgaagaaaaacttttcccccaatactttagttctaaatcactaagtataacccatactaggacagacctgatgccttctttcttgaagttagtattagggtcccattctttcataatcataggtcttttgttataaaagacatatccccctttcaaaattgcatatttatcctcaattgaatgaaatctaatgataaagattccataggatagagaaccaattttgtcaatcttatccttcgagagacgcctagcaaagtcatctaaaactgacaaaggagggttggctccgagaacataacatactatcgatgatttccagtaggcaacttcatcctctatatcacctagagttatcttaaccctctatttctttctagattcagagaatttcttatctaggttctgcacaatactaccagatctcaagataggaggagatacagtcttaccttgggaaatggcaatgaaagcttgacgattttcatctctgaattgctttgcctccatgaaatgtgcaaattccactctaatttcctctcattgtatgctattcttcaaagtcgattgaggggatcgagcaatgtttgaatcatgaaggtttctaatatcttcctcttctgactctgagaagtgaatatatgggttcgattccaagtatctcatccatggattattcttctgcacatcaaaacttgaatcaggacccatttttttgcgtttcttgatagaagctttgagtttcccttgcgttttagcccattttttccat

SEQ ID NO: 65976 - DNA, 1060 bp, Cannabis sativa
aagatctagcttagaaaattgtgatttatggccaagaagcaacaatcaaataaaatgaaaactcacttgaatgaacaaagacaaaagtgctaaagtaagcttaaaaattaatcatacccaacataaaagttcatagtcattcaagcctcaaatgtctagctcatattcaaatgaaaaactaaaatccaagctaaaaagctatcttccatggctgcagcctggttttacaatttaacacagtttttaataactaagtacaaacaacaagaaaagagaaagagaaagaaaactattaagagaggataaaagaaaaatcaaacactaaagcttggtccccctttcttcctcctttgctgtacttttttcttcatttacttccccttccaaaaagttgcagctgctctcattgatggaaagatgatggtgtacttggatttttcctctttttgttgttgggtccctagtgtacaaaaattacacgctaaaattagaagcccaatccttgttgaactttggcccactagatttagtcctgcctttacaaagcatccagctggtctgattttaagtaaccaacatgctctagttgacgtggacgctcaatttcgcgttcccacgtcactgccagaatgttgaattcgttttagaattgcttcagcaatttgccccaatttaaacttttattccaacttttcctttgaatcatttcctttttcctaacaatttaattcctcttttttcaacaacaaacaaggacatttaattaaaaaaacacaactaaaataataatttttacaagacttaaaagttagcttactaaatagaaaatgaaaccaaaatgagttaaaattaagccaacaaacacatttttactactattctcacaataatttcagttaaaaagcataaaaaataactctataccatagagttatcatatttcatgaaactgtttttccattccacactcataatgccttcactgttgagcataaaagtttcttctctgcatctgctacatattttttccataataatgatcattttcttaatgaatctt

SEQ ID NO: 65977 - DNA, 1015 bp, Cannabis sativa
cgaaatccttgacaattatcatttttcccatctccatgcatcccaagtggacacttgcatgtgtaatttccaggtatgtttttgcatcctttgcattttttagtgatcttaggatctagacactcatcaatgtctaccaccaaccaaagatattattagcaccacaaaaaacagaattagtaagaaaaaatgtgaaacatgatataattgatataatataagttcagggtcgagtttggatcaaggcagattaagccaatataataaatttttttctttagtaattttcgaaaaataccttgacatccttgtttgagataaggatttccctcatatccttgattgcaacgacaacgatatccacgaccattctccgaatagtaacaatcactattttctccacacacataagatgatgaattcgattgagcttccttacacgtctggttatttcccacaacccaatccagcacaacgctagtattcatgacttgttcaggcttaaaatcaagacgcattttggctatgtcaaaactattctgatcaaccaagaacgcatacccacaagggttaaacgagtaaacatcggtgtggttattgaagctaagtgctgtgaatgataaatacttgagatgcttgggcacagaggtctggcaacagcctaaacccgaacacgaggtttgggccgacatgtttacattttcgttgcagatggagatgcacccactcccaaaattattttctgaagcgtacatgaaggcttgtgtgtcgcaaccgaaagcaaagagcttgttctgagaatctgaaagcgtgaacgactcactcaatgttagcccccctcgtgtgctttcatcgattaagttaccaatcttatcataacaatcgtaggagtagctgttaacaaccttcatagttgcgttctccacatagatgttgagaacctcaatctctccatacattagtttaggagaaccagaagaagtgttgcaattgagcaagaagtactgatcaatat

SEQ ID NO: 65978 - DNA, 727 bp, Cannabis sativa
ccagcagctctttgtgtaattcaaaccaaggttttatctctaccaactctctttgtgttttcttgagttgtaagaaaaatatgatagttgcatgctttgttatttggttattgttgttgttgtatttatgtgatgttttctgtagttttagtgtgttcaattgagtggattagagtaggttttgatgcatgttatttggttttatcaaagtgtggagttttgaactcaaaccttagtttatgagtaaaatgatgaaatagttgctgtggttgttgtttgtgcttgaatttgtgttctggagttattttatggtcatatatggtgaattaaacaggttttgatagctaattagttggatgagcaaggtttgagtttttgaactcaagcttgactcattaatggtagtttttgtaattttgcatgaaactttgttttattgctttggatatgttccttggggtctaaatagcaagtctggagggttcggtaagttttggggttgaattgtgtgagaaattaattttttaaggtttcttgcattgaaccggaattccgactcagaatggcctgtaggaactggaattccgggtttggtccagtgttcctcccgtaaccgaaatttcagttgtataaccggtctgcgggttggggaaaatttgggaaccctagttcttcccatttttgtgttgtttatggtattgccatgctttttaccgatagggaaact

SEQ ID NO: 65979 - DNA, 557 bp, Cannabis sativa
gtccaaaaatctattgaagaaaaaccctttcgacatgtccaactctactcccattgaggaatacctgagtcgtggctgcagctctgaataggggttgcaacaagctgttgatcagtttttaaaccttggccccaactttgtcatccctacccttgcccaagatcatgaactgatttcatccccaatcgtaactgctaataccaactccaccatagctttttctactatcccttcccctctcatcatggtcacctctgtgatcacccatacagataaaaggcaaggtatagccctaccagataactcttgtgtgcccccttccaaaactgttaggccccccaacaaaggcatcaccatccaggttttatctagtgtccctactgctaccacagtgggggtcaagaggccttttacacgccaacatactcaggtgggtggctcagtccgaagtatgcttaagagggcccgtgcgtctaatgaggaggatattgttgttccttcactctcaaactctaatgaaatgctgaggaaaatgaatttcattagttggaatgctc

SEQ ID NO: 65980 - DNA, 1685 bp, Cannabis sativa
  modified_base (586)..(590): a, c, t, g, unknown or other
tccactaagaatacttataagagggaagagtgttgaacatctctataataaaaaacaagtgtcaaatttctctataatgagaaagaattgtgaaacctggctatgataagggacaatgcctacatatataattatatattatatatacaaatacaattttttatggctattctcaggtaataggatttataaagataccactttcgatatatgaatgattaagtctaacaacttatagagaggtaaatattgaagaaagaacttcaaaaaaatgtaacatcaatgttgagcttaagaaagccatgaattgaattccgtttaaaaattgagattagaccgtacaaaaaaacaaaaaagttatgagattagagggtaggctggtaggtactactaattaggtaggtaggtgcatctatagcagtctttaatatttttggtattattcctaactgtattaagagtcagattcatttactgaaaaaatatatgttttttttaaggatcaaaaaaatatgtgtaggcgtcttctataattaaattcataccattttacaattaaaaaaaaattactttatatattattttnnnnntttttttttttcaaatttacagattgagtttctaaggtggttacatcgctagttgcaataaagttttttatacgatttttttttgcgatttagattgcagcgctaattgcaatataaatttctatttagaatttcgtaaaaatatataaaaaaaaattagaaatgtaaaaataaaaaagaacctaaaaaaatcataccattatattggatattcattcttattgttttcaaaatataaatttgcaaacccttaaaaaaatataaatttgtaaaaatatggttattttatataaaaatattttatgagatttttttcttaaaaaaattgaaaaatatgagaattataatataagctaactggttacctactccttaattacccagttacttttacctgtattttccttatttttaactttttttttgaatttatcctataaaataacatttcttttgtaataattatatttttacataaattgtataattttctcatatttaaaattgaaatagtttattttacctagcaaaaatatattaggcgtgtatattgttttatgtataattttccatatctcataaaactaatctgttaacaaattaaacttaatagcaagtatttctgttttagttagttcataattaatttcgtttgcaaaagttcagacaaagcaaactctaacttcgataaaaacgacaaaccaatccaaactaccaaagagttgttggagtaacactcagtgaaactgaaaagtactaaaatacacaatcaatagttcaaacaaaagtacttttttttttacaatattcaaatacttccaataatgtttaccaaaagaaagaaaccttattcctttcaaaagataaatatattatattaacttaacatagaaattgatcaataatagcttctgcaataatggtgtaatgtaaattaaaagacaccaagaaaagtaggatagagaggagttgtagaattgtaagtgaaacaatttggaacataagtagtggagcttcttcctacttttggagggtccctagttttgattgccggttggttcaaatatgcatacttgctttttgtccacctgcata

SEQ ID NO: 65981 - DNA, 878 bp, Cannabis sativa
cacttgcgtgtgctaaatatcgcaacactcccctgtccacttaatttttttgttttctctgagtatgttgaaaaggacacatatttgtccatggattttgacacaaatctgcttagtgcagaaatacgtcctatcacactttgtacttctttaatttttgtgggcgacttcgtgtctaaaagggcttggatcttgtttgagtttgcttctattcctctagaattaactataaagccaaggaatttgtccaagcctactccaaaaaaacatttgtaggggttcagtttcatgttgtattcttggaggatcttgaagaatttatctatatcctccacatgcccccagccttgttggactaaactagcatgttgtccacgaacacctccatattgcagccactgagatctttgatcatttttttcacaagtctttgataggtggcccatgcattattttagcccaaagggcatgaccatgtagcagtataggcctagatctgtcatgaagcttgtgtgttcttgatttagtgggttcattttgatatggttattacctgaataagcatccatgaagctcaggatttcatggccagctgtagcatctaccagctggtccatccttggaagctgaaagtagaccgttagacatgctttattcaagtcagtgaaatctatgcacaccctccacttgttatttggtttgggtaccaacacaaggttggatactaaaaatggatataatacttcactgataaaggcatgggtgttgggattttatgccctaaataaaacccatttcaataatctgatttgttatcaatagaagattataagtcttttatatttacatgtagtttttcatgttcatagtttaatata

SEQ ID NO: 65982 - DNA, 1077 bp, Cannabis sativa
atagtaggtgttgtcttgaagtgcatgccaaggaaagaagtccacaaggcattcaaaactcaccctaaaagctagtctcccaagaatacttaaaagaattcttgaagactagagggcaactgttaaccctggaaattggtgcttgtaaattctaaggttagataaataaagcatgagagacgatatggcggaaatcacccggctcaagaatgactcaatgtcacttggccatgagagtgaagaagtcactcagccataagagagacgaaggcactcaactatgagagtgataaagtcactaggccctaagagtgacaatgtcactcgaccctgaccttgcccaagtcggagcaataggggagtgaagcaacaacgatacggacacatggacaaagtaagcacgcgaggagagtacggtcatgcctctgcaagttctgaaagcaaggaagtacgagaagtggatgcaccgcgcctgcaagctctgaagacctgaccaagggtacgctgcagccactacttctgtagcttgggaccacctaacaccagataagagtacgaggcgtaagaccacatcccctgcacctataacttgcagccggaaagtgacacattgtccctttgggaccaccatgtacctcaggccattcgagcctataaataccccctttcttagatataagaaggggttaaaaaatcattcttgtaaccactatatcgaaagtaatagaaagtttttattttctctctattttgagataaacacttgaagttgtatttttatcttcttcttcatcttagttctgattttgtagtcaagtttgattttttgaccagcgagttagttgacgagttctcaccgtcaacacattcttggatacagcttgcgaaaagaaacacagaaatcttgatagattttaagaggtaaatgtttccattcatacttttatttctatttttttttgaaagaactacatgttcattgattaagaaagtcgatgggaatcacagggggattaccctccccttgatacaaaacaactaattcgctagcgattctagcatttttagcaataccat

SEQ ID NO: 65983 - DNA, 921 bp, Cannabis sativa
aaaaaaaaaaaaaaaaacttcaggcataaaaatgtaatttttttacaaaagaatagtgcttcatgtaattttttttttttaatttactcaaatatgtccctctcaatactaaacaatatcaaagtaataatttattccatcaccagctctctctcttccaatctcttcatccttgagagactctctctccaatttgtcaaacatatagtgtaaaagaataaaaagtatattaataattaaatgttcttactaggttgagagtttgaaaaaagtttacacatttttctcttcaaaattgaagataacccttttgcttttctgttgagactcatttttttccacttctttttctattttactctcttttctctactaccaaacatacaaattatttcttgtgatatattttgtttaacatccaaacttttctttcatctatctttttcgtttttccctttcccaaacattagcttggtcaacagggtgttgtcttcatattttgggcttagtagatgttacatgttagctgtgaaggttcggcttcattatagagagttaggcccaaatttagcatcccacctcaaagatatctccaaattcaaagtagcattgttatcattcgatactaattttttttttttttttgaaaataagcgtgttcgtatcattaaataagcgtgttcgtagcattgttatcattcgatactaatcaaacagtaggtaaaattatatattaaattgcaacaataacagtttaacatctcttatagtgtttggcacctttaaaatgccactttaacttttttcaattaaaaaatataaataatttaactaatatatcatcatcataatcagaaattaaaaagaaattattatatattagttgctcaggttcaatccaaccgtgtaggtgtagctact

SEQ ID NO: 65984 - DNA, 904 bp, Cannabis sativa
aatgatatcacctatatttgttcaaaaaaattatatcacattttataaattataatatttcacgaagcggaaccaatatataaattatataaaagaataaaagaaaaattatataaaaaacatgataaaagagacaataataaaaaaacaaaaaagtgatgaaatggaagcaaaggcactctttcacagtcttaattaggctactcaacaacaattgccaatagcacatgattatcttcatagagttactgttactcatgctcgtaggcaagctaatcaagctgcccatagcttagcaaagtacgctagctctagagttggatgaagatgtatcttggataggagaaataccttatcctatgttctctattattgtaaatgacttttaatttataacaatatggaaaaaaaatttaaaaaaaaaataaagaaacaaagaaaaatggaaaagaaactatcgtttcataatttgttttagaacgaaaaaggataattagagaaaaaaaaaaaaaaagttgaggttgatatagagaaagtaaataataatcttatcacctatctttgttcaaaaatattaaatcacattctatataaattatattgtttcatgaagaggaaccaacatacaaattatgtaagaagataaaagtttagtttagaattaataatggaaaaaatgagaaaaaaatatctcttatagatatatagattttatgttataaatatatatatagatttttttataaaaaaaaaccacgtttaagttttaaaaattattaattaatataaaatgataaaaaaaaaatatatgcagatttttttaaaaaaaaaaaggcacatttttttaaaaaaaaaaacttaaaaattattaattaatataattattaataataaaatgataaaa

SEQ ID NO: 65985 - DNA, 579 bp, Cannabis sativa
atcgaaagaaggttcaggcctttagaaccagaacttcagggagatgaaaataagattgaaacatagtaaattcaataaataaaaccaaatatatccaaaaagtatgcaaatatctgaaatatgattacgtacttaaaagcccagcgacaaagggcataaaaattgtctccgcataagcaaaaagagagatccttatcccccaaagattaacaacgttaagaagatagtaagagttggataaaatatggtcaaggcatggctgagtattatcaagttgaacatcagtagaatgagaaagctaaattagaataaaatttaaatgatttaatattaactaaagcagttcccgacaactatgctaaaaaacttgtgaaaattctaatacacaagtatacgtagtcgaattaagtaatataatgatatatagagtatcgttcccacgtgaactgtagttaattattaaataattaaatctatcattctatttggtgacaataataataagaaaagagatttaaattctactataaaagaaaacaaataattaaagtgaaattaacaataattaaagcttagggt

SEQ ID NO: 65986 - DNA, 766 bp, Cannabis sativa
ttacaattttagagccctgagcgtacaggggtacccacctgactcggcttaccttggtcatgtgttatatgattattgatataattaaatatcaaagtatggggtcgacgtgaggcacccaatttaattacattttatattaataattattttatttggagtattgttatttgacaccttaaggtgcccaacaccaaaatgatatgacacctcttgtaaaacttgacaccttaaattggcacttagtatttacctttcatataattaagaatatatatttgatggttaataatcatactgtccctacaaggatggtaactaaaaaaatgtccctgatccgtacgattgccataacaccgatattggccataatattaaagagtgagatcacaaatttgaagttcctaagattcagaatgtgatcacaaatttgcattataatgcaactttagtttgcaaactaaaattttagaatttgtggcgtaacaagaacaccttgactcgatcgaaaaaattggtcccgacggccaagaaccaccacggtggcgaaaatgttattttcttagtctgcatgattgcctcttgctacgtttagattggcaagggttagttagactcactacctgctctactcgtctcgaacacaaccgacgaggaaggagcttgacacgcatatgatcgagtctacagtccgcaaagaagaggcaatttgggggagcaggagcctttcatagggcactttatagttgaagagtatggtaacaag

SEQ ID NO: 65987 - DNA, 1187 bp, Cannabis sativa
ttttttataactccataataatctcagggtttttcaaaagtaaaagtatatttatttttattgatttttttttatcccacactagatatacatatacaaaaaaaatcattaaaaatggtataaattgatttattatatatatctatttattttgtaaaatggcctcaaaaaaatatcgaagattttcagcatcctttctagaattaaatatgatattgagcgtgtttaaaatatcattttgcgaaaagaataataaaaatatgataaaaaaatattgattttttttaaagctaataatatggtaaaaatcattgaaaaatattacataaagaagagtaattagtaaaaatatattactatttcaatatcaatttatgctaaattatttttaatgttgttataaaatagtctctaaaaagaatttttcggattttcaacaagctttctaatattaaacaagatatcgatcctatttaaaaaataataattttgtgaaaaaaagaaatactttactaaacattccttatatagaattacattaaatgtaatacaactaatcaagacttaaaataataacaatatataatacattaaaagcaaaaccttgattttctttgttaaactaattaaatattaagtgattttattaaaataaaataataataaaaaagaataataatatggtaagtgacaggtccttatccaaataaaaaaaaaacacaaaacactcatatctagttgtcctttaatacaatatttttacaaagtctaccacttcttattttctaacatacaaaaattttatttttttatctaaaataaaataaataattataaaaacaacttaagccaccagaacaagcttattataaaaatataaatttatatatataataaaaagtaatttgtagtaaaaatatcgaaatttaactccaaactataaataaatatctaagtttaatttttttgctattgtaactcccctaactgttaaatgtcaagttattattcacgtgtcatttttttattgatatataaaaactatctttttagaaaaataaaaatttaatcgcttagaccaatcattaccacgtaaaaattaacttaatacttaaccgtaaatatttatttacaatagaagttcaacttaaatatttttattacaaattacataacaaaatatttat

SEQ ID NO: 65988 - DNA, 1287 bp, Cannabis sativa
gcggggttatggattttgaccattttacccctactcttgaaaatgcctaagttataacttaaaatggaatttttagtaatttgtcaagtgggtggtttggtggctgcctaggatgatgacacctagcaactagtatttcagccaaagattaattaaattaatctttatttgtattttggataatttgagaaaaagaagaaaagaccaaaaaatagaaattcactctctttcccttctctctcttcgaactagccaaaaaccaggggatttgttgctgagttttgtgttttcaggaaggattgggggaggttttaatcagggtaagccctggacactcgttggttatgtttttctcaaggtttgaattggttttaacttgagattttaggaaattgagactgttagggtttgattaggttatggattagtttttatgttcattttaagttgattctaggttctagttgctgatttgagtgtattgtgttgaaatttcacaagtttgagctttgaaactcaagcttaggtctttaatggcatgtttggattcaatgagtttttctgggttttattggctggaatatgttgtgtatgctctgtttaggtactctgaaaggtttgatagcatttggttgagtattgagcaagtttggggaaaattggtacaaaccggttaaccggttttggcaggttccccgaatagcccgttttctcaattcttgcccatttcagtgccttagtcgggtgttttcctattttctaagatagtgtagtccctagtgattataacagaaccttgagttgtaggtttgggttcccgaattagggttttggacatgtgatttacttggttttattatgtgattagggcatccatccagtaggaaactttctgttcagttcgaccaactcacttgaatctggaaagaaggcaagagatgtctataatgtgtaatatgaatatgcaaagtatttatatgttaagtgtatatgcatgcttatatgtttgattcactacaaacacttgtacggttatggcacaaagtgcattggtatagtatatattgttaaggagaccattacggtgaaaccagtacaagtgcggggtatcactcagtggtactcaaggtactaaacaaaccctaccaacactcgtacaatgaggtacatagtgtatgtggtaaagtggctgttgaagggttgaagggttcgccaagatttctacacccttatcggaattagctgaaaagaattgtatgtttgtttgtgttagcccaagatatgttt

SEQ ID NO: 65989 - DNA, 581 bp, Cannabis sativa
atgtgcttcaccccaccataatacctgggccttaatattttaacctatgactttttaaaattttggaatgcatcagtatgtctgtttttggggtgtctattgtagaagctcccatacttatatatggagatgaatcttctttctcttttaaatttatcaaaagagaccgttaatggctgtgaatattttctccattcaatttaagaggagtggtttgacaagtttgatttgtgatgaggagggattgtcgcctgtcaattttaatttatttatctaattttcatggagtgtggttcttttcaatttctatatctatatctataaaatcttaattctaaatgtattactacaaaatagatttttggtatcagtttgagggacgacttttttaaaagtctacactaaaaattacttcaactctttagtctcagtttataactgacaattttaagtgtcagatagtaaaccaatactaaaagtataaccgagagaaaaaaaaaataaaatatatatatatacaaagtataggtgtccctgttcataatcgagactaaatgatccaacaaatagacagcacctct

SEQ ID NO: 65990 - DNA, 827 bp, Cannabis sativa
ttgaatgtaaatatatataattttctttaaatatttcaaaaccgcgcgaagcgcggctttgtttcctagttccatcatattagaaacatagcaaaattgaatttctaatttttcctaataaaaactattatttttaatataattggtatttgaagagaaatccaacttttagtttttactagtaatagaatataaaacaaaagcaaaattagactaaaatcaaaacaggttccaaaattacaccctactcgcatctatgtatatattttcaaaaccttgatagaagtcccatatgctacctttccatatttttttatactgtcataatatgtcgatcaagacaagagtctccaattaacattacacctttcaatcttgctattcacattacaaaaaaaaaaaaaacaaacaattttgtattaagacaaaatttttcacaaactgaaattatcataccaacggaaagatctcactggtcttaccaaacatttcaccaccatactggtttattaaaaacaaaacaaaccatattggcttacataaaattgcaaccgtactggtcgtaactaatgaagcacccaaatgtgtaaaccacaaaaaacaaacatagcacaataattttgcaaaaacaccatgaaccaaaagagaggaagccacatatcctttaaaaagttcatcagtggaaaaaaatatcaccataagcaaattccatcaacaaaattctggcatttaatttctataattcgcaacaaccaatgcatacttcaaaaactgaaacgaaagcaaattctgggttacaaaaaagaatcaaccattcacaaataaaa

SEQ ID NO: 65991 - DNA, 1335 bp, Cannabis sativa
cacccctggccagtcctatggccagcataggctggccagcctccagcaaagggagggctggccagcctataccctaggaaacacttggctggccagcttacaccctggcagacacttggtgtgcaggcttgaccctagcaggtacttgatgtgtagctgcatgcaagacaaccatccaagttgtgaattgggcttaaacaacccataaaaattggggataaatatcagctatttacctattcttgagggataattaacctattaattgtttattatttattatgtaaaaatactttatatttcctattttttagggatattaggttattattctcttgtaagctctcttatataaagagtattaacctaaccctaattcctctaagtctgaagctccttaacctctcaagctctaagtctgaaaccctaactctctctctccctctattctacacgccccaggctttgtagaagagattaagtctctttcatctctcttacttgagattttcctactgattctcatattataatcttaagagagccacttcagaatccacaacacttgtgatttgagtggtattatctctggtattaatacaatcaaaaggggagtaggtcattacacgctaactaagggggccgaacccctataaaaatattgtgtttctttactttccttttcttattgtgtacacttggtagtatcagtcataaatacgactctgctgttggttggccaaatctgaggttaataattagtaataatctacatactttagtaaaagtaagatcctagttaaatatgctttccaacatcaccttccccagtgatggcctcctgagcgtccacatgagtaggagggttcaaatcatacatggtagggttttagacattgtacgtgttttttgataggttggccatccagtcgttgttcttattgcaaccatttttgtagatgagaaaaatgattaagacatttttaaattctcagtgaaagtaccaaatatttactgagatttttaaaaactaaattaattacgtgtttaagccaaagaaaagaagattaataaggaaaatgagataatatttttacgtggttggagcattaatgagtcttatttcacgagtcattgtattaagctattttgcaatgaattttgcactatatttttatttcttttttcatacaaaattctcaaccctttgcatgaagggataatgccatatttataggtatttgctaatagttcgggcagacctagacccattagagtttgtttttgatgtataaagttcattaatgggataaatacaacataatattggatttt

SEQ ID NO: 65992 - DNA, 797 bp, Cannabis sativa
aatacatcgagatcgttctcggagcattcttggataatcacaaaagagctatatcgataaagtactcaaacagtttggcatgcaagattgtagaccaggtgatacccctatcgttaaaggagacaaattttgtcttaagcgatgccctaaatgaagccttgaagtttaaaaaatgcaaaagattccctatgctttagctatcagaagtctaatgtatgctcaagtttgtacgagtctagatataacgtacattgttagagcgttaggcaaatacttaagtaatccaggaattgattaccgaaaaacaaccaaaaaggttatgagatatttgaagagaacaagagattacatgctcacatataggaggtcagatcactttgaaatcattggatattctgactatgactttgcgggatgccaagatagtaagagatccactttgggttacatatatctgctaggtggtggagctatatcatggaggagttaaaaacaaacactcatagcttcatctaccatggcagcagaatttcttggtattgtgacaataaattaactgtattgtattccaataacaacaggagctcgacgaagtcaaaacacattgacatcaagttccttgttgtaaaagaaagggtacaaagtggataaatttgtatagaacacttaggtataaacttcatgattacaaacccccttactaagggtttgccacccaaggtctttaatgtgtgttttagagtatcaggatatctagatttagagtgaatttgtctttcttatcttttgtgtttttt

SEQ ID NO: 65993 - DNA, 1149 bp, Cannabis sativa
atgtgaacttcggatccctatcatgaaataatggatttggggacaccgtgaagatgaactatttctctaacatacagttcagcatactgatcaatggaaaaattcttctgaaaaggtaaaagtgcgctgactttgtaaacctgttaactatgacccacacagagtcgtactgtcccgtggtcctaggaaatccaaccacgaagtccatggcaatgtctttccatttccattccgaaatattcagtggctgtagtaaccctgcagacctttggtgttcagcgttaacttactgacaagttaaacaccatacgacatattcagtaatatcattcttcatgtctggccaccaaaacatggccttaagatcttggtacatttttgttgttcccggatgaattgactaaggagtcatatgagactcatttaagatttctcttttaatgtcatcattcataggcacacaaacacgattcataaactatagcatttctgtgtcatccactgtaaagtcactagtctttccagctgaaaccctatcttgggatttcaataactctggatcttgcaattgtacttctttgattcgctctagaagagtagattgcagggtaatattaaacaactgcctccaaacgaactcaatcttagctcgtgtcatttcatctgctaactgcttcgaaatttgcttcacggtattcatctgactctggccttttctactcagggcatcagctacatcgttggccttcccagggtgataaagaatctcactgtcgtaatccttcaccaattctagccaacgcctctgtctcatgtttaggtctttctgggtgaagaagtatttcagacttttatgatcagtgtatatctcacatttctcaccatataagtaatgtcgccaaatctttagcacaaatactactactgcgagttctaagtcgtgagtagagtacctctactcctactcctttaactgtcaagaagcatagactattacctttccagcttgtataagaatacagcccagaccctgtctcgaggcatcacaataaacaacaaatttttccttatctgaaggaagagttaacactagagcggtaatcaagcactgcttttgttgctaaaattattaattactacgcaagtgca

SEQ ID NO: 65994 - DNA, 551 bp, Cannabis sativa
agttagttttaaaattggatataattttttaaaattaaaattaaatttaacaattcatatattaggtgcgattactttatttagattttttcaaaatattaaaaataaatttagcaaacattatatcgaatatatatctataatgttttcatcaaccttgagatgagacgagttaggtgtgtaccttgggccccaaatgcttacgtctccataatgtgtagtattttagtgtagaaagtgttaggaattaattcccaacctcatacttttctattttttttaatgtgtagctaaatttttaaaatattttagtactacactaaaatactagaattattattttaattataattaaactatttatataagggctccaaaacttaaatttatttaagaccccttatacctttaggccatgctcttatgtttattgaatgggcttctttcagttttaaccaaaaaaagtaacaatattacaaaaatacttccagcttgccaaataaacgaatatacaaccccaaataaaaaaaaatacacaaataccacttaca

SEQ ID NO: 65995 - DNA, 1682 bp, Cannabis sativa
tctgaatgggaagcacgtgttcgaagtgtcgattgattatctgatatgactttaactaaggtctcttcagttttcgactcattaatgctggttgacatgtacattgaaccacacctaaaaattagcacatttcgattgttatccttcaggtaattgagtgcacaacgtcaacttttgggggaaattcgaggtatttaaattttgaaatgattactttgccccactaatttggttataaatacggttgaaacgttaatcaacaacttttttccattttcattttttgaggaatcagagcaagaaactttttctttaaaatcctttgaagaaacctcatgaaacgtcgagcgacgtcatctgagaaaatctaaagcttcgaacagtgagtaagttcttcatttctttcctcttatatgtttgaatattttattttctggatttttgctgcaaaactttatagtacttgaattgctccaggaaaaccatagaaatttaggtctaggaatttgaaatctttatatgcttaatcatgttgctggatcataactacgttttgatttcgactccatgatattgactttcacttacccatttggggcttagtgaaaataaactttgaatttgaaattttgaaattctatattacaaacctcaatatcatgcaaaatttctattttttaatcctttcatcgagcctagttggtataaccaacctgtttccgttctttatcccaaccagatgctcatcttgtgtcctacctttttgtagataacactggtgagttttggggaagtaaacatcatatcgaccaggatctgcttcaacttctgtatgaggatcattctcgtctctgtgcttgtccgtcttcttctagtgacggtctctccaattcaagattcgaagattgggagataagtagcaaatacacaccttctcaagaacctgaagtgcaacaccattattaccgcaaccatatcgaaggccaaggctaaagatgtttcatctgggaacttaggaaggggtggaggcgatatctaccgtccaatttgatgtatattgtctgacaagattcagttgatactttgcccatgggccatccaaatcatgctgttgcaggtacacccattgctacttttgtcgtaaccattgcaagaaatacaaaccagagtccatcctagaataggatgatagcatgaaccaaacaaactatgtggaagtcttctttctaacccacatctagctcgactcgctacaatgctgagtgcggaacaagcctgacctactatgaaagaagaagacgttgagggggatggtgaagtccatgagatggaggatcagggcgaggtccgtcctgatactacttctgaagctaaggaggaaggtgtagctcggaggatgcgccttggtggctttaacgaagacgacaaacctgtgtctaaggctggtgaaatcctggaggccggtgaagattacgtcaacgaggaatacactaacgctattccccaaagaagacaacgcgttctaggatatcggtaagtttctcctccatccgtggtaaccagggaaaaaagaagaatttgtagaagcacagttacttaggggatgtcgattgcttccttccctctcaaaactagctgattgttgggttttgtgccctaaaaaaacccatttcaatataatc

SEQ ID NO: 65996 - DNA, 1198 bp, Cannabis sativa
gacctttaagctattaagctaatatatgattgtaaaatactattacgctacactcaaaaaaaaatatacacgatcataataaaaaattagactagctttttcagttttcaaaacagttattattaaaaaaataatatataagataattacttattttttttttaaatgaagaaaaaataaaaatctactggaacacaatgtactttagacttaaacgtgaagctcttacaaaattaaaaaattacattaaaaaaaattatgaaatagcacatcatcactcttgtgttctcttattacacatgtaaaaatattattagtagtactagtattaaagctttttatttaattttcaaaaattacttgttataatctctcatcaacacatgtgaaccgtaagagtagtgctatataaaggaagctatagttgtatgttatagggatatagatttgagagtttttcatttgaataataatatcaataattatgggttccattcatgagaatagtaccactactcaagagttatcccaaggttatgtcaatgtgtacaaacatatgctaagctatgcaagttctatggctctaaaatgtgctatagagttaggcataccagatataatattcaacaaaggcaaaggccaaaccattactcttcatgagttggcctctgctcttcaaattcccccctcaagaacttccttccttcgtcgcgtgatgcgtgtactggtacactctggtatcttctcaaatgagaaacaagacgacgatgataaggaagaaggagaagaagtatatggtcttactccttcttccaaattacttctcaccaacggtaataacaatggcgtcccaagtgtgggcggctatgttcttgccgttcttgagccagtaactgtaactgcattcagtttaattggaaattggctaaagaaagatagtccgccctcaccgtttcatttagctaatgatgaagggttgagcttgtatgagtattggggtaagaatgttgatggattcggtgaccgtttggatgaaggaatggaaagtgattccggagttttaaaatttgttctcaaggattttaagtctacttttgagggaataacttcattggtggatgttggagggaatactggatcaatgtgtaggatgctcattgctgaatttcctcatttgaaatgctcagtttttgaccta

SEQ ID NO: 65997 - DNA, 993 bp, Cannabis sativa
ttgaatattaatatttaggaacaatcttagacataatatttataattatcttaatattgttttaataatatatttttctattgttatttaggtattataagtgttagagtaaaaaaatttagtaaaaataaaaattaaaacatttataaaggataaattgtcgtttcgaaccaaattactccattgttaagttaagtaggttggtttgagcatttaattagtttggttctatgaacgaatgttgtagttagtgtctccattttatattgagcattgctatagggtaccaatgatacttagtatgtcactttacaatactttacaattgattagcgatactccctaaaaattataatattatattatataagactcgatatttaattgtaccaatatcaatatttacacgtatgagaatgctagacactgctgataacttttagtgaaatgctaaaagtcaccactggtgcctagcatcctcctcggtatcataccactattggtgtaatagcttttaggaaatattgctaaccaatcatcggacgccacctatagaaggtgctaggcaccactagtacctaatagcaagagaaatactaaaagacaactagtggtgtctagcaccctcctatgtgtcaatatcactatgagtccaactatgtatcaggtcccatatagtttaatgtaataatttttagggagtattactagttaatcccaagacgacatgtctagaagtgctatacatcaatagtatctaatatcaattgctattgggcaacagtggtgtccaatacattctataagtagcgctcaatgattggttgtcgatatttcctaaaagttattttcttaagttttatgagactcgatacttaattacaccaataacaatagtctgataccgaaaaagatattagacaccatgagtactttttagcatttctcatattttagggtgcatcatagaattttaaaaaattatatatagag

SEQ ID NO: 65998 - DNA, 1156 bp, Cannabis sativa
aatccagttttgcctttgttgtgttcctggcttttttgaatttcaacctgtaacttttgccataaacacaattttcacaaaaatccaatttcttaccaagtttacctttgagtatgccttgtttctcaagctcatgtagtcctctctcgctgacatgtccaaatctcatatgtcatagctttgtctggtccattccttcatttttgaatactattgcagccctaccaacaactcttttgccagctaggtagtaaatcccatttctaagctttcctttcatcaccactatagagtctttcaaaactctaagtgaactatcaatcttgatgctgcaacctttaagtgttagtgcaccaatacataacaaatttcgttttaggttggggacatacctcacatctctactggttcattctgatccatttttcattttgattagcacaaaaccaattcctgcaatcttgcaggcttttattatcttctaacaagactaaaccactatcttgttcctgaaagctgcaaaagaacaacttgggtcaagaatccactcatcaccattggcttgacttgatgcaacaagggcattagcagactcatatctatcaagaacacaacctacatctccaaaatccttcttcttttctttgttgagttttgatttaagggctctccactcatctttgaaatgaccctccttcttacaatagtagcattgttttcatgcctttgaatttgtgctggaactcgatcttggtctttgaccactgctactgcccttggaatggttactcttattgtttgacttgtgattaccattcctgatatccctggactctaatttgcttcttgcaaacattcctacaccattgctgtccaatttttcctttgatttcttttgaatttcctttgaattcaaggcagctttaacctctaacattgtcaaggtttctttcccatatagtatggtatccataaaatgttcataacattttggtagggagatcaataatagaatcccttgatcgtcatccttaatcttgacacatatgtttctgagatcaagaatgattctattgaattcatcaagatggtttctgagattctttgtatcatccatcttcaaggtatacagcttcttcttcaagtagagtttatt

SEQ ID NO: 65999 - DNA, 656 bp, Cannabis sativa
gtaaattagttaaaagcaaaatggattccccatattctcatggtaagcctcaggacttctttcatctaaagaagggtgacgatgagaaagagaggaaggagagggaaaagaaagagaagatcaaggacaacaaagataagaataacaaaaaaggtggatcgaacgataaatcccctcaaaatttattgggaaggaagtgatttaataaccaaaatattgctaatataacaatccatacatgtttcataaggggcttacattagtatctacatatattggaaaagtgttttaattacacacatgtaaatatttacttattgtttctacttcggtataggatttaaaaatatgtatagggtacttgttaggatatatatagttcttattcatatattctttaaagatttgtgttttatttaaattataattgatatatgtaagggtgactattggttacatttttttttacctataatagcaagttaccaataggtaaaatttcttttttttttagaatcaattaattataagtctctctcttctgtctcaccgtaatctaatttatttttcactttttaatatttaaataaaaaaattaaataatcaagtgtaataattttacattaaaattataagtataataaaattttaattat

SEQ ID NO: 66000 - DNA, 987 bp, Cannabis sativa
gtagaacatggtccgataatagtccgatagtggcatgatactaccattttcttatgtacaaaaacataaagaaaaaataggtattatcggactcccatcggaccatcatggggatggtaaaaatagggatcgagtatgaatggtgaagttagaagagaagaaaagagagaagggtattatagatattaatataaagtgtgtctatttttttaatttttgtaaatttgtgttcaaaaaaattaatgtacacaaaatgtatgcatataaatttaaattttcctattattaactagagaatattttttattaagtaagctttctataacacactattaatggagatgctctaatgtcctaggtaatgcacatatcatctaccatcaataaaattattttaagtttacacccactaaaacaaaatttgaggaccaccacaacagttaaagaataaatattattatccatttgcgtacgtattatgtaagtattatacatgtgttagaggaggtgtccttacaaaaaaaaataataataaattataggatgtgtttcagaagaataacaagattttgagatctccatccttgataatatattatcttttttattggaaagctaaaccacataccaattacaaacttagctaatattatatgatctttttcaatgataaattatagaaatggtaatcgatcaagtttcgaaattgattggtttgttattatttgattgattttggtttgctattattttaaattttcagcaaataatttaattgttttttcttttctttttagggaaatgattttattgaaacttcagaagtaaatcgaggaccttaagaaggaaaaaaaatgtcacgtgaactcattaattaatctgcaaaggagcatattataattatattactcataaaatatgcaataacataatatatgtattatatacatctcatgatatatattatatatacatcttataaataaa

SEQ ID NO: 66001 - DNA, 580 bp, Cannabis sativa
tttccttccaaattttgttttcaccccgctcaatcgtaagagccattttgacaacttgggcataactgaattgaccccttgaaataatttccacatctcgagcaaccattggtttcaggccttccacaaatcgatgtgctcacactctatcagtaggtaccaaatctggagcgaattttgccaatctatcaaatttttatgcatactctgtaacagtaagcctcccctggaataatccagtaaattcatcgacctttgctgctagaactgatgtgttataatatctctcattaaagacccgtttgaaatcatcccagttcatggtatctgcaccctttgtttgctccaccacctcccacacgatacgagcatctttcctcagcatgtatgatgcacacttcactcggtcattcccatcgacccttagcatctacaaaatgctttctatgcgattcatccactcttcagccaccactgggtgtatgcctctctcaaactcaggtgggtgttgtttttgaaatctctctactaacatctcatgtctagcctccgtagcaggatataccaccgcagctggtgg

SEQ ID NO: 66002 - DNA, 1037 bp, Cannabis sativa
gggtccgaggtcccggttcgggtcccgagtcgcgatcttggtcgcaagtcttgggttcggtcctggtcttgggtctcgggtcccggtcgaggttcgggtccgggtctcggtccaattcgggtctgtatccggctgtgggtctgggttcaggtcccaagggatccgagtttggggtccaagtcttgaattaagtttttttataaatgaattgaaatcgagccggatcagatccgatccataaaaaaattaggcagggcagagcggatctaatccaatatccaataaatatctgaatgtttcggatcagaggtgatccgttagatcggaactccaacccgctccaatgaagtggatctttctggcatgcctaccctaaataaaaagttcctaaacttactcatgtaactctaatgaccatccgtcgcatcttttatcgtcaccgatttaaaatcatataaaattaatgtaaatttcttctttagcataaataatatatttaataaaatctctgaaatttaattttctgaaaatcaaactcacaatacatatatatattcatacataatcatcaaataataaaaataaatgctaattagtgaaatatagagttcggaatatttaacaaaatacttatcatattcctgctaaatatataaagggggcaaactatataatttttctaaccaactatgtagctagatatagtgatgaagagttacataggtatatttatttatttctgattgtacggttcgcaacatgaacgatcttattgaagcagggatggctttgttattagattgttaatttagagtcacaataacaagtactccattgagccagttgtagcttactttatcctaatgctgatgagtaatcttctttcattctactaatattatttcattgaccaattaggataacctcttccttatctacaattccttgggtataaagtaacacattcttgaaatgtatattttcttttaaatttcggataaacaaatagttcctaatattcaattaaataatgacct

SEQ ID NO: 66003 - DNA, 594 bp, Cannabis sativa
aaaaaaaaaagagtttgagtttcgatgagccttttaatttatctgggcttgtgtttggtgttaagcttgaagatagaacagttgtagcctaatttcaacccttattttcttatgatgttgagatttttatttttatcattattatgttgagaaaatgtaaaaaaaaatgtagaagttcaacggtttatggaagagaatgatagattaacaactctttgaggtcctacgactgggtggttctcttttacaagatcattagatacaaactccaacaagtctatattttgggtttgtaattttaaattgtttgagtttttgttagattattagaatacgataaatgagtctaaatattagtttttgtttaaattgagatttgggatttaagtcattctttcaatctaattttgatgtaaatcttaagagcgatgaattttatgggtttacgattttaacaattttatcacttctaattttaattaatttatattttttttttaattaattgtgccatgtgtacataatgtgtacattgtgtccatatgaaaaatatattgtgttcatgtagatagtacaacatgtcagctaatacct

SEQ ID NO: 66004 - DNA, 907 bp, Cannabis sativa
  modified_base (847)..(849): a, c, t, g, unknown or other
aactaagcaccaacatcatgaggctagagcaagtagaacacattgttaggcacattaaagccttaaagagagtttccacgaccccacccatgcgagaagaaaacaaagtctttgatagaattaacaaaatacatgaggggatggataagataatataccgttggaattgtttattgaagtcacatgagaagtacatagccctgatgcacgctctcaatattccacatgtccaacatagtctaagagcaaactaggaacatctagggcatatcggggtagatgaggccgaaagataggacctactcatgatcaacctagtggatcagtacaaaattaccgaaaccatatatcaccaagatgtctctaaagaagaaatatatcatcgacccaataatattgttaggtctgaattccttcaaaagttaccaatctcatcaaacctggtgtatttagaactcaactatgtaaatttgacagaggatatattagaggaagggccagacatagaagagaagaataatcaagttacattttttttttataataaggggttttagtatggctccactttagttaggagttttagtgtaactcctttagcttgttgaaattcataaataaataaagaggttttattctattgggtaaagatttatttgaatcttcttatgttaagtcttactgaatagttaaggaataattgttgcagatataacagatatgtctcttagaattaaggcgtcaaacgaaacagtacttgtagaaataaaaaacattctatcacttaagatcgaaaatatctaccacaaagaagataagattcttagagctctacgagaggtcatcnnnattaatgaagaaatcaaaagagtagtagaggtgagggaagccttaatcaaatcacgag

SEQ ID NO: 66005 - DNA, 1754 bp, Cannabis sativa
ctagaaacaaagagtgaaaactaaccgaaaatacgacccgaaacttagactaattctagcctaacatttgtgtctgggagatttatttttgataatattctggtctcgcttgaagttatgcattacttgaagaggaaacgaatggagaaaggtgggtacatggccattaaacttgacatgagtaaggcatacgatcgagttgagtggtcgttctttatggctattatgttgcgaatggggtttgattcaagatttactagcatgatttttgaatgcatctctattgttaagaaaataaatgcataaaaattagccttttcaacatcgttttttatccgtttgccaaccaaggtccttgttccaaatttttttaaggctccaaatgtaaaagtgggattaaaagtttttatcccactttttatttttttcatgtgtaatcatagggttccatcttaaaaccaattggtgatgagtggagtagccaatgttcttatatatggctcaatatttttacatttaattcatgtggaacaatgttatctaatatcccccttaagatggtgactatattttgctcaccaatcttgagtcaccttatcacaagctatgtcatttcactactagaaatatggtgtatatcttcgattttaacgatacaaaatataaaaatcgaagataaaagtaagaagaaaaagaaagaaaatttgcggacctatatcttcaattattttgaaataaccaaagacataagtcatggagacctttacctttggttattaggaaataaccgaagacataggtgtacctttgtctttggttatcttaaaataactgaagacataggtctctacaactctagtcccatatcagatatatgtggatgcctatcttcggttattttgaaataaccgaagatataggtctataaaatcctaattctagatctaatactctcatttcctctttcttctccatctttcctctcaataaaaaaacatcgccaccatctctcttaaagtcctattttctccatacactatcatttttcctcatttttcttttaaatcttcatattttttgaaataaccgaagacttaggtctcctatacatcttcgggatttttggaacttacgtctttgcctcaattgttttcggtaacgagaatttttttaaccgaagataaagcagctttaaaaccgaagaaaaatgccatttttctaatagtgtttgctccctaatttttgttcgaatctcgtctttgcactctttagatctcgtgtaattgactttactatctagataggtaaggatcaaaagtctgctaaggtaggtgtggatcgaaagtccactaaaaatatggctctgataacatgaaagaaaacgaaaagatatgttgttttctattgaaagagaagatagaaatgaactgaatggaaagtgagaaaaaaagactgctcaatctcaaccattgaggtagctcatatatttatagagtttggttacaagcgattgcaatcattgctaacagttttaaccaactcaactatccaatgagttggttatgaaagaataacaatttgtaactaactcctaagtatgtaccctactcgctaataacaaactcctcttttaatgtttcaatatatccaacgtctactactctaacattctccttttcaaaatcgatggcacacacacaactattactgctaaccctactcgctaatagcaaactcctcttttaatgtttcaa

SEQ ID NO: 66006 - DNA, 686 bp, Cannabis sativa
ttatcccactggcatacatcccggttttcatattagcgaaaaccgggataaaaagccttaaaaaccgggataaaaggcctttccttgtagtagtgaacaatgacccaaactagaaaaaactaacgtgcaaacaagcaccaaactaaattaccatgtcaaaagacaagacttattaccctcttcttttttacttttcctctttcatttgattgttagtatagactaattatttcgtattttaccattgctttcatttgtctttgttttgctaaatggtcactacttgaatactatacaagatgcgctacaagaaagtagactatattgttggtgcggttatagaattgttccaacaaaagttatttttactaacgtctaattgtgaagatcgcagataaaatattgttaaaaaatagcccctaagagattgtgcattttacatgtattctatgttgttaaactatatttggttgactttttaagctaaatgttgcatcaatggcctttgagttgcgtgaagaagggaatttttggtgggaaggggacaagatttggcgagcgtgaactgacgcgcgctagtaaaacttttgggacaaaatttcttgtggaaataaaatgtgggaatagttttaccagtacaattttttgcaccataaaaaccttgtcaattaagaaacgataatatt

SEQ ID NO: 66007 - DNA, 2349 bp, Cannabis sativa
tttttttttttatttttagttttaatatgatttgttcttaaattttttattttaaaatattatttatatttttttaaataatgtaattacgtggaccaaaaattgtgatgtgtacattatgttcatgtagacaatccagttggcgtttaacagccaaaatggaccgaaatggcaaactgttaagtgaacatgagtttgaggggttttaccgtaggaagaaatggtttgggaggttaattgctagcgaggtgaaacttttggaggttttgccgcaatttactcaattaaaaaacaaaagtgttaccaaacgccacttaagttaatgattttattatatttttttagaatattattttgttagttgttctgaccagatggatattttttattatttattttcaatatatattagttatgttaggaaaaacaaggaagactaagttaaaggttttattatgattttagaatattatttgttagttaattctgaccagatggatatacggttctataaatactcttcccttgtttgaaaagtggctttcgggaatgtcgggtgttgggatccttcggggaatggaatttggagagtggaaggtctctcaaactaactcaccattgtaaccgaattgcttatcttcagtacaaaattctattttattcttgatgttgatattgatcataattatgtctgtgtgaaaatttgctgaagcatctattgtgatttcaaatacaaatttgaagctttgtatctaaaattattttgcatatatattgcatgtaactcgatattattttaccttgatttagtgtataagaaccatttttatggaggatagcatgctgttgtgattggttattggtcagtgactaaatgtttttgatatattggtgatgcttaaataatagtggttattgcatttctgtagtggttgatcaattttttccttttgttataggatgtgagcaataagctagatgagcaaaaagatgaatacctctctcagttgaaggagaatgagatgtaagaccacacttgttctagagaaactataatttgatattgtttttttttcatcctcacttttatttttaaatttctctctttttttttctaaaaaaaaaatgtaaaatcatgtgatgttcataatacagacattttccgttcaaaaaaatactagacatgtgtgctgcagaaaaataaaataaaattatagagaaatatgatgctccctttaaaataaaattatgttgcttatttattattattgaaaaataagacgaaatggaatatgtgatctaagcatactatttatatcttgcatttcttttaataataattattgtcaatattgtcagtatgctatacatgattttattttctacgactaaattattcggttgggaatcccagttccctgtgcatgattacttgtttttgactattacacccgtaagcaacattcgggtgcagaaaaaaaagaagcaaacttttcacaacaattttgttgtaaaaacttggtactccgtatttcaggtctttggcttagtgtctttcgagctaatataatctccactaagacctaggtttccagtaaaattatattcttttgtaacaattaactattagagactgagaagaagaatttaaacatatatggtgctctatgttcaggttaagaacgaagctgaaacaactagctgatcagtatactctttcagaacaacatcatgaacaaaaagtacaatttttttacacttgctgaagtaattatatcatgatatgctgttaatgttgttcttggatgaccaagttgtttgtttggtttataatgtacagttaaagcaaaaaagtttggaacttcagatttctgatttgaagattaaacaacatgaagagaaactagtgcaggaacagtcccggataaaggtatatgctgaacaagtgtcacaactgctagcaactgaaaagaacttgcgtttacaattgacagctgatggagagaagttccaacaattccaggttaagtttctccatgttttttcttcccttgcatcgtcaactcttttttagcatctcctgattaaggatacaaggaatggactcactaatatatatattttgattccaatgctttgttaaacaagtcgatgcatagtcgtctaacagctttctaggtataattcttcttatcaagaatctctaatgtataatacccgtcaaataaaagacctatattttctgtcatataaaagacctatattttctgcaccatggtgtgtgttgtgtgtgcatccctattttcaaagtacacacacacactatgtatatagttttttttttttttt

SEQ ID NO: 66008 - DNA, 701 bp, Cannabis sativa
  modified_base (657)..(658): a, c, t, g, unknown or other
agattctcaagtatctcaagggatgaccagcctaatgttcaagaaaaccctccataaggatcataaaatctagaactgatgctgagtgggttggttccctttttgatcgaagatctacttctgggtactgctcatacatttggggaaatcttgtatcttggcacaacaagaaacaataagtggtagctcctagcggtgtggaacaaagtttcgttccttagctgatgaatttgtgaaggaatgtgattgaaacgtcttcttgctgaactcagaattgggcatgaaggctcaattgatgatctctatgataatcgattagccatagcaactgcaaagaatccagtccatcatgataggaccaaacatgttgaaattgaccgtcgtttcataagtgagaaaattgaaaacaagaccatcgccttgaagcatgttccctcaaggcaacaagcagctgacatcttaatcaaagctctccgtcatcctaattttagtgaagctccaaactaggaatatttatatcatctagcttgagggggagtgtaggaaatcaagttagtaattagtctttatattttatttatcctcccaactgtatatatatttattgcattctctttattctaaaagatctagggtttgatttgtatatatatatanntatatatatatatatatacactcattcttcttgtgaataagag

SEQ ID NO: 66009 - DNA, 1493 bp, Cannabis sativa
ataaaataatatataaattaataaatatataatttaaataacttatataaaattaaaaaaattgaaatttgggtatatatggcatcagttaaattaaatcatacagggtcgccgtgatcagcgtcggtagtgaattttgccaagactgacattgaaagccctaaacaactgtctctaaaggtggtttttgtagtaatgaatagattcgtgaactaagaataattaatgcttaaaccacgtaaaactatgtatctactatttatgtaaacaatctgtttttaaaaatctcaataaacagtcctaaatattttttctaacttctgccttgtacgtatatatatatatatatgaatatgagaataaatatataagattaagaatataaataaactataataacaaagaagagaaaattaaaagggttcttgaaaattatttcagccaaatgaatatatataaatatatatttagtgtatcctgtctttaaagaattcaaaaacttaaacaaataaaatttatatggggcagattctcgtgctaataacatcttatagaataatatagaatagataaagaaatagaagaagatagaagacaaagagaataatagaatgaaagaatgaatgagatttttctaaagttatttttttttttttttttggtaaaggggggtgtccagggacacccattcattaaatggcaaaccgccgaaggatacagaaactaaaagagcttaggagctccagaacagatcaacaaagtctcagaaaaaacaacaaagctaaaacataaaaactaacttttgaaaaaacaggaaaaacagataactaacaataaagaattcagtacaacatacttaagaggcgggtccaggatcccattcctggaaattgtcgagaacgatgcagtccatttgatgagggtcaattatccccgagatttttccagtcattgcccatttggctatgttgtgcgctgtgtaattgcacactcgggagatatgagtgatttcccattcatctagtttcgaacagcagagtgcgaacctcttcttcgctgcttctattctgaagtccacaggacactgcgtctttgttgcaaaggaattcaccacactcacgttgtcgctttggaatacaatccgtttcaaaccagaatcagctgcaatttttgctgccatacaaacagcactggcttcagcaattaaaggatcagtgtaggcagcttcttgggttgtaattgattgaatcgttccgaattcatcgcgaattatggcagccaacatactaccatttgggaacaccgctatatccgtattacagcagacccacgaagacggaggtggcgcccaggcgaggatttcatccaccaagttttcagataccatcttatgttctgttagtttcaaccgaatggatctcagaatgtgaggcaaagttgtttccttctccccatgaactcttcgattcctttcattccacacagtgtccact

SEQ ID NO: 66010 - DNA, 735 bp, Cannabis sativa
gtatttttgtaaatatttatatgtggactgtataaatgtttaatgggccggcccaaagtatttttgtaatttttttttcttttttgtatttttctgtttttttcccaatatataaatatctacaaatagcttttatttatgctgcttaaaaaaaaaaaaaccatttatttatctaagaaaattctttagaaataccacttatgaatcatatatccaacattaacgttatccaaaacttaaaccattatcctgtttctatctctccaacctcattccaccataatccaaatagtacctaatgaatgatatacatacatgatcactattttcttcgtttgggcataaaattttacgaatatttaactgaaactccattgccgaaaagtaattggatatcaataaaaaaatactacaagacgaattagattcttaattattgaattctaatcgaaattcacatgatgatggactatacatgaaatttttgagtgactgatcatacttaattaaagaacaattactatggggtactagtactatactacctctataatttggcattttaatcccttttataattaatgagtgattttttatatttttattaaattaaaataagtgaaattaaatattaaattatattaataataatattacatttcgggcccggtaacatttttcttaattaaatatgtattcagatatatattgtgtgacttataaatgataataatg

SEQ ID NO: 66011 - DNA, 666 bp, Cannabis sativa
agagattgggcccagtaatgacgaaatcatcgacataaacaaggagggaaatgaagtgtctttggtgccttttgtgaataatgtgtagtttgcctgtgattgctgaaaaccttcgtctaggagtgcatcggatagctttttgtaccactgtcgagaagactatttgaggccgtaaattgatttgtgtagtttgcacacgaggttggtttatgcattgaaagaagaaggaagtgtgagtcctttaggaagagtcatataaacctcttcattgaggtcaccgtttaaaaaagcattgtcaacatctagttgaagatgggccattgtttgatggtggcaatggcaagtagaagtttgagtgtaaccatcttggctacaggagagaaagtgtcaaaaaaatcaagtccttgttgcgtgtatcattgcgcaacaagtctcgctttgagcctttccacgcttccatcactattaaatttgattttgtatacccatctgcatccaaatggcacgtttgtttggtggtaaaggcacaacactccatgttttgttcccaatgagcgcttttagttcattgttcatagcatggacccattgttcaaattgaatggcttcttgatatgtttgaggttccctcatcgtggctattgcaaaaataaaagctttgtaagg

SEQ ID NO: 66012 - DNA, 519 bp, Cannabis sativa
caggataaggactctttcttttcctttttttgtctttggattttattattattattattattattagcctaattaaaaaatttattggctaaatttaacatgtatcaaattatatttttaaattctttttcaattattgatattgttgaatttagaacttttatataatttcattcacttttattaattttgtaattatttatgtactaaatcatagtccttatattttgatatttactaaattatgtctttcgaacctttaaatacaataatatcaatagtttatgagagaatttcaatgaccttaaaaatttaaaagatatgatttaatacatgtgaaagtaaaaatttaagggacaaaaactctaattaactttactattattattttatttattaaaaaggaattattaagggaatataaacgttcaaatactttaatgtttatcaattgtacatttacaaaaatggagttaatatattattatttaagagtcaatatccctcttggaaaaacaa

SEQ ID NO: 66013 - DNA, 832 bp, Cannabis sativa
ttagcccgcttatgcccaaggccagacctaatgattaatataatgactttaatgaaatatcgataaccaattacaaaactatcactttgaagtggtgttaggcaatagacaccattgttatcttataacaattctcttttataataattattaaattaaattatatgagattttatatttaattatacgagtagtaatattacaaaacatattattagtgtagttaggatacagaagataaaacgagataaaatcttattgatattgtaatttctctcatagtaacgttgaaaatgtcttaattaatcatcacatatactttatgtttcgaaaagtaaaaaatcatcacatacatttgaactgagaaaagaatagtcctccatcatagcttggttgttttccaaataatcctaatgatcttttttcactgtgatttttttagagtatttttactattatatataaaaaaacctaaaaaaacttatttaaaaaggcgttaaattttttgactcaagacttgagattttttgactcaaacccccaattagtttgagaagagttttcattaattatgagaaatgcaaaaaaatatcagtagtgtttatcactttcctatgtgttaatattgctattggtaaatatcaaatgtcatatagttttacgtaataacttttagggattatcgctagctaatcacaagatgacatatctaaaggtactaggcaccgctaatacttaataataatactcattaattatataagatacaatagttaatttcactaatattaatagttaaacaacattgattccttttatcatttctcatttc

SEQ ID NO: 66014 - DNA, 1485 bp, Cannabis sativa
tggacagacactcctatttaaaatgggataataccaatttaacttaaagcaactaatttaattcaaattgaaattgaaaaaatagaatatctcattagagtcttgtctttttacatgcgtggaatgtgagtgtgagtgtaagtatttttctgacgttttctttgagtgatacagacagaaactttgttttgttatggcttctagtagtactttgccaccagattttgaagatagctactcgaagatacaactggaagaagaagaggaaggaaccctgtaatgtgaattagcagaggatgtgggccaaccagttgatgatagatggtgtcttgtaggtaaattcttaacaagcagagttattgattttctgtccatgcagcacacgatggcatcgttatggcaacctgggaaaggtattttcgtgaaggaactccaaactaacctgtacctctttcagttttatcatgaagctgatattgaaagagtcatagaagggagtccctggacttttaataagtttcagctagtttttgaacgtctcaagaagggagaggaacctatgttagtgaagctttgtcgcctagatatatgggtgcagttgcataatcttagacctggttttatgtctgactctatagtccagagagttgctaattatattgggtcgtatgttaagtcggatcctaagaactttaatggaatttggagaacttatctgcgtgtaagagttagtattaatgatgaaaaaccgttgaagaggagaatgaagctgaagaaaccagatggtgactggttatggactgatttcaaatacgagttcatccctacattttgctttatctgtggcattataggccattctgagagattttgctcgcgtctatacgatactccattggagctaattcaaaaaccatatggcttgtggatgaaagcggagcctaaacggaagaataagttgatcggagctagatggcttcgaacaggcacggcggcggatgctcaatttgctgatgatgttacagcaattaatgcgcctacaattactcctacgagtattcagggattgcaagataagaacactactgttgagggagattttgcaataaatagcatcaatcatgggttgggggttcacaaaggaattgccaaggatcaagggattgcgttaatcaatgccaataaggaaatactagctgaaaacttccttactgaggccatgattatcgttgattctaaaaaaagaagattgggacaggatggcaaagaagtaatggatgaggatgaggtggaaggaattgatcatgtgtttgatggatcaaaaaatgggtctatggtgggtcctggttctcaggcccaccaaggattatgagtgtcctgagttggaattgctgtgggcttgggaacccacgggctttacaattcctacaggatcttgtattccaaaagagacccaatttggttttcttatgtgagactttatgt

SEQ ID NO: 66015 - DNA, 841 bp, Cannabis sativa
attattgcaccttaaccaagagtttagatttgtgttaccaggttcgggacgaggaagagatccgttgatgaacgcgatcttgttcttggccatcaatgccactgtgatacctcgtttccacgactgatagttggttccgttgaggacagtggacacaagaaccagacctaggtggtcgccggtgttgaggaagaacgggctggaatgatcatcagcaaccgatcgcgattggagagtctgagttgaattgtcgtcagcaatggtggaattgtcgtgaaaaacttgatctgcgttctgagattgaactcgaacaggagggattcgacgaggaactgctgaggaagggggagcaggaatggagtcggaattgacttctgctgtgtgattgtcgagcatcgacgatggtggattgccatcttgggatcgagtggttggcctggccatggaagctgagggcttgtgttcttctgataccatatgagaaagaatagagagaaaaagcaaagaaaaatatcaaagcatttaattttattatgcttaaactgattttacaaaaggggaaggagcttatatagctctgtataatcaagaagagctgtaacagaattgtacaactgtaatataatctttgtaacaaacaaaacaacccttaactaacttaatctaaagcttaactaacctaatccaaactaatcctaagataagtcaagcataattgctagtttgtcaccatgtggtcatgaccactcgatcatcttaattctaacagaagttaattaaaaatcaaacgatgctctgctttaaatctcattccatcaaaattcttataaaattaaaattt

SEQ ID NO: 66016 - DNA, 905 bp, Cannabis sativa
  modified_base (29)..(58): a, c, t, g, unknown or other
tgtttattttattgttttagaaattcatnnnnnnnnnnnnnnnnnnnnnnnnnnnnnntaaatctagatcctggtaaaattaattccaacaagatagacattgggaatgtcagagtattcgaggtttcagaaatgaccaaaatacccgtaggtggcaagtatgccttttggcttaggcaatggcaaaatggtcatttttccatttgggtttttatgtcctttagtgattttatttatgttagaaaatatgaagttaattttttattttttagataaaactttagtttaattcattttgtttcaagtaaggaaataagacaaaatttcatctctcttcgactctttctctctctctcacccttgagaaccagcaacatttagaggttttctgcagcttaattcaaggttttctagcaagtattttgtgatttcaacccaaggtaaacactcaagcttctctctttgtgattccttaagtttcaagctaagtttatgcataattttctatagttagggtgatataggtttaatttggtttgaattatgttatgatgttatgttaaagttatttaagctcttttaagttgggttggttgattgttatggtgattgagcatggtttgagtttatgaactcaagctttggtctctaatggtgatttttgctacagagtttattggttggttttattgtttgatttctacttattttagtgtaattaggtactctggaaggtttggcagtatttggggtcgaattgtggtgtttgtgatgtttttggtgttttctgtactgaattggtcaaccgcttcagtgggacctgtagaaactagaattttggttgctccccaagaaaccccacagaactggtcttctggttggggaaccagttgttgggttttgtg

SEQ ID NO: 66017 - DNA, 622 bp, Cannabis sativa
tggatatgtaattgtattttcttgtatgaacttacaataatctaatttgcttattttacagttaggtatctaatttgtgaaaatggaatgaaacttttaggttttatattcaagtttcattacatgagattttttttagatttaagtttatatatgtatgactattttgatttgaatagaaatcataatttgtaatctctcaaaaatttgagatcatgttgaggctatgctgagatttggttctgtgtttacttggtctaacaacgaagatggggctagcataatatactcaaagattgaccatgtctttgctaatgaggagtggtttgattcgtttcctaatactaaaaccctatttaggtgggaaataattttagatcactattcttgtttaatttctacagcagcctctggaataatagggttcaaaccctttcgatattataatttttgggccaatcatccagaattgaaagaagttgttttgaataattcgaggaagcctttggctgctaggggtctcctttctatatacctcaatatgatgagattgaagcattgcctcaaaaaatttaatcaagagaccattggagacattgggaaggtgtatcaagcagcaaaa

SEQ ID NO: 66018 - DNA, 715 bp, Cannabis sativa
  modified_base (345)..(355): a, c, t, g, unknown or other
ctagggtcaaatcatgtatatatatatatatatatatatatatatatgagaagagaaatcctaaaaagtagtattgatgtttagcaccctcctacatgttaatattaatattagtccaattaagtattgagtttatatagtttaatgtaataacttttaagaaatatctctaaccaatcgcaagacgatatgtttagaaggtaataagcaccactagtgcctaacagcaatactcatatgagaaatgttaaaaggtacaagtcagaacgataattttttagtcacaatataattctttttgtgactaaaataaaaaattgtttgtaactaaaacatagtatttannnnnnnnnnntcactaatttagttttagtcacgatataagtattgtgactaaaaatatatttaatcacaccaagttgtgattcttgtgacttatatctttaatcacagactttttagtcacgacataggaataataatttataattagttatatttttttcactttcagtcacaaattttattgtgactaaaagtaagatttttttgtacagtgagtggtgcttaacaccctcctacgtacgtgttaatatcgctattggttcaatcaagtatcagatccaatataatttaatataataattttaaaaaaatatcgttaactagttacaaaaaaatatatctaaaatatattaaatgtaacaagtaatat

SEQ ID NO: 66019 - DNA, 865 bp, Cannabis sativa
ttgttttcttcatagcactatatcatgtgtgcaactaatttgacatgttaagaaacacaaaaaataatagagagaaagagtaagaaagcttaataatactcattaagatttgtttttatatatatagggtatttctattataggtcctaatgtattgcacttatactataggaaaactattttcaccaatcataacctaaaagagagaaggtgtacatagcttttgttggaaaaagcataggagattatattgtttcagtttatttattgatatttcataaagtcaattaggctggtttgataataaacacttaggtgattggctagaagggtcctatgggcctgatatatagcaaaaatatctacaatttctcataatatatatatatatattttaaactttaaaattacttattagttttatgaaaatatgacataaatataattttattttttcccgttttacattaatattttatatttgtaagtgaattacaatctagaattaattacattaataagcttgtaattttttttttttttgacgtggtaaaataaagtcacgtatgattaataattcagcaaaccataattggcagtagaaccttctcgaaccatgatagctcattgtctaatcgaaagacatgttttgtcaaaccatgagctacataatatttatcgcgagccacatgagacaaaactgcctctgaaaatttagacaataaagctataacatcttcaatcagcaccccattacattgaaaaatactttccctttattaatagttgttgtcagagttagcgaaactgaaaaaaacatcacaacaccaaaccaaaaattacatttatattagaatgacaattt

SEQ ID NO: 66020 - DNA, 1360 bp, Cannabis sativa
cattttgacaatatctccttacggtaaacactcaaatattgtcgtgctactgatacttccataacgtttgtggaagctacccaaaactagaatatttctgctgagatcttggattcatctagttgcgaagatgatccagcggtgattgctatgcaatcccgctcctcatcatgaaaattgtcagttggaatgcatggggtttggggaattcgagtgcattctgtcatctccgtttgcttgttcgtgaacaaactccccaagttttgtttcttatggaaacaaaaacaactgctggtgtacttactcgtttaaagcaaactttaaatttcaataacggtttagaagtttctcgtgtgggtatgaaagggggactgatgttgttatggcatgataatattgatgtaactctcttgtctatgaatacaaatcattttgactgttatatatcttttgatgatggcacgcgatggcatttttctgctctttatggtttcctggaagcttcaaataaaaaacatacttgggaattgattaaaagattggctgatgttagtccacttgacccatggctgattataggtgattttaatgagattttttaacaagaacacaaaagtggtggccctcttcaaagtgataaccaaatgcaaggctattaaactatcatcgatcgatgcttcttgactgaaatgactcacgaaggatctgattttacttggaaaaaaaataggaaaaatccaaatgcattacgtgaacgacttgactggtgctttactaacaatatttggaatgatactttggttctccctaaagtttcacaattggattactacggttcagaccatagagcaatttttgtgaatataatttttgactcaaactctaatcctgaacgtcgacgctctcgatttcattttgaaaaattatggctgaaagaacaagactgtgctgacattattttaagttgctggacttatgattcactggatgatcctacaaacgctcttatcacctgtttgagtcgttgtgcaagtgatcttcaatcttggcataatgggaagttcagcaattttcaaagaaaaattactgctgctcaaaataatgtcaaaaatctccatgttgttgctacaccaaaaattgatcattcacaaaaagttcaaacagcagaatctttattggatgaactccttgccaatgaagagcaatattggcaacaacactccagaattgactggttacaatcgggagatcggaacacaaaattctttcatgctaaagcttcagctcgtaatgccacaaataaaatccgttctcttcaagatgaaaatggttatatagtgacatcaaaggatggaatctc

SEQ ID NO: 66021 - DNA, 758 bp, Cannabis sativa
gttacaataaaaatgtaaccattaaatagtcacccatatatttatatagtattattattagattttagtgatgtttccattgttatgccaaaaaataattaatgatattttataataattattaaattaaattattcgttataatttgatatttaattttattaataataatataacacattaaattgtgttaaatattggtattttttagtattaatattagtatgagtagtgtttaatattagtacttttataataagtattaaattaaaatgtgtagaacctttattaatagtagataatgactatgttgttgaataggggaagaatttgtttagatagattattgttgacattagttgaaaaaaagtatattgtaacgtctttgctttaagtttctattgaactttctcttatgaatttatgactcttatatacgagtacgagttaccagattattgatgcaacttgttgatataagtagtatcaatcaatctatttaattaagttctttttaactttataatctcatacttgcataatcttaaaattatcacacttaatttttctcatgagatgatgagattgtatagtttaccgagtattttcgcgcgactactaaatgtcacatatatgtagttttctctttaatataatattactaattaaaggagtgttatattattataatatactcttttgatattaattgactcatcattttcagttcactctttttgtgtacatttaacatgcaa

SEQ ID NO: 66022 - DNA, 1087 bp, Cannabis sativa
  modified_base (502)..(520): a, c, t, g, unknown or other
aaggcagctgccttggaaaaagctttccccacacgtgaatatatattttgaaactgtgaggaaagatgaagtgagagctaaccatatgcatcttcggcaagcagagaagaggatgatgtagatgctttagaggaaagaaggccgaggattaagaccatctctaaagacaagctaaatttggtgtcaaaagaattactactctaaccataacaccaaaaattgcaataaaaaaatatttttttattattatattcattttttattttaataaaaattatcataattgttatactatgtattattaactgtgctttaattttataatgttatattgtttagtttaaagtatgtgtagtactcttgattaataagaatatgatatttagtgtattttatttaaattttatatgtggttaaatttgtattatttttattatgtgatttttttttaaaaaaataaaaaatataataaaattttacttaaatcataattgaaaataannnnnnnnnnnnnnnnnnncatttaaatttacacaaaaaaatattataaggtgcttttacaatgcacccattgaaataaaagagtcatgcgatagaaaatttaaattttatttttggcgttttaaatttttctaaattttttgaaattttacaggatgttttatataactataatgtacacgatcatgaaaaaaaaaagactaaataagtctcttgaatgccaaaacaagtaggagtatatcagttccacttttaaagaagtgtattatttttggtgtgttaaatttttctaaatttctcaaaattttacaagatgtcttaaataattataatatatacgactatataaaaaaatagattaaaaaagtttatcgggtgccaaaacaagtagcagtagatttgtaatcatttttaaaattgtgcattgtaaaactttccaaaaataaattcttaattttataaatacaataataaaaatatacataaatattaactaactcttcgtttggtaacacttttgttttttaattttttaatcaaaaaatgaaagtaaaatttttgtttttaaaaatttatttttgaaaaa

SEQ ID NO: 66023 - DNA, 755 bp, Cannabis sativa
atatggcatctaaatcctcaagtcgatactagctttgcatagttttttccataatctcctttattgttgacaaggagaggaagtcggttttcttagtccatcaagtgactaattttgttcatttcagttctaccttgtttagatatcctcctagaacactctactgctaggtccaaatttgtatctgagctagaacatgagtttgccatatctatattattaacaaagataatataaagttagcgataacacaacaactacataaaaagacatgatcacaattatttgtgttatgcgtaacactttttctttaatatttatgtatttttagtaaactttatcttaaatctaccaaaattttagcagcataacaactgtaattggacgttcccaaaaattttaaacatgcataaatcacacaaacaaaacaataaaaaaccaacaaaataacattaatacataaattatccacccatccgacaacagtgcatgtattcgcagaacctacttcactatagttaaatttttaagatattcaaacttaacaaacatgcatattattccacttactcggccgtagtacaatataatgcagaacctacttcaccatgaatgaatatttaagatattcaaactcaactaagtattgataaataattaattaataataaaaagttagtgaatatacatacctatagcaagctaaaatccaataaactccaaagtattcagaaccttcaaaattagctcacaac

SEQ ID NO: 66024 - DNA, 3377 bp, Cannabis sativa
ccaaacctagcgaagaacataccagaatagtactctgaaaaactcattgggaatctaaccatcgaagcttgcctcataactttgttaatccactcaagtttcaagggtttcgaagtgagaattttaataacaagagaaaaagattcaataggaggttcatggtttaaggaaacatgatcaaaggtatgaatcaatgacttttccacagttaaagcaaaactagtggtaatcggttgactagatgttgccataataacgtaagagctaaaagactagaaatggaaaataataaaacaagtgagaaatgctaaactaccataaaacccccaaaatcttaaatagaaaaacttacgcaaggagaggaaatacttggagcacagatgaagttagatgagttgaagagatgtcgagtcagtcctaccattaagcttccgtaggccatatcttctgagtatagcttccatgagggcaaaatcttttgggaaaactggaagcgacagcaaattaataaagaagagattggcaaaagaacgagtactaaaggaaattagcaggcctaattaaatgctcgtacttacaaatcataatcagtaagagaaataaatgcaaactagtaattaagggtaaaatgggaagaaaaattgaacatgtaaccaaccaaaatgacaagaaaagaaaaggaagaaaatagaaagaaagatcaaggagaagaagaaaagcaaaaaggaacgaagaagacacaaaaagaactggagacacccctagagaattctagatccaaagcatttttataaacacatttgttatgttgatcagccagacctaacaaccaatgtcatgccacatataacactttttttttaaaccaaagcgctatatataaataagactagacctcgcgttcattacaaatgatagttctaggtatcgaggatagctccacgaaacctgtaatgttctgggtgaaggcccatttagccacattgtgggcagcaaaattacatattctagaaataaacgaaaaattacaagataaaaaatacatagagagttgattacagacataaacataattatcaatattccaatcataatgaattcctttcagcgctttgataaccgtttctgaatcactttccaccaaaacatagcaatgctttcttaaacgagcagactctaaagcaagatggcacgcagccgcctctccaatcaacgggtcatggaagttaagtctggaggtaacagcccacactaccgtcccagtatgatctctcgccaaggccgcaatgaacatggagtctccaccaaacttgacatcacagttgattttgatccagtcatccggcggaggggtccaaatcggagaagcagtagtactcgtcggagggaataagcaggatgcgtaatctgtataacagtgagagatagaattaatagcagtcacaaggttactcggttgagaactatgtaccttgttattacgggtagtccatatagtgtccacaacgatagacgcatacaggaacaatttttctgactccaccccattcaacctaaggttccacaaaaatttaacccagtcccaaacccgacctccagagccatggatcaggaacaccccccaaggggaggatctccaaagatggtaagaaaaattacaataaaggaacacgtgttccatcgactccgtagcctccccacacaaagggcacgtgtcatgatcaatagggattctcctcgtgaggagaccgcggatcggaatagcattagaaaggatgccccaccagaggtatttatgtctttctagaattttggagttccaaagtttgttccataaggccggcgccaccacattgggaggggctctctccttcgcttgaatcaaataagcagacttagtagtgaatttaccgcttctttccttggtccaaatccacctgtctctcccctggccacaaggcctcccccctttgaggatattcgtaatggtaacagaatcaaacaaggtcccaagcctagaaaggtactagtccccatcattcgtgagaagatccaccaccttatccaccctctcttgacacgaattgatgggcttcgggtaaaacccatctccatgaacaacccacggatcattccaaacatttgtatcttcaccatttgagataaacttgcaagcgccctttttgaggataggaatagtcttgaccgcatttttccagaaccacgaatctgaatctttataggtagcctcaaaaaaaggcttacttttcaggtatttagctctcaacaccctgcagcaaagtgtttgattctcagtaaggagtgcccatccccgcttagccaggagagcctgattcaattccatggatttacggaagccaagacctcctctagatttgggtagacaaatacgatcccaggctttcagatacaatccccgatttccttgttcacatccccaccaaaagtctctaatcattccgtcaattctcgaagcaagattcttggatagcttggtagtttgcatagtgtacacagggagggccaggcccacagatttgataagcgtggcacgacccgctttagacagtaattttaatttcaaccatgcaactttgacacaagattttccaggataaaattgaaatccgcatccttgcgcttagatcgaaaaagagggagtcccaagtaattaatgtttgaagtcaccaagttaagccccagctcctgcatgatcccccttttcataccctcactggtattgttgctgaaaaagatagaggttttaagcttgttaacacattgtcccgactaactgcaaaacttctcaaggcatctccaaaaacctttggcctcatcaatagttgctctacccactagaatgagatcatcagcaaagaataggtgggataaactagggccatctctactaagtttgatgcatttaatggtgccaatgtccatggccttctcgagaatccgagagagaatgtccgcgtcccaaataaagaggtacggggacaggggatctccttgtcgtaaaccacactcaggagtgagactgctaaccttactcccattgagaaggatgtagtggtaatacactgggagacccacttacggaaaaggtctggagctttaaagctactaagcacgtgatctataaaactccaactgagcttatcataagctttaaccagatcaatcttgatcgcgaaaaagacttcctttcccttcttgcgtttaaacgtgtaaaaaacctcctggaccaacacattgttgtcattgatgcttcttccggggacaaaagcagcctgggtagggcagatcagtctagggagcaccgatcttattctattagctaattttagagatga

SEQ ID NO: 66025 - DNA, 937 bp, Cannabis sativa
aaacagactaattaagatgaagaaaagtcaaggcacatatatagaacatgtttttgtttaagtaaatttgctctctttataacttgatgatacaatcatttctcaagaaacctgaatcaagaccttcactctatcacaaaaaagaatatgagaaaaataaagaagaaaccagatcaggcttcataggggtttgaaaacacaagtgaattaatacccccaaaccccggcccacaagattaattgagaaattgatgtttgaaaattaattaaaatattaaccagttttttttttaaaaaataaaaaaataaataatcaaaatattcaccatattgttaattgggtaattgcagttatcaatggacttaggcatgaatttcttattcactcatttttatttttcgacagaagtcgctcattcgattgagatatcaaatcaaaggtttggcacaataggtttaatgctatccaagaaactttattccaaacctccttttaggattgctgattaataacttctgtcatagataaattttgggacttaagccttattatcatgtcaagcaatatcttgaagatgaaatttttttagagagaactagaaaaccttaggtttagagaagttagcttgtgtgttaacttaacattatatatatgctgaaaagcaagaatacaatataattgaaaatagttagagaagtcaccagctttgagtgtaacaaactcacttaactaactacagttgaatataaactagctaactctatttctcttcgctaatacccctcctcaagctgaatttggcttgttacataaaaactgaaaccatggagaagataatggcttagtaaatgggtttgcaatttgatcttgagtagagatgtagcaaatttcaagctttgctttctacaatttgatcttggatgtagtgtacatcaa

SEQ ID NO: 66026 - DNA, 954 bp, Cannabis sativa
tcaaggaagattaagaacaagggagagactacatagatttggcatcattgattgttcaagttgtgtgttgtgcaaaaatggtgtggaaactgttaatcacttgttttttgagtgcagtaaaacaaagcaatgtctaatggaagtcgcacaatggctgggctgggaaggacaggccacaacaaagctaaaacaagtctctaagtggattaatcgaaccgaaactagtaggtttccaaggaaggtgatggatgctggtttagctagccttgtttaccatgtgtggaaaatgaggaatgagctaatttgacaaggaaaggagcctaattgggtacacctaactgctgaaatcaaagagaatgtaaagcaaagagtcatccttgtatggcctaagaaagttagtcaaaaagatgagatttggttcaataacttgtaaaatttatgtatagatagatataccaaggcctttgcaaactttgccaaggtgcttatagattgtataaacattgttgtgagcaataaaatttacactaattcatcaaaaagaaatgcagagaactctggccttggcagctatatcaacctggggattaaaattaataccatccacataatgaaaatgaaactaaatctaatcatgtacatacattcatacaaacatataaatatattaagatttattagaaaattaaataatcagaaatattattaagaaagtattgggagagcatgatgaacaagaacacaaggtttgtagcgtagagattcctggcaacaaacagagataaggatgtccacacatcgacgacaatggcatggaaactaaaagactcagccgagaaacctcagcaatggcaaagctttgccttcactctcctcattttctctctcttcccaatccctctctacgctcgatccgtactcctcgttctccaagacgatctcaaggactcaccg

SEQ ID NO: 66027 - DNA, 981 bp, Cannabis sativa
caagattgggcaaaagcaggaatttaaattccatgaaagatgtgaaagcttacaactcaaccacttgagctttgcagatgatgtgcttctcttttgtcatggtgatttgaagagtgtgtacttcacgatataaggtttaaaattgttctctttcacatccagacttcaaccgaacccatcaaaatcaactttttattgtagtggtatgcaagaaactaaaattcagacgataatcaatgcaactggatttaacaggcaactccttcccttcaagtacttgggaattctaatttgtgctaagaagatatcaggaacagagtgtactctacttgcggaaaatatggcagctagaataaaaacatggagttctagaaatatttcatttgcaggaagagccatactcatcaactcggtcctgctctctatacacacttattggagtcagatcatgaagctaccaaagaaagtaattacagaacttgaagcaatatggcgagcctttctttggaagggtcaaagtatgatgcaaggtgcaggactagtggcatgggagcaggtttgttcaccaaagaaggaagggggtgttggtttcaggaaaataccagaatggaatcaagctactctctacaagtacgtgtgggcattagcaaataaagaagataatctgtgggttcgatggatacatagtgtatatattaaacagggggattggtgggaatataagttcccacaaaatggcagctggtattggaaacaggtggtgaatgcaaaggaccaaatcaaaagcaagatggatattcagcggttcgttggaacccgatataccattgttgaagggtataagttgctttgcccagatcagccaaagatcacctgggatatagaggtttggggaaggctaaatgttcccaaacattgctatattttctggttagcaatgcacaatcaattgagaacaaaagcaaggttgaaagctcataa

SEQ ID NO: 66028 - DNA, 814 bp, Cannabis sativa
tttactaaatttatatcaaatatacatttagttttacattctatttctcaaaatacaaactcacatacttactacacacatcacatacttactacacagaggccagatcttgggtataggcgagctagttaagtttatacttaagacccacctaatttagtggctaaaaaaataaatttttatttaaaaatacatataattttttattagttttgaaaataccatattttatttcaaaataaggaccaattttttttctttatgatcatctaaagttcaagatcggactatacaatacttggatttgccctagctgaaatatcatatgactataagtatatttattggtatgtacacttaccctaaatgtaaataactttagcccactgttatttaagatatatatatatacaataccattaactaaatgataatgataataattttggttatatatatgcttatagattgtgtaatgtttgtgaaatttctttaataattattactttgaatttaacagtgggcgattatatatgccaactcctaggtactaattatcacactgtttgaaagaaagaaaaaaagttcagtttcaacttgagcacactaatatatatatatacgatcatggttttatcaattatctttagatttgattacattttcctttttggtagatttaatccacttgtgtttgttgtttcactaataataataataataagagttaacatcattttaaattttgtattttacaaaaattattgactgaactctcacatcatcatgcattatataaaaattaccgattaaa

SEQ ID NO: 66029 - DNA, 1154 bp, Cannabis sativa
ttaatatgtttttactatatatatatttatatatcatataatttatataattatttataaaatataaaatagaaactaatatttttttttatatggtggttaatttaaattttaaattcaatttatgtatatttgtttcattattacaattaactaaaatataacaattgaatgtaaaataaaaaaatattagtgatcggtttggacggattaatctgacaaaaccgactaatttcattaagcgagttactattttcttttttcttaattggatagactgcgcttaaatttttgtaactcaatctttacattgaattgagtaaaatatagcataaactgactaaaccgatcaacgtacactcctagttagtactccaattcgaacccatctgtccaataaacagatccaatctaatttcagcggattttgaaaggccagacttcataaaaatggattctgatggattggacggcgaggtggattgacagttatttcgttctcctaccttaaacataagccttgctaagctttgctaaattttagtgatacatattttggttagagacgacggagtacaaaatttcaaatactctttgtgtagttgggatgggacagactaccccatgtagctgtaagccaacactgttcagaagcttgtttcctaagcaaaagaaatctaaaggcaccactcctctagctactctctatttttcttctcttccttcacaataataataatcaatgattaaacaaaaaagttatatacataccaaacacaaagataagtaaaaatatcagcagccaaccccaaaatccatctgccatagaacaggatgataaggcatctctagcactcagtgacttcttataatcctgcaaaattttcaaccaacgtgaatgtttagacgacattatatgccagtgcatgcaataatacattaaatttaattcattgaagtgtcttaccttcccaatcttgttaattccggttcttcaagaagcatgtcctgtagaggctttacgtctttatctttgcttgcacagctactaaaaaagaaatagaaaattaatgtcatccatgtcgatcaactacttgtagagatgacatgaagctaacatgaatatgtattattgtttcgtgaacatattaatt

SEQ ID NO: 66030 - DNA, 1116 bp, Cannabis sativa
agttttgaggagcttttcccaagcgtcctaaggcttctgctggtgcaaatcctactgctgttgctgctgcaagttccagttctgctcctgcagatgtggaggaagtcaagcatgaagttatcctggtgaacaatcgtctagctaccatggaggaggttcagcaagagatttccaagcaactgtccactctgttcaagctttacggggcataagtctttctttatttttgattttttgttgaacatattttatttttttacttgtctttggcttttagataaacaaaaagggggagtaatagatttttatttgctttgttttctcaactctggacccttattccagggggagttgagattggtacctgtatttaactttggattaaagttagctttataattcggtttaatgttgtgtttctcagggggagttttgtttggtatggctaactttgttttgcaggtactattatgttaaaaaatattttaattatctaaagtgccaaagggagagattgtaaagtcattttttggcaatttagatgtcaaaatatttttttatttatggtgagatttctgtattaataaactgattttctcacatttatatttgcttttaatgttcttttctatcataggaaagaatcatttctcaacagtccattttctatgtttggaaacttcttgtaagagaagaaattctcttatggaaagttggcttttaatggaaactttgacctttgttatttctctttattgcattcgattgtgtcttgatatattcagatcaggcacactgtttttggcaggtatcaagaccatatacatgatcagacactattttggcaagtttcctttttcttgtttggtttgctgcagcagaacctacctctaatgctgcaaaacaggaatttcttttagaaaagtttgtacagctgtagaatcgactttgtggctatctccagggttcctatgttctataaatagaacctagagagcacccattcgattaaactctttttttttttgcatattctcatttgtgaagagagagttcttttagtgagaacctagttgttcatctaggttttactgtttatatatctgttcttatact

SEQ ID NO: 66031 - DNA, 884 bp, Cannabis sativa
agaattttcttaaataaactctgcccgacagcatgatttccacaaaatttgtcgtgcacctcagataggagtcgtgcagcttcttcctgagtaacacatctgagaaacagcatagagaatcctcttctatacataattccctctactatgatataccgtgcagccttccttctcatctttcgagcttcattccgattatctgggagttccacagtgttgaggtaggctgctattggtgttatccagtttggggaagtatcaatcatttcgatctcttccgtgcaagtgatgctaggctcttcgaggaactggataggaaccaagttcgccttatcacttacattactgcttgccaatcgagcgaacgcgtctgagaccgtaacttttgaattgtgcgagcaagtcatgtattttgctcagatacactatcatcttttctccccgagcctcgtattctccggatacatgatttaccaccagctgtgaatccctacagatttcaatgtgttcagctttcatctcccgatctagttttaggccagcaattagagcttcatactcggcttcgttattagatgctttaaatccaaacttgactgcagcgtgcaagtgttgccccccaggcgtgacaagggcaattcctgcaccagatagatgatttgtagtcgacccgtctacatgtgatttccaagtcagcttatcttcactgttacttggctgaggtgtttgtactggctcaaggttgctttctcatacgctttattccttgcctgtgcattctaccacaaagtctgctaaggcttggcctttgattgctttttggggttggaaagtaattttttattggcccaactccaccgcccacttgagtagccgtccagagg

SEQ ID NO: 66032 - DNA, 732 bp, Cannabis sativa
cttccaaaatcgaatggattgctaccgtctaagtttagtaaaatagctgattttctaacaaataatggtaattggggcactcaaaaattgaactgcatgtttgacaaagaaattattgctgctatcttaaaagggagcagactttcaggctagagggaaaaacattgggtctagaccaaggaaagtaaatggttgattctctagtaaatcgatttatttaatccaagctctgcaacgggctcccatagtgaggttgccccatctgtctggaacaggctctagaatatcaaaatcattgaacaccataagattttttagtggagtatcatttctagtactttctcaattcaatttgttctgaacaagagattccacattgatgatacatgttttcctactgtggggttaaagaggaatctatggagtacctgttcctcacttgtaattttggcttttcacttgtggcgttcctcctcatggtgtattttttctgtctctgaaacaagtactctaatgtgagactagattaaattcatttagagctttcgaaacaaaagcttcaatattgatgaggtctttcttcatgcatttattgttatcaacactatatggagagctcgaaatgatggtacacaataacaatttggataatgtgaaacaatacattaactctattgcttactcttatgcagattacatagccaaaatttgtggttgttgctagagactacc

SEQ ID NO: 66033 - DNA, 1732 bp, Cannabis sativa
ataaccaattacaattaataacttctaaattttcaataatacatattcaagatcaataactaataacaattattaactttcaaacttttttaataacacgtatttaagatcaataactgattacattaataactttcaaatcttttaataatctatattcaagatcaataaccaataataattaataattttcaaactcttacaatttttttttatgattttactccgattaattgatacatatacagtatatttagaactgcaaagaaggaagaataaagcaacttcgtctctctaagaaaataaaattatatgacagatggtggaatgaagtacaaatgtatcgagtgcggcaaaaaaaattatctttaattttataattgctattatattttaattttttattttatttttttaaaaaaaattaaatcacttgaaccaatcacggactgacacacttatttggcacttaaagtattgatagtaaggttccgtgtagaattatatttaattagagatcattcttactattttctattaattaagtttatgagtgtaataattttaaattataagaagtttcattacaatatttcaacaatttaagtgaaaacaattaatttctaaaagattcttatttagtaacagattgcaaaaaaataatttatgattattagtaatttaattttaaatataattaattttaattcagattttataagaaaataaagtatcaggttacaagttatttatttatttatttattttaatttctaaattaatcacaaccattcaatagtgatccagtgactaaaaataaatgtaaccatgatgatattttatgtaaccattaaaacttcctcctacaataataataatgagaatgagaatttttaaaaatattttttttatactttatttacaatttttcaacttaatatttttaattacaaaaacacgctattaatattttaaaattttaaaaatatactttgttcagcaaaaagtgacaaaaaaataacgagaaattaacttcacgataactgacaattaaaaaaaataagaaaaacattcttctaagttatgcaaactataataaaagtataaataaactacaaaacaaccaaaaaatagtttattatttttattgaaaagatatttttataaataaaaaaaattaaagagtaagaataattttttttctatgttgaagtattttttttttttcaaatttttaattcattatgtaaaattttctaataataacaatcaaattatataagtatccaatatatttataaaaggtcatggggcttagcactctctttgttgtcatatcgctattgctacaattaagtattagatctcatataatttaattgaataacttgttagggaaaagatgagatgtaaaataaccctacatttgaaaactaaattaataaatgtcaattttttttttttttaaaacaatagtcaaatatataaattagctaacaaaaaattataataatacatttactacatattattttttaaaaagatacatatataatagtattgcatattattatattgtaacgaaaacgaataaatatattagatcattagatatatatttgatatatcgtatcgttaaaatttaatagatcatagtaataatattaataccacaaataaattataataatactaaatttatactcaaaaaaaatatatatcatgctaataa

SEQ ID NO: 66034 - DNA, 1075 bp, Cannabis sativa
acgatgaatcctagaaattttcccgatttgacgccaaaagtacatttcttcggattaagcttcatcccatacctccggaccacttcgaagcattctgtgaggtcgtttgcatggtccatgcatgtcttaaatttaactagcatatcatccacgtatacctccatatttcttcctaggaggcctttaaacattcgatttaccattctttgataagttgcaccagtattttttaacccgaagtgcataaccaagtaactgaatacccccttgtcggtcctgaagttattacattcttgatctgcgacatgcatcttgatctggttgtatccagagtaggcgtccatgaaggatagcagcttgaatcctaaggtggcgtccaccatttggtcagttcgaggtaaagggaagtaatcttttgagcaggctttgttgagatcagtgaagtctatacaaacccgccatgtcccattcgatttgggtaccaataccgaattagccagccattctaaatagtacaaatcccggatcaggtcattagttaacatctaatctacctctttctctaaggcgtccacttttactggatcaagaggacgtcgcttttgctgtatcggtggcatgtctgggttaacatttaagacatgggtaatcacgtgggggcttatgccggtcatatccccttggcaccacgcgaaaacatctatggctacctttaatgctttgacaatcttacttttttcctccaattctaggttttttcctagacggatgaccttggtggagtcgaggtcgcacacacttacttcctcagtgtcttccataggttctacatttgtttctgatcccacacggggatccaactcgtcttcttccattaaacttggttcagcactcccgtgcaccatcaacacagacaagtgcattgtgacgttgtagcattgccttgcctctccctggtttgccatcactgtccccactccgacttcccgagtagggaatttgaggtataagtgccggatggaggtcattgctccgaaatcgaccaaggctggtcggccaaggatggcgttgtacg

SEQ ID NO: 66035 - DNA, 1114 bp, Cannabis sativa
aactcatctcttggagagacgggggttgtggctctgcctctacattgggccttctcgaatctcccatgagtgccaatagggtcttcaagtaactcattatctctgtctgccctttcacaatatcagttgcccttgcttcaaagcaagttgttccttcacaacacgctccaatcttgccaatatggcagaagatattggttcctgaggctgtgaagtactgggaatagatgccgactcaagcatagatgcagaatggggcattattgcaggaggtggaacagaacggacccctgatggtggagagtgtggtggtgtatcagctctgaagattctagcttcctccgctcgttgttctagcgtctgtgtaagcttcgaagcctggctgcgcaaactatccttagtaggctctccatcacttccaataaccaattcttccatatctacaaatagaggcgcctcacctctagtgacgttgctcaaaaactcggcctcatgagctcgcggacataaaacggagtacactgtcaactgcaaataagaacaaaatgattattagattaggattaaaatgaataaataaataaacattaaaaaataaaatgaattaaaaaacttacatttcttgcaaataatctgatgacttcctctttgccgagtggcacctccttactctcccagttcaccattctaggaaaactgtgcgattttttgatcgcaaatttctcagcaagctccagtatggactcatatgcccaatactgcaatgctacagcatatccatagacaaagtacttcgactccttctaagttgttcccttttcaatcttcttatccttatgcttcttcttttctactaagtccttactccaagtatctttcaacaagttgaaagaaactttcccccacgggtactggtagaaaaaaagaaggtcgtcagccattctcataataattagcagaactagggtcttctcctctttcccagtcaaaacacccatcacaaacagctaggggtgcacacgagtcgggttttcgggtttttgggttcgggtttttgggctttgggtcttggaaatacacaaccgaacctgattttcaggtgtacgggtgcacc

SEQ ID NO: 66036 - DNA, 913 bp, Cannabis sativa
gacagaagagtgtgaagaggctttccaaacattaaaaagcatctagcgacgcctcctgttttggcaaaaccaataacttgagaaacgttactcctctatctggctatctcaaaagatgcaattagtgcggctatagtgcgagaagagggtaagcaccaacaacccatttactatgtaagtaaaaggttactaggggcagagtctagacatccccctctcaaaaactcgttttgtgcctagtccacgcatctcgcaagctacggccttacttctaggcacaccccataaaagtgttaactgatcatcccttgagactagttttatcaaaacctaattcttctataagattgataaaatggtcaatcgaactggggcagtttgacataacataccacccttgaacatccatcaagggccaagccttggcagacatcttaataaaaggtataactctagaagaaattctgcctgttcaccgagacgcggatacttggaagttatatgtggatggtgcatccaacgagcagggcttgagtgcaggagtaatattaatttcaccagagggctttaagtttcacattgcgttgagattttaatttgacgcatcaaacaatgaggctgagtatgaagccttgatcgctagcttaaagatagccgaggcgctcaaagtcaaacatctcatctaccatagtgactcacaactgattgtaaacttggttctcagggaataccaggccaagggcctaaaaatggctaagtatttagagaaggtttggaagaacttggaaagattcgattacttgaaaatcgaacaaatccgaagagggcaaaactctaacgctaatgccttggcacggcctcgtagaatgacttggatgacttgaacttggtttcggtggagatgctgagcgag

SEQ ID NO: 66037 - DNA, 996 bp, Cannabis sativa
  modified_base (82)..(90): a, c, t, g, unknown or other
gtttacaactgtaattgagcctaagtctcctctagtgttgttatgaaaattgtgaacaatacgcaagtgcacgtaatcaagnnnnnnnnncacacaggtgaggtcgaaccacagagcattggattgaataccattagactaaatttatgattctatttggaaaaccgatattttttcaagattaaaaaaagaataaaaatccaagaagcttaagtagacaatagaaattaatcaaaatgagaagatagggaagagaatcctgttgatatgcttacccaattgttaatgctaattgctatcatatttcaatcaaaacgactacttgtgattgagaaatatagcgtgccaaaaaagaatcacttgtaatcgtattgtctaaagttagtaagcataaatagttatcatcttggaggggatgttagaaagtcacatattgataatgtgtaaaactgttagaaatattggctccaaatagtgttgttaatttgtgagtgtcgcgctggctcgactcatatttatctgtactttttaaaaaatgaaccgttacttgcgacttcgtgcctacagacctaaaaattatcttattgtccccttggaccacctctactataagattagtagagcttcgcctataaataggaaattatccatcttccaaaaagtgttggaaattttgtagactcgatgttgatgagtttctattattaatatatttccatgcattccaagcaatatggcgataaaatcatggtccaatctttagatatcataattagacatttatggatgctcccaaacttctagagcaactttatatactctataatgattctttaaactcaaaaacacaattatttataattatgttctacattaagtcaaattttcacattcacttcgtgtaaatcttttgtaaggtttgtaggattttttttttctctgtaagggtttttttctctcctcttctaaagtctcttctagggtttcttatgcacc

SEQ ID NO: 66038 - DNA, 952 bp, Cannabis sativa
ctccatcagcgacttcctccgtatttgcagttttcacctcctaaggaaaaaggtttcctccccacccttgagtctgagtaggcgacatagcgtgaaaagcctcagccatctcagtcacttctactccaagaacggagaagtcgaagtttggcaccttgaataaggtcgtataaatgtagttagaaacagcttgtttgtactgtttcttcccattttccttttcagtctccagatcgctagtcaatttctcgaccttcgactgagaaaaaataggccttagtcttcgcctgctctttggctttttggaggtcctcgatgtctttatccttggagttcacgtcctgcttcaacttcttcacgttctcttggagaagagaattttgcttttttaaaagatcaacttctttggagccagcgacgaacgccctcgagaacacagtcataaactgcgtgaccagttctgcccctagcgacatcatctcctcgctaggaatcgcctcaaccctcgacacgaactcatcattcacaaacttgtcttcaagggtcacgaagtcgcgagctctgacggcagggtcgatcatgactttcttccccttgtcctgagcaagcctaacctacctcttagaagaattagctgtgggagttgcaacaacgtcactcttcctcttctgcgggatgatgggagatgtcgtcgcagttctagccttgggctttcggttgaggactggagcttgcttcaggaaagtcatctctgtggagacaagcattatgataagtataaatctatgttatgttatgttacgaatatacacgatgttttacttgatgttggtcgagaagttagtttggatagacgtttgtctattctctcctttttcttatcagaaggctcctagtacaatggttcccgataaaggctggcattctcagggattagcttatgttctcgtag

SEQ ID NO: 66039 - DNA, 733 bp, Cannabis sativa
  modified_base (520)..(524): a, c, t, g, unknown or other
cttcatccgaagaagaactgctcgtagagaattcctctcatcctgaagactgtttacctcagcagataagatctcgatggtctcctcaaagcgattagctgcctcgagatactttatcagcacggagatcttcttctcggcagcgaacagtttcttgttggcctcgcccaactccaaccgaatagctctagcttctaccctggcttcctcagcttccttcttggcctattctgcctccgcctccaaagtgtggaatagattcgcgctcttggaagcaactgatttagcccggcagtaagtgtagactaactttagaccggcctacacaaaggaaaaacttcagtgtatggagctaagtgtggaaagttaaagggaagtatcaaaaaagacttaccctggtgaactcctttaggactccgcccaccaacacatccagagatgagtcactatcagcaccaaccagtttctcactgacctcgggaactagccggttcatatagtgggccagcatctccttgcnnnnntggcctctggaagcacgggcaaaggtggagttggtgcctgcacccgctcaggattactcctgaccagttcagacccgaccgttggtggtcaagactccttagacctagcaaacttgggggtagaggggtttgcagcagtcagctcctcagaaagatcaatgacctctccagaaggtctcttttccgtaaaagaggacccctcaccgccc

SEQ ID NO: 66040 - DNA, 2991 bp, Cannabis sativa
aagtcttgtaaaatttcttcatcccaagaagtaccatccatggacaaaagattactcaccttagcatgttggagggccggatgagaggatgttacaaaaggatggtctttatctgggagccaaggttcgttttgaatgttgatcaaagtgccattaccaactttccatcgagttcccgcacgaataagatcttgagcttcccaaacacttcgccatacaaagcttgggttatttcctataccagccgagaggaatgtgccatgaggaaaatacctggccttaaaaatccgagagacaagtgaatcgggtcttgtgatgaatcgccacccttgctttcccaagagcgctaaattaaaatcacggagattacggaatccaagacctccattattcttgttgtggcacatacgttcccaagacatccaaggaatccctttattttcctttgaagcacttttccaccaaaatctagccattgtgctctcaatatctctactgatctctaaaggaagcaaaaatacattcatggcatagctagggagagcttgagctactgatttgattaacacttctttaccggctcgagacaagatttttgaatcccaactttgaagctttttcctaacccgatccttgagaaaacccagcacagctgatttatttcggcccatagtactagggagacccagatacatgcttctatcatctgcttgaggcatttgaagtagcgtagtaatatcctcccgaacatgattcatcgtattcgtactataaaagatagatgatttccccaaattaactttctgtcccgaagcgcattcaaattggtgaaggagttctctaactcgagttgcttcttgaagtgtagccttacaatacaagtagctgtcgtccgcaaataacatgtgagacactttcggcgcaccgttcgccactttgcacccatgaataagacccctatcctcataccgtttaatcaacgcagagaggccttcagcacaaaggatgaaaatgtaaggagacaaaggatcaccttgacgaatgccgcgagtaggggtaatcggtcccattgttcttccaccatgaactacattgtattttgccgagttaacacactttagcaccaaggaaatccatgattctgagaagccgatcttccttaacactgactccagaaaattccattcaatgcgatcataagctttgctaaggtcgagtttaagggccatgaaaccatccttacctttccttttcctcttcaaatagtgaagcacttcgaaagagaccaaaatattatcagttattagtctccctggtataaaagcgctctgagattctgagacaatgtgatccatatatggtttcattcggttagccattactttagtgataattttgtacaaaacattacataaagcaataggcctcagatcaaccatactttcaggggttttcttttttggaatcaaaacgacattggcatccccacacccttgatcaaactcacccgaagtgaagaagttctgaacagcagctatgacatctgtctggataatgtcccaacatttctgataaaaagccggtgtcataccatccgggccagggctcttgtcagggtgcatactaaaaactgcctttctcacttcttcggctgacacagcttggtggagatcttcattaatctgagtggtgactttcctttgaatacactgaaccacttcatcactactcaagtttgatgcactaaatagagaggaaaaatagtctaccactacatcggcaaggccatgatcccaatccgttcaattaccactagaatctctgagctttgagatttgattgaagcttcgacgattactagcagctctatgaaagtatttgctattttgatccccttccttcaaccagaattgctttgctctctgcttccaaaacgcttccttctgatcaagaactaagaaaagctcttttttttacctccatataacgttggacagcaagagtatctctattgtttttcaatttcttcaactcagcacgacatttatttattcttttcttgaaatttccagtaacactaggcccccatttagataaactctcagcacaagaagcaattttctcaaccacagacacacggctagcatcattccagcactcagccacaatctccaaacacattggctccttaagccaggcgttttcaaagcgaaagcgccaattaggaataaaatgttcaggaatcacaaactcaaggaaaataggattatggtctgatgttgaagtttcaatattcaaaagacgagattgagggaaagtttgaaaccaacctgaagaaacaagggcacggtcgagtctcacttcaatccaccttggagttcccctccctttctcccatgtatacgggtatccaacaatgtccatgtcaaccaagtcgcaatcttggagggtctgttcgaaaccagagatcaaccaagtcggatatggaagtcctcctctcttgtcactttgactaagaacattgtttaaatcacctattacacaccactgaacattggtaggtctcaccaacgacttgagtaaattccatgtatcttcccttcgatctctctgaggttcaccatacacccccgttagtctccattgtggctcaccactgatttccacataaaaatcgatatgatgttgagaaaaaccaatgattctaccttcattggtatttttccaaaataaagcaagaccaccactcctcccaatagcctcaaccgaaaaaattccttcaaagcccaataatcggcccacaaaatcaattctagctttattacatttggtctcacataaaaaaataaaattgggtttcttttgagacactaactctttaaagaattgaaaagtccgctggttcccaagcccacggcaattccagctcagaacattcataattcttggcgggcctgtgcaacagagcccgccccaacaaagttttttgtc

SEQ ID NO: 66041 - DNA, 1182 bp, Cannabis sativa
gagtttggataggtctgaccaaccgagaggtgggtctgagctagtgcagacctctactccacctttgccggtgctttcacatgccaagaagggcaaggagatgctcgctcattatatgaacaagttggttcctgaggttagtgaatagctggccggtgctgacaatgactcttctctggagttgctggtgggaggagtcttgaaggagttcacaaggataagtctttcttgacgattttctttaatcctctttacttggctcaaatactcaagtttttcctttgtgcaggccggtctgaagttggcctacacctactcccgggctaaatctattgcttccaggaacacggctctgtccaacaccatgagggcggaggtggacttggccaagaaggacgttgacgacgctagggtagaagtttgaactattcggatggagctgggtgaagccaacaagaagcattttaccgcctagaagaagatagttgagcttactaaggatctcaaggtttctgaccgtctttaggagaccatcgagactttatctgctgaagtgaacagtcttcaagatgagaggacatctcttcgagtcgtcctttgtcgggtggaggaggaagaaagcttaggaggaggagcttacggccgaggtgacgaagctaaaagagaaagttcatgccttagagacagtcggtcttgagctcttctacgacttttggaaggctaatccttaggaaactttgactacttgggagaagctaaggacatgtaccttgagtgctgcacttcccaagtagcttatggtgaaaccgaggctgctgcttctaccttcggccaaaatgctgatatacctcccgttcgaacaacagatcctccagctcctgccagcccaaaagacccgaaccaagagcctgagactccagctgtttaaacacttcttcttttatccttttatttttagatatcttattcggctataaggccttttctaagacatcatgaccggccaagcggtctttaaacttggaattattcttcattttacagacaacgggctgaccgggcagcttttaatcccgttattacgtgccttttttttatttttaatgaatttcattctatgtttataatcatcgtgcaattgtgactgttttatctttaccaaatgctttgtacaggtatagg

SEQ ID NO: 66042 - DNA, 781 bp, Cannabis sativa
ttcatctccatgtttctttcatcatgaatcttccattttgttttgttctaaatctttatcaagatttttatgatgtcctccaataaatcgccttccactactccaacaatggcatcagaattcagtggagatgaggtttagctttcaagaattgtttcaagattcaaataacacaatctaaaaatgtctttagcaaagttcaaagtggataaatttacagggacaaatgatttcaatttatggagcatagatgaaaagacaagaagagagacagaattgaaaacttatagtgcaatcctcttaagtctggagtgaagttttgagagaaatctctaatgaagaaacaacctcaggattgtgcatcaaattgacatcgatttatttgaagaaatatttggccaacaagctatatttgaagaagaaactctatgccatgaaaatggatgacaacaaggaattgagggggcacttggatgaattcaatagaattgtgcttaatttgaataatattggtgtcaaaatagaagaaaggggtcaagctatcattctattaagttctctacccaagatatttgagcattttgtagatacgatcttgtacggtaaggacacattaacaatgtcagaattcaaagttgcacttaattccaaagagatacaaaagaaatcaaaagataaaggggaatcaagagaagatggggtatacattaattgttagggatagaactgataagagagaattgaagaacatgaatcgaagtggtagccagaccaaatcaaa

SEQ ID NO: 66043 - DNA, 933 bp, Cannabis sativa
atacatgaatctcgacacgacacgaatacgacccaagaacaagaattgccacccctaatggctattacggacagcaatcgttggaattacactttatgagaaataaaagaaaaattacaactcaaaaaataattagagaatttattataatacaacatataattatcaatattctagttggaacatgtctcattgagagctttaataacttgctcataatcactctcaataaacaaaaatagtgcttccaatcaatcgctatctttagcaccatccgctcaaaattaacaatacttaagtccatatccaattgtggtaaatgtatatttttactagtatataatctattttggtgtaataacaacaatagctcaacaaataatacaaatattttgcttaaataaacacatattttatattatttacaccaataattaataataactaatttcatgacataattattcaaataatttatcattatttttttttgaaagaaaataaaaatattacattaaaagacacaaaacctaaaagatctcaaaatacaaagagtagctcaaaagattaaacaactagatccataagaaactccggacatcaaacacgagactcatctaagacaagcgccctctttgctcaacagtgaacaatattattcaaaggcctattgcaatgagaaaaagataaactgtggaaagattttcacgcttaatatatatcactaagcataatacaaaactcattatgacgaatatcattaccattgacagcaataactaaacaaagacaatcagagaagacggtaacattcttgaagccaaaacgaagacaatcaaagaaggcggtaacatttcaactctacaatggtgcgagtagctgagctcgacactgaactaggaggggcttgaccattattcgaagacactccaa

SEQ ID NO: 66044 - DNA, 1228 bp, Cannabis sativa
ctacatgggccttcaacttcccaacctccaagaagtttatattggtggtaatgagttctccgggacaatcccaaaatctttttcaaatgcttctaagcttgagatgcttgatgtttctgaaaatcattttgtgggagaagttccagctactttgggcatcaatcttccacgacttaggcacctcaatttagagaaaaatcatctaggaaagtacttacccaatagcttagattttattggatctttaaaaaattgtagccaaatggaagtgttgtccttgtctggaaacaactttgcaggctctttaccaaaatctttagctaatttgtctactcaaatcactagtcttgatcttggaagtaatcaaatacatggaataattcacccaacattaagaaatctggtcaacttaatcatcttaacaatggaggataatcttttggaaggtgtcattccaacttctatagggtcgttaaggttcttgcaaattttggctttagaagggaacactttatcagggaagatcccttcatccttaggaaacctcactcaaatctccgaacttagtttatcagaaaacaacttagatggaagcattactccaagcattgtagattgccaaaatctaaagttccttgaactttcacaaaatagtcttagtggaactatacccaaagaagtttttgattttccttcacttcttttactcaacttatcacaaaactcaatcaatggtagcataccagtggaagtgggcaagcttaagactattgttgaactcgacatctctgaaaataaaatgtccgacaaaattccagacacaattggagattgtagtagtctagaatcagtttccttacaagggaacttctttcaaggaattcttccttcttctttggcatctctcaaaggtcttgtttacttggatctttcacgaaacaacttgacaggaaaaattcctaaggatttgcagaaacttaaagtcttgcagtatttgaatctttctttcaatgagctcgagggagatgtaccagacaaaggaatctttgaaaatactactgccatctcacttgttggaaatgctaggctttgtggtggtgcaccaaagttccgacttccaagatgtcaaacaatcatagaatccaaaaatggaaagagaaaagatattaaattgataatcataattatttgtgtcatagcatcagtcttatttgttgcatcactatca

SEQ ID NO: 66045 - DNA, 860 bp, Cannabis sativa
attggattacatcaattacttttagatatcaattaacacaagattttccaattcaattcaatccgtacaagtgtgaatatccacactttacgaattaaattggattgtgcgaattgaattggatattttgcaaacacccctaattgacatgttgatgtgtaggcgttttgatgaacaccccttataaaaagttgcctcaactcaaccagtgaagatgctacgatacactaacactagcacagtaatagcacgaactgtatgactttggcacagccagcagaacaaaaatctgttggctataataagttatgggattaacaccactagccaaaatcaaacaatgagtaattttctccgaaatcaaatagttgttttagtacaagagttattgatttgcttgccaaagtgcaaataattagcacatatttgtatttgtattatgcactttgttctaaaatcctctaatggtgacatcagtctatgcctactctggtgctgcagtgcaataagattattcaacaccattctagattatcatgaaaaccaaggtgtgtaataacatattccattatcgttgttcgttgacaaagataggctcttattgaactgaactgttatattgcattatcgttgacaaagataagctcttattgaactgaactgtcatcaacctgaaaattatggtttctgaggaaaggacacacaggtctttctccaaatattcagaaacacgatttcaaacacaagaaagcccacaactactttgaaaattgtcacagttatggagttaagctcttttctcgacataagatccagcaagcccagaggttcctagaactgatacctgtattaattaagca

SEQ ID NO: 66046 - DNA, 1204 bp, Cannabis sativa
  modified_base (1130)..(1158): a, c, t, g, unknown or other
ggcatgaccttataacagtatagacccatatctattcacaaacttgtatgttcttggtccagtggatgcattctaatttgattataccccgaataggcgtcgatgaagcttaatatcttgtgttcggctgttgcatccacgagctgatctattcttggaagtggaaaatagtctttggggcacgccttgttgaggtcggtgacgtcaatacatactcgccattttttgttgggcttgggtacaagtacgtggttagctacccaagccgggttgaaagcctcgatgatgaagttgttgttacgcagcttttctacctcttctttcaatgcttgtgcatgttctttgtccaacagtcttttttgctaaacggaccagaagttttgactgatgtttagggtgtgtgaaattatagaaggatcgataccgaccatgtcctcatgtgacaaggcaaaaatacctaggtttgctcttagaaattttctcaaagctgattttacttcaagaaacaagccttttccaatttttagattccttggcaggacatttgggtcaatttctatcgcttctaattcttccaccggcccaacatttttgtttggttccctaagtcggggatccacatctttgtccccgccttgggcagttccctatttggtagtgcttttcccttgtcagtactctgacctgaggattcttcctttttggccttgattaggacaaggttgtaacattctcgtgcaacttgttggtttccttttaggcatcctactccattctttgttggaaacttgatgcacgaatggaaaatcgatgtaacatcttttaaattatataaggctggtgggcctaacatgacattaaaggctgatggaacatcaagtaccaagaattgtgccattacagttatgctcctcgaagcttgtccaacagtgagctgtaggcaaattcaccgtaaaagtgcaacactctgaccgaagaatccatatactggctggagacaggggattagatctttgagttggagtcccatcttctcgtatggtgttttgaacaaaatgtttgctgaggcttcattgtttatcatagtctgggccattgaaggctatagtgttgggttttgtaccctaaannnnnnnnnnnnnnnnnnnnnnnnnnnnnaatttagaattttgaagtgatttttatgtgaacatgtatttttcat

SEQ ID NO: 66047 - DNA, 1093 bp, Cannabis sativa
  modified_base (494)..(504): a, c, t, g, unknown or other
  modified_base (815)..(816): a, c, t, g, unknown or other
tttactgaaatatcatttatagatagctaagtgttttaaggataaaatacattgaagggtagaacagtcaatttgtccctattcagtgtagatcatctatctttgacaattaggattgtaataatggataatcatgactatttaggtccaattagtattaggcttattcaatgaataacaattatttaatgaaaggttaaattcctttcctttgggccttgtgtgagagaattcggaggttattagtagtgggtacgacatactaaacacaacactccctcacatgaacaacccattgtgaaggtccatttaccttattttaataattgtgttaggttgattattctagtttaacctaattaaaattgaattaggaatataattaattttaaaataaatgaaattattttaaaattaatttagaaaaacatacttagtttaaagaaaagattctagatagtgatttctaataactaatttatattttctaatannnnnnnnnnnagaaaaatatatttaagttaaaatttaatttgttaattagttttagactaacttaaattgggattttttcttagaacttaattttgaattaataattaagttgattttattcaagatacttaattatttgtttctatttcatgaattttaattaaattaaaaaatataattaagttaaaaattaagttgttaattaatttttaacaaacttaaattagaataatttcttagatattaaattagaattaataattaagttgattttattctagacacttaattatttctattttaatgaatttaattaaatnnaaaattatatttaagttggaaattcttcgatttaagatcaacataaattagaataattttcagaatatattttatttttcacttaaatttcgaattgcattagttttaatggagatatttcgaaatttttcgaattttgaaaattagattaagttcaaaattaattttaattaactttatattaacttaaatcaagtaatttttattaatgatttattaaaataaatagactaaaatatataatattttaattagaaaatcagtaattagtttatga

SEQ ID NO: 66048 - DNA, 1838 bp, Cannabis sativa
ctctctcattattaacagagactcgtgaactacgactcattaatgcccgaaccacgtaaaaatattcgcattaattatccttaagctctaattattatattaaatatttagttgccgaaaatctcagccaatattttggtgctttcattgagagctgtaggaagattgtccaaagaacgacaacaaaagatttagagtatgatggtggagactcgaaaccatacacgccagcctcgtgccccccaagatccttagaaccctggggacgaagaagcagcctcacgagtaaacatggactctgaagagagagacgagacaaatgacgaggagtacgaagaaaaccatgaagggtgtgatgcttatgacgatggcagttataccgaactattggacctaaggcaaaaggcggttgatcacgaggctgaacaggccgcgcaaaaggaacaaaataggaggatgcaagagctaatggtcgccatgcagcaggcaatagaaacggttggaattcacgtgcatcccaaggatgtgcctccgagactaggagaaacacagaaagagtccccgccaagcacccaaagatctaaaaatagggaaccgagccccatattgtatccctctaaagggaaccctaagagaaatgctacattgttccccgaaaagaataaaaaagctcaatatccgccaaaagtctactttgatttctcgaaagggaaaggtccgcagaggagcaagctccctcgagagagcactggccctcaggaccgagaggaccaaaaaagcgtatcagtgcatcaagaacccagggaaagaggtagataaatcgcaagcatccccctaccaacttaagacagaagcttaatgataaacatggtgatcttagaaagcacttagagaaaaagaagcaagaaataactgtgtcataactaatataaattattttcttttttcttaatcgggcagattgaatttaaatttttgtaaaatataatataaaccgaccaaattaactgacctaaaattttaattttcatttcaacatagtaaatgagtttttaggtaaaattttcatctttatctaacagataacccaataactatcatcactaatcacagatacacagcagagttagttttcaacacatgccacacatcattagcacgtggacaaatagggtaatgtcatatggttggtattttttttttttttcagcaaagtcctctttggtatttaacggtccaaattgaacgtctgccacaaaaacataagacagtgcatgtttacccaaatttttgattgagaacatgtggaacgaatgtgacataattaaaaagaaataaatttgtggaatacaacaaattagtgaatatggggtacttgtgaaaatgaattactaattaactcaaccaaatatcattacaaattaacgaaaccaatcatacattttaatttgaaagctaaaacacaatgatggatacccatgttggaatgccaaaacaaatatcaatcttctttacaacccataataaatacaatcttaaaaacaaaacaaaaactccctagctatattagattgactagacatgttttttagaccaaagactcgtctcctgcatctgccatcaacagaggatatgattattagtaattgctattttaatcattcatctaaactgtatatttatcaaaatgaatgatcatatatagtgtacaattttgataaatatttaggcttatataatttatacctttgcctggaacaattatgactggagctgatttgcaattgtggaagcaaaactcacttacgcttccctgaagaacactgaacacaatccaa

SEQ ID NO: 66049 - DNA, 657 bp, Cannabis sativa
ttgtaaaacacagagtccaaaatacaatgccaaaaataaaatacaaatagtttgttgtagtcataattattttttattctatgtgtggtaaacagttgtttgaactttattttcgtcattgtaaactatttagaattttttaaaaatttaccgataatattaactaagtataacagacacaattataaaataaaaaaattgtaattataataaagattacagaataaaattataatctccataaaatttgaatatattatttaaatgatctatttttaattatatttagaaatatctattcatcataattatatttacatgataatagtacataatgattttattatatgtcttataaatatttccttatatgttaatattttgataattattagctttttctttgattggaatatatgtgattaactacacatatattatacataatttttaacaaattaagggggtcagggccacctcaccctatcaagtacatccacccgtgctactttatcattatattacttgattcgattgtgtatatttacgtatcgattttagaataattatctatttttgtggcaatgcatacttaattttgttttttttttattttgtaaatttaagacgtcagttaaattttactattatatgcca

SEQ ID NO: 66050 - DNA, 1083 bp, Cannabis sativa
atctcttttctctttctcctctcaacctcccattgaagcgccactttcctaacaagtaacatgacattttgaattgatgaacaatagttctaaatttctaatattacatacgttttttttcaatttttattagtatctgtataaatgtaaacaatgtccttcattgttaggacaattaattagagtagatagttgagcaatagttataactaataattaactatttagttagttagttgtccaagaagtatgcttagatgtattagttaagtttgttaaatatgattatgttattcaattcagtgtgtataaatatgttgtagcattcattctcgatcaataactaaatatattctttaattcaacatttctctgtgtgtgtgtgtttccagcttctcttcaacaatgtcaaataaatttaacatggcatcagaacattttctgtcgttatagcgaatgttttcgctggaactatgaacaatcgatgaacataattggagctcaataaaataagtacaagtacggtgtagaatcatcaaatgtctacttcaatgacaatttttccatcaagctcaaagaccaaaattatcttctgtggaaacaaaaattcttagctacagtcagaggaaattgattgataaacttcatctctagagctgcaccaccaccaaaatatctctttctgatgtcgatcaagctttgaacacgctcaatcctgcctttatcgattggaatgttcaagatcagctcttgttgtcatggcttctctcattgatatcaaagagcttacccactcaagtgatgggatgtgaaactataggcaagatttggagaaccttggaacaatacttcaccttacaagtcttagcaaagatcttggagtttagaattaagctttaaaatcttaagaaaggatctccgttactcaataattatctactcaatggcaagcaacatgtggatcttcttgcatgagttgaagagttactaagtgttggttttgtggtactaaatcaggcacacgacaaaagaatttataacaaatatcatcataccacaccttaggatctccatatgtacata

SEQ ID NO: 66051 - DNA, 729 bp, Cannabis sativa
catataatatcaaatttccctttcattttaattcaatttatgggaatttatattgacaataaatatgagtttcactatatataacataatactattttggtgaaaaaattataaatgtggagatttcataatcaatgggaggtggggacattaatagtgaattgaagatatttttaattttattctattattggaaagatactgaaataaatgggtagtaaaagttaatgagtattaaatttattattttttcgaggtacagatagataccaatatgaacattggtttttctttctttttctttaaaatttgattaatctcattaatcaataataggattaggctgaaacaacacatagtggccaaatatccactagaaaagcaaccacctaactcctaaaccaaaacgactataatgtcgcccttaagtgtttaaatggtaaaatgacttggggataaaatggtccaaaatcataatcccacttaattttgatattctaaatatcaacttatgaatactccgctaaataaaaaggttctaagctaacccatatgagtaactcggctatcggtcgtattttctatcgccactgagcaaaaaacataaaaactataaattttctatataacatacataatacattaaggtggtgtttggttggaggtaatgaaatggagtggaatggaaaggaaacaattttcattccatttttttgtttggttgcattt

SEQ ID NO: 66052 - DNA, 798 bp, Cannabis sativa
  modified_base (27)..(30): a, c, t, g, unknown or other
  modified_base (468)..(469): a, c, t, g, unknown or other
acttagaaaaatagtacaaaagtgatnnnncaacatgaaaaggtaagatcattccaatgtatgatgagaatttaataattttttttatcaatttttttatgcatattttaattaattttattctattccattcttattcctatttccatttccattcttattcctatatttttatttcttctaatcaaacgccacctaaggtcgcctttggttggaggtaatgaaatgaaatggactgaaaaggaaataattttcattctatttttttagttggttgtattttaaagtattggaatatcattttaatggaatgtcctttctatcattttggtggaatgactattccattttgaaatgtaaggaaaaatcattccaatgtaacataaaaaaaaatttaatgattttttttatcaatttttttatgcattttaattttttttccattcctattcttattcccataatccnnttcctattcctattcttatgtttttattcctcccaaccaaataccacctagctaaattaaaaactatcttcaactttttggttttgtgcatctttatttgtgtcggctataaaaagaggcataaggttaattttgtttatcttttcataaccgatgcaaatgctgcgccaaaatgatatttctcatttgcatcagttattataaacatatgcaaccaaaataaaaatctcagataccaccgtgcaaacaaaaaaaaaaaacaaaagaccatcgtgcaaacaaccatcgagtgaaccacctgcacgcgttgatggaaaaaaatgagatat

SEQ ID NO: 66053 - DNA, 530 bp, Cannabis sativa
actaatcttgtatttgaccatattaaagaattagataactaatctagttaatctcagggattatttataccatctaatagtataagataaatgatctaggattatatttatgccatccagtagtattgtataaataatctttgtttgtaggattattattttatctttcttttttttttttcgagttttaatttataaatgtgttttagattcaaaaataatttaaatggaagaataaaaaatttatttataaatttattatcaaaacttatttattaaaattaatgaaaatatataattttgagttattatatacaggttattaaattttttaaataatattaattaaataataattaacttcattctaataaaaatataaattgacattttatttataaaaatacttccataaagtgtggacaatatttattttatgtaattttaataccaaagtatcttttgctcacttacacaattagacgatggttgcagggtggttgctgcgtgattgcgcggtggttgcatca

SEQ ID NO: 66054 - DNA, 763 bp, Cannabis sativa
gaatacatgtaatacatttaagcctgaacctaaccgtctcaggattaagatcttttgatctaagatgatcacctaagtgatattgccaaagaaaagatattacagtaagtttatgatatctgttcgactatcaatatcagtccaatttgatgtagatcaattacattcgatactagtatacattgccaacgcccttaaaaggacattccacatatcatcgtgtaagtaaactttattgctaattatcacgtcagtgtaaatctagtgcagtgataaattatgggaatatagactttgaagcatataatcaatgattattttctactatgtagacaacactataatcatgaataactatatgttcaagatttaatagaatttatatattaaatgtataatcgtgaaagtaaacatgtgaaccatgcaatataaaatgatttcttatcttttattaattagtaaatctgattacattgaaataagttttaaaaagggcataaaatccctatagtagttacaatggacaaggagatcgatattgatgtatttggagttgtggagtttgatgattttgttaaggtgatgtttgttctgttgttgtggttgttgttggatgggtttgaaccacgacctctgcatgccttaagtctctatcccttctaggagagtgttgtctcatttccactttggccctcttggcctcccatttgagagtggaggtgacagagcgcttagaggcagtacctaccttcttcaggaatac

SEQ ID NO: 66055 - DNA, 846 bp, Cannabis sativa
atgaaaataactctaaatcttagagttatcatgtacatcagtcgatttagtcggtttatggtacattatattaatccgtttaataaaattggtcagtttggttgggttaacccgtctaaatcgaccactaatattttttttaatattttttatttttacattcaattgtttaaatgttttttttttattctttattgactttttttagtaaaaattaatttttggtgaaatatgcatattttgggttctttataaaatttttgttgcgaatgttcaaaatagagtatgtaccataatagtagtgtaatataaaagttagagatgaatgttcgatatagtaggatagttgataaaatccaataatgatataatagtggtataatagttgcttaaaatttatgtcataaaatttatggcatgaatttataaatacgacatgtcgttttgtatgcatgaaaaacgacattcaattagacaaagcaacgcgcacccttctcttccatcaattcttcggataaatccaaacccaaatcagccactgttgagtttcccgactaaacagatttcatattcgttcaagacccacaaaataattttaaaattctgtttggttgtcgagaaaaagccagaagaaagtgacagaaaataataactgggagatactgaatcaaaaatgattagtggccttgcatcttcagcttcaccttccggacccatcgtttctcacttgccatctaaatcaaaaacttacacatccagctttttcaatccttgtactgtatcctcctcagaattcaagctcagaggcatcagattctccaaaactaagcaaacccagataaagac

SEQ ID NO: 66056 - DNA, 919 bp, Cannabis sativa
  modified_base (667)..(670): a, c, t, g, unknown or other
tttcaatatgtcaaaataaactaataagtttatttgacatatatgagtatagacatatctgattataagatttttggtctgatcatcatctttttatttaaaactaataattttatcaaaagtaactaattagtatcttatcaaaatcataactaattggtccaaaaaaatatcatatttataatgatttaaaagttatttgtaacttcattctttatttaactaatcaaaatgcatatgttaatttacatttaaaaaatattggtgatttaaatatttatgatagatattttttttaaaaaaaaaatacagtttactaagatggtaggttacttgacaatttagcatttttaaaagtaaacttgaaagttactcaaatgtattaatataatctaaataattaatcgattattaaagtgcgtacatataagttttaaaggtaaccaaaatgtatatcaaattatataatatagaagtgatatttttttaatgaaaaaattacttattggtttattatcaacataccaaaaggttacttttgaaatgcagaaaaattaaaaaataaaagaatttcgagattagtttcatttcaggtatgttattttagaagggaaatttgaatttttatttcttacatatacttaatattttttccctaaactaatannnntctacattgaaaatatatgaccacttctccaaaaccccaaaaatacccctctaaaaaacccaaaccctttctctctgattttttttttaatttttttgggcttttaaggggtcaggtccgatggggcccgatgcccgtccgatagggcattttttggggtattgaagtcgggtccgatgggcctgatgcctgtccgattgcccgataccaattttttttgggttttaaggtcgggtccgatgggcccga

SEQ ID NO: 66057 - DNA, 576 bp, Cannabis sativa
  modified_base (354)..(355): a, c, t, g, unknown or other
cattttaatcaaaacatgtttttgcaaaagtttatgagttgtactaacgttaccttttagctgtaatttttctataaattctacaataaattatttttaactggttactaaatacttttttatcacatttttttttaaaaaaacatttaactttttcaaaaactgtggcaaacagacactttataaatacaaaattagtaataaaagttaagtggttaagtgtcatttttatttaaaatagttaagtgtgattattaatatccatcaccgcaagcatttccatgaaaattgaaatgtcacattaatataattaataaaaagtctaaagcatgaagttattttaattatagtagnnattattttaaaacttaaatatatacatatatatcatattgagatgaattcggagtggatatctattttcttgctcccgatccgatccaaactcgagtatgaatatttaaacccatacataccttcgcttttgaaatttaatgtttaccccctctccattaaaattaaaaataggtacccataagtataattgtcatatctaattataatatgtatttaatt

SEQ ID NO: 66058 - DNA, 706 bp, Cannabis sativa
ccgtttcacagtctccgccgccacttagtcccgacctaactcagccgccgccatcacaatcgccgccgcaagtggttgtttaggcatatttgattgaaacaatggaaccttttttttttcgaatgtagatttttgccctttgattttgaatagtttttcttctgcgaaaatatggcatcacgattctggacccaggtattgattttgaatgaaaaccaaattttgtgttggattgagaaaaaaagaaattaaacttagaaacccttttgaaaatataatttttttgtgtttaatgtcagcctgaaaatgactttgaggaggaagagagtgacattgatgaggaaactgagattggaggtggtgagccaacctccgaacctactgttaatagataccttagggaaaatgctagtgacagtgatgattctgatgggcaaaagagggttgttagatcggtgaaagacgagcgtttcgaggagatggctttaactgttgattagatgaagaatgcaatgaagattaatgattgggttagcttgcaggaaagctttgacaagatgaataaatagctcgagaaggttatgcgtgttttattggtttaattcttttgctggtctaatctgggatgggtcaaggttagggcttaagaggctatctgtgttcattctaatgagatgggcattgagagatgcattgactcagcttc

SEQ ID NO: 66059 - DNA, 958 bp, Cannabis sativa
atctgtaatttttgcaaaatatagggtctaaaatagtatttaccctaaaaaaattaagtgtaaaaattaaaatataaaaaagttttgccgtgcactattcattatctttatgtagcaaaaggaaaagttagtgtgccttctactctaatccaataataatttgttattgaaatcatttatattaactttattggcatgtttttgcattttgggagagtatggctattattacaataatttcaaacccatcatatataaacatacccttttgttatttggactacaacataatcaatcatgatctaattgatataagttggacacttgaattaatacatgattataattaaaacacagtattgtacttggattataacaacttaaccttcaattattcattaaaataaataaatacattatgttatcgtagaattgagtaatttgagttacgtggcactacataagtataagtggtcggaagcttgcaagaggctaccaagttgcaatttttgcatgcatgtaaccattcacacatattactatttatagttgtaaatttatgttgtgttgtagaaataaatttaaggataaattgcagcataaatactcaatgtttctgattttatacatttaaatgcttaatgtttacttttaatggcaaaaatacataatgttacaattgatctcttacactgttactaccactttcgttattaacttataaatatacacgtggagagcccaaatgcattacatttatttattttattttaaaatttattattataaaaaattaaatattacttgcttttaaaaaaaaaaaaataagagagaagcaatattaaattaccatagctaagtaaactggtatagtacatggaacatgattatcgaattgaagtgttaatatcatgtgaaaattgttaatgagaatacgttttttttaaaacaagtagca

SEQ ID NO: 66060 - DNA, 1405 bp, Cannabis sativa
tatttgggttatttttggccattgatgataatcctacgatgaaattaactccggaagtcggtcatcaatttttagaacttgagttgcgtctgcgggacccacttcagataagttgcagcttaattttgtaaccctcttaaagataaaatttgaagttgataacttcagaattgcgattgtagtgtaagacatgacttcatagagcattgaaataacttcgaagtgcaaattaaattacatcaatcgaataattattgagtgatttatggtcattttactgaaggttattctaggatcagcgcccaggttgacatatgatgtcaaccaggacggttagtgagtgggaaaacgtgttagaggtgtgtattttttgatacctaagtgacattttgagataacataactatttttggtgttctagtgaagttattcaacaattctcggagatgtcgttgttttgcggaatcaggggaatcaaaattgctaaattatcgagtaagtctcttttctgaaaaagtgactgtatgaagttgtatttgacttgtttggcgtcatagctctcaattacaatgaaaaacaagacgaacatggaaagggaattagaatcagataagcagaacccaacgcaccaggtcacctcaacctgcgcgctgcgtgctctctctggagcttctagaaagtcgtttcgatagtttcaaggttcttgaaactaaagacgagatctcctaccccattcttgaccatgccgaagagaatgctcaaagcagaatttacatttggatgattgaaactagtgcaccaggttgattgtctacttgggcactgggcccatcaccaggtcagcctaggtgctaggcttagttttcatgccctggaattcttattttctccccgagtatacttgtatcttcgttatttcttatgacaaaaaataatgctcgaaacacttttcctaaaacatgattagaaacagccgaggttgataaaaatgtcaacttgggcattagggccagcactaggtgtctacctaggcactgggtctagtttcaggctgccagatggttccgtttgattcttgaaaacacttgtatcttaatctttgaagaaaacagagaatatgcccaaaagacttcttaaaaaaactccttggaattggcctaggttgacaaaatgtcatcctaggtgttgggccctctttctagcccccaagtcggtctgtttcttcttcggaagtacttgtttccttgtttttgatgatgacaaagaaaatgcacgggatagatctttagtttgatccttggaagtggcccatgttgataatatgtcaacctaggcgttgggtgccgtggtacctggtgctccgagtgcccaaaaccagaagtgctctgaatttgattttgatgcc

SEQ ID NO: 66061 - DNA, 597 bp, Cannabis sativa
gtgcaaccatggaaaaattcactaaattaagtaaatacgggaatagaaagcttacccactacaagaaacctttgctgaagagagtggaaagcttggatcgtcaaaatagtttgaaaatctgagagttgaagcaatgtggggcgtcgccctctagaaaaaaggaggagctttttctagagagagaatgaaaagtggaaagtgaagattagtttccctccataagcttatatagcttcaatgggaccgcctttttacttatcatgcaagtgttcaactaaagaacaatgcagttaacttactccaacaagtgatatcagacagtcaagtgcaattatttcaaaggcaatatatgctgaaagatttacccaattaaggctacatcagtcccaattaaggtggaaagtccctatccgcacagacatctgtacagggacttaggagccaaatgttatcccaatttttgtccacatgaagtagcatgtctacgtggctaacattagcgccaagtggtagtacaactcaccaataagaaggccaagtcacctaatcagcactataacaaatgaggagcctgaatactcaagcgggatgacaaag

SEQ ID NO: 66062 - DNA, 3482 bp, Cannabis sativa
attaatttagaagaaagtgtatcagcgactatatgtagctatagctcgcagactcaaagtttgaattctcttaataaaattatcagatatatagaagttaaaaatgatattaaattatcatgtattaatatttccaatttttatatataggctatctatatctttcggtgatatattataaatctaagaagtcatgtttttaaggtctcgtaataagatatataagcgtaaataataatatatgatctgtatattatatctaaatatttaattacaacatatatatcaacgtatgtatatcatcaaatatctatatataattaataattattgatttgttcaaccaaatgtatataatgcaagagtacgtatacgtagtgtatactatatattctttaattaattataaattgaagatgcatgatcaaataatatgaggccgtggtagggagagggggaccacattattatacatatacagatcgaatggatcgattcatctcccggcagatccaagacacagctgcttccctccttaaattaaaaatatttatgggtatcttgctcaatatgttaacttggtgagagacattatgttttggcttttaattattattaacacatctttattattaagtcacctccatccatccatctcttatatattgttttgttcgtaacacatgcattgatgagaccggtccagtactcgatcatccacacttgataattacgtacccaccaaataattcatataattattattattattgaaatatatatgatgatatgcattcatgaatccactacttaattattaattttattacttgatgtgtgtatatatgttatcgttattttaaataattaatattattatattaacttggtgcacatgtgatgaacgtactgattggcgggtccgtagtgatgagctatatatgataataattcaaattaataataataaaataaatgaaactaataattaatcaccacacctagattatcttttgtatagcatatgcctatttaaaggcatctagttcccgttgagagaaaattcattcttatatttacacattattattattcacttaatttcttgagctcttttttgcaattattctaattaatttcagaaaataattagtacattattttcaatggcttcttcatcatccgtaatcagctgtgagaattgggcttacatcaacggcaatgatgaatttgaattaggacttgattttcatcaagtcgctgaaatcaacggtacacatgcattgcttatgtcactaatggaagagctacaagataatgtggaagagggcgatgaggaaagattaaatagtgtgattcaatctctagaagctgagatcaataataattcaagcacaagtagtacagatcatcatcatcgtcatgctgatcaagattcatgtatggatcagtcctcctccgatcatgatcaatcttgcagcctagagctgtcattggacggtcaagatttcacggtttcatttgatgatcttgatatgatcaacgaatgggatcttgacatggaggaagttattccatgttcctcatcatctagcggtcaggatcaaattattaataatggttattattacgctgctaataataattataataatggaacttattatcaatatgataatcaagttcccctaaatgaagaggttggagacaactctttatgcctaaattatcaaacaatgtatgatatgattcagtgatgtatgactacatgaggacggcactatattaatcgatgataattccaaaatcatgtacatatacaattaatattgattattatatacaatttgattcctttaattaaaggttaattaatttttcttcatcataattgtttatatccaacttacataattagatcgatgtgtacgtcatgtttgagtttagttttaatttttaaaaatgatcaaagataaagtagaggttggatcattatgcatcaatacgtacgatacatattaaaagaatagctttaaacaattaattagacagagtggaatatataaccaacgtaattataatatatattattcataattaatattactatttaggccgtatatggtatatggttcttactttgtattatgtatgtccagtcacataatcaaatcgcaatttttagagtaaaattctaattatatatatttcccctccaaaaacttatcaaaaaaatattaccccctccaaaaacaaaaaattctttaaaattaattagttgcagattagtgacaatgtcccaattgtaaagagttaattatttggcacatcaagctgctaaacactgattaattataaatttattattatattatttattaaattaaaatttatgagattgaatataaaaatatacatttattatatcaccacttaagaaattacaaaaatataatgaaataagagtaattacataagacacaatttttcgtaaaaaaaaattatatttttacgtttaaatttttttttttcatttttacggttgtttatagaaacaacacgaaaagaataaaaaaactacacaacagtaataagaaaatagcatctaaataatatcaaaacaacaacaaaaaaaataatatacagataacaaaaaatcaataacaaattaacgagtacaacattaaaagacaatataaatataaaaaaaaatatatttaaaatttcgtgaaatcgtatttttgtattttttttttgtgtatttgtaaaatattcacgacttgacccttcaattatgcggccaattattggcccaattttgcgacccttcagttttgtggcccgtatcttagtcaagttgggccttatatattatggtatgtattagtgcacattaaatacttgagatatggtactttaccaaatcttcaccttatatccagctaggatagtgttaataaaagacttattagtaactattaacatctcaaatatattttattaccattaattaactctcttttcttcttccaaaaggaaggataatttttttttttttccttttagtaatctctcaatctttcgactttattaaacatgaataaataatctttataattaatccaataatggaaaactaattggtatctcaacacaatatatatattctataccgatatatattcgatgcacgataaacaataatatgcatgttgatcgttggataataaaaaagtgattaatatattttattgtaatctcagaaagataattcgttttcaaactctcaccagatcaaagcaataataaaatatactttcgtcaataaataaataaatgaataaaataaaatatacttaagagggtagagcaaagcatgactgcatctgcatttatacgcatatttttttatactagttgctttttaactttcaaacaaattacttttcctctaactactatacataaaaaaaaaaaaaaaa

SEQ ID NO: 66063 - DNA, 548 bp, Cannabis sativa
aatgaaaaataattttcttttgtgggtttttttgcaagccgtatccattcatatatatatgtgttgatttttattttgttattgattgttgatttctgtatcttgtatttaggtaaaatagatttgtgaagaacatatctattggaggtttggatttgtgcttagggtcagactcttccacattaaaaaaagtagccaaatcctacataaaagaaatagataaaaaaaaacatatatattgaaaaaatcatatataaacataaataaaccaattaggggaaaatatttaccagattagcagaaggttctgattgtagatcatatggaaccaaaacatatgattgctgcaaaacaacaaactaacaacattataacaaaaacaaaaaacaaacaaacaattaaataaaataaatgaataaaaaataaaaaatctaaaattttgcaacagcttttaaaccagccataatagcatcgtcatcctcaatagatagctggctataacctttgaaaaaattatcatcaaccttttttttttctcatcgttgaca

SEQ ID NO: 66064 - DNA, 1302 bp, Cannabis sativa
agaaagggaaataagatcatgtttctctattaaaaagatcactctataatttaaaatagtcacccaggtagtggtacaaacgatttgatgactatgtaatcaaatctgatttcaaaagaataagtacctttgacaactatgggtatgttaagaatgagaagtgccttgtgttcctacttatatatgtagacaacatgctcatagcaagcaaaaatatgaatgaaatagacaaagtaaagaggttgttgaacaaagaatttaagatgaaagacattggaccagcaaaaaggattttaggaaatgaaattgaaagagacagaaaaatcagaaccttaaagttgtctcagagtagatacattaccaaaatcattgacaagtttgggtttgtcgatgtgaaaacagtcagcacacccttgtcacaacagtttagactgtcatgctcataaacaccaacaatagaagaaaaatgcaactacatggagtctgttccctacaccagtgtagtagaaagtatcatatgtatcatggtatgcacaagacttgatatatgtcatggggttagtgtggtgagccaatttatgagcgaaccaggtcaagagcactagaaagttgttaagtgattatgaaatatctaaagggaactacaaacactcgattagtatatagtctaaacaaaaatattgatgttgttataggctatgcatattcagattatgttggtatctagacacaagaagaacatagtcaaattttgtattcatgctacatggttgtacaaccagttggaaagctaatcttcaaaccattttagctctttccaccaatgaggtagagtacatagcttaacctgaagctgttaaggagagcatttggttaaaaggaatcacaagagaactaggcctcgaccaaaagactgacaacatcttctgtgatagccatagtgcccttcacctcaatggacaccaagtattctacgaaaggactaagcacattgatgttagattgcatttcatccaaaatgtgatcaatggaggaaatatcaaactatgcaaagtctcaacaaagaaaaatgctgctaatatgctcacgaaatcacttggtgcaaccaagtatcatcactgtctaaagatgctcaatgtcacttatacttggcatcattgacaccatttaaattcttgtaatgttagtggttgtgtattagcagtcaaggtgaagatttgttagttagatgtctgctaatactatatccacatgtacaggattacttagctaattagttaagtggatgttagtgttagtata

SEQ ID NO: 66065 - DNA, 1460 bp, Cannabis sativa
  modified_base (1244)..(1254): a, c, t, g, unknown or other
tagtacactatattaattttatacatgtgcataccaggcatatatatatgtagctagactgattctcaagtcaaacaaaggaaaaaaaacaaattatcatgatttgagaatcgtataaaaaaaatttatattaataatccaatttaataaacaacatgttaattaagccaatatatcatacagtgaaaaatatatatatataattatacaggataaatatatatatatatagactatgtaaaaattaaaataccctttatatattttgactctgtagaaatccagatgattcttctcaaaagaaagaaacccaaataataaaactggaataaaagttgcaagataaaaagatcgtcaaaaataaggagataagattaacatatatgagtgttaaatcaaatatgaaaaccttggactctttctcttgaacgaacgatctctattgaagaagatgattataagattaacctatatatgatgtatagtttattttttttttatatactgaatattgggaaacatgtaaaattattgtcaggaaagtttacaaaaatattacaccaactttataaaaatactgtttaaaatttaaaaattacaaaaaatacaatttaatttttagtaaaaaaaaacaaccctatataataacttaataacttaacaaacatcaaaaatttaataacaaaataacaaaacattgatataactacaaaataaaaagagaaatggagagagaagaaaaaaaggggaaaaaaattcattgaaaaaaaaagtcacccaaaaataaaaaaaatattaaaaacaaaaagcaaaacaaaaaactttttgaagttctaataagtaaaaaatagtaaaaaaaaaaaagaaaattaaatagtaaaagtataaatgtaacaattttcttgtaaagttcgaaaaaaaattattacttagtaaatttcttataaatattgagggtgattctacgatacactcccttaaaagggatgtacagatgtaccctctacttgtttcggcatctagaaaaattttgtagtctaattttttttcttcatatttatatacgttatatctatttaaggtattctataaaagtttgagatattcgaaataatttacaatattaaaaataatgttcaaacaatctattttatacgcgtataaaataaaatagtcacgcgtgcaacatactgcttgaatgcaatttttggtgtattaaacttttttgaatttcttaaaatttnnnnnnnnnnnttaaataactataatttacatgacgagtcaatttattttttcggatactaaaacatatagagatatatcaggtgcattatagaattttccaatattatttgatattcacgtatgtttatataaatatataaatttaaattaaatataatattatatagggctatttacaaaaatatgagaaaataaagataagttttgatatatat

SEQ ID NO: 66066 - DNA, 855 bp, Cannabis sativa
taatatttatttattattatttttgacaagaaaacaaattgtaatttaagttaattcatgcaaaaatagtttacatcttcttataattattacaagagaattgttaaaggatacctttttttttttatttttggtatttattttaatattaaatctcatatattttaatttaataaataatacaagaaatcactaatcaattataaaacatcaaattcaagattagcccaaacatcttagaccatcgcacaaaattctcattttacaaaacccaatttctttattatttgcgaaagacgagactctttttaaagaagtggtaatggaattattaatgtatatcggttctaatcacattagtatagtgttggacattttaaaatatcaaatagtcacatcaatataatattagacactttaaaatatcaaataacaatacttttcatcgattaacttctcaaaatttcatgtaaaagtggaaaatatgacattaattttatattatagaattatcttttcaaaattttaatcgattaactcctcccacaattttgtgaatctctctttcatttttacatattattatttttttctacttttcttttcccttataccaaacataaaatcttaaaacataatggtttgttctaataatgttttgacatctagtatttattatttttggtagtatcaaacatccccaaatttttagtggagctaggttcattaccttatgctatttcatctcatgtgtattatatgatttgatttttggtagtatcaaacaacaccaaatttttatggaaatttctcaattttttactatttatttatatataaagtaaataatatttt

SEQ ID NO: 66067 - DNA, 934 bp, Cannabis sativa
caggtgtatgtgacctgattggtagtggtattattacacctgcttttatttttgattttatttttatgcttgacttttatttattatgttgaacatgctgagaaattgttgttactctctggtttaaattaactaacttgggatttatgttgacagtctgaaatgtacatctcttttggcaggattttattaatcaagtggaccctgacatcattattggatataacatttgcaaatttgatttgccatatctcattgaagtaagtgacatgttgaactctctgtgctgtttccatgcagtagtcaaagtaaaattttgcgttttctataatattgcatattttactcatattcagctctagtttagatagcaatgtaagaaatatacacgagtagaattccaatgaataaggcatctggtcttttaatgtcagattatgctgttgctttcgcttttgttcaggttacctgaaaatatagaactggaatcattaaaattcattttctcatgtatctacttagtttggtaaagttggagtcaggagtatatatatgtgtgtttttctcctatttattttctagtcttagctgttataagattactttattctgttgtatcatatggttatggtaagaagcaaacttagtgtttgtccttgtattgtgttcgaatattaaccagaaagaaggggagaaaagcttgagagaaacagtggaaatttttattgtcattttgtagaacatagaggtatctaaaaaacattaagagaaaaaattccaaaaagaaaattttgtggaactacagatatttttttccctcctttttgcgccttgtcccttgcaattgatattctggctaaatcaagtttacaaacatagtttaagccaggtaatgagaaacaaataaaaagaactcttgattctactaccgcaa

SEQ ID NO: 66068 - DNA, 1021 bp, Cannabis sativa
tatactgctacgtgggttaggttccagcatgtgtatgtgtgtagactgtggctattttttagagagaaaacaaaaatagcatcacttttcatattttggacagctgaacaatatttgtttatgcatgtgtccccatcccattctctgatgtatgaattgaatatatgggctttcataattattattatcgtctcacctaaccaaagtatagccggtcaactaacaaccattaaaatattgacatttcattaaaccaataattgattgctctcgaactatcattaaaccaataatacaatgtttaagaacaatatcatctgcaagtatcaaggattcagatagttgatagcataattcattatgcgatacaaaaccaaatgcaaaggttccatttctgaataagaaattactttattcccatttcactttgacaacaacaaacttacctgaccttagaatgaaattcgaataggtcgagattcaagagtagactaattctaattacctgaccttagagtgaaattagaataggtcgaaattcaatagtaagctaatactaattacctcaccttagaatgaagttaaaataggtcgaaattttatgagaaatgctaaaggacacctgtggtgctagcatccttctacatataaatatcactattggtctaattaagtatcggctcctatataatttaatataatagtttttaaaaagtatcgctaaacaatagcaacgcgacatatcgagaaggtgctaggcaggggtgcctaataccaatgcccaaattttatagtagactaataaatgataccatcgatcaattttccaatagcagtaaatgatgatccgccgtcctcaacagctttctggccaatagcagtaaatgtcattttgcaaaaaatcatgaaaagaagactttttttattttttattttttatttttgataaagtgattaaaaaagcgtaaattcattaattaaaactttaccctatgttagtagaatttacctaaattccctt

SEQ ID NO: 66069 - DNA, 2260 bp, Cannabis sativa
gaatataggaagaagagaaattgaataatttccttagaaattaaaataaaggattgttggtgatcataataatccttgtctttattattgttatttttctcaattataattattatttttttatttacatttctccaaataatttattattaaaatagaaacaaagaattaattacttagtaattgataatcaatcctcgtgggaaatatactctacttcttcattatattacttaattcgattgcatatacttgtgtattaattttaccgaataagttttttgcgctattgctgggattgaaaattatcaatatcagtctaattaacttttattctaatatgatctcattttctcttattgataacctctttagtctcttaatttatctatctatggtgaattgtgttatatgtgcaacagaagaggagcagacagattcttgttcctttgaatcctaagattgaaaagtcttgcaaataaaatagaaagaacaagtgcatgcacataatgatggggatgacaggattgatcttattcctacaattgtatataggggacatgctcaaaataatgctaaaaggagcctgagagactatgtactgctcactctgacttggtacaaaactatataagaccaccaatagtttaagccaataactttgaaatcaattcaacaattttataaatggtgcaatattctgttcaatttagtgggttgccgactaaagatcctcacaatcatctgtctaattttctaaagcttttttggtatttttaaatataatggggtgagtgatgatacgattaaactgaggcttttcttattttctttgagggaaagagaaaaaagttgacttatttccttacaaccgaattctattattacctaggatgatctggcttagaaaaacttatggctaatttctggttgggctttaaaggaaacaatcactctaaaattcactggaaagcctgaaacaatctttgcaaatcaaaattttttgggggtctcggttttcgtactattattcaccaaaaccaagccatgttggctaaacaagcttggaggatccaccataaccctgattcccttctggcctttattttaaaagccaagtattttaagaataacgattttctcaatgcttccctgggtcactctccttcttattctaggaggagtcttctttggggtagggatttgctttctaagggtttaatctggaagattggagatggtaaaactattcctacccttagcccaaattggctgcgtgatcacataaatatttcttataaagatgattctttgcctcctgaaattactctttcttatttcattaaggaagatggccattgggatatcaacaaactcaattcccattttgacaaggataccatatactccatcctctttgttcctactaatccttactccaagactgtctcatttggggccatgttctttctggtatgctcacggtaaactcagcttatttaccttgccaactccaaccaatcctcaccttcttcctctgtcccgaacaccttccaaacctagtggaagactgtttggtcttcaaacatctctcctaagataaagcacttcatttggaaggcttttaatcatctacttccttctaatctgaacctttacactagaaaagttcttcctagcccttactgctctatctgtcttagtaaagtggaatccaattctcattcgctcctagagtgttccagagtaggtaagttttggaagcataccaatttttttgagttctttaaagctactagatattgtgacattaaggaatttcttttgagaggttttgagaagtatccttaacatgatctttacacattgtttggtatcttgtgggctatttggaatcatcgtaacaagtctctttttgtagataagaaccctattttcaaagacatagaaccttttattatttcttacttgcaggaatattctgaagcccaacacaaagttctccctagacctgaaactgctacagaaggcagctcttcaacagcccttatcattgattcaattctgccttctcctagaaattacaaactcagtgtggatgtggctgtgcaaaggcaacataatatccatggttatggtgcgattgttcaagatcatgttggccgagttattgctgatttttattcctctgctatctcaggtttgcctcctatatttgttgaagcagaagcccttttacgagctttaaattagtgcaagg

SEQ ID NO: 66070 - DNA, 871 bp, Cannabis sativa
tattaaataaaataataaaatattatttatatataataaaataataaaataagaataaaacaaatcacattaatatttgaactgatatttgatgctaattattcgagactctttccatctatcctttgaaaggtaaatatctaacgagcatcctaaaggcctcgttacatatttgaagtaattaaatataaacaagtatccaaaggtcacaatttcccaataaaggaaagaatatcgatgagcttagttgattcaatcaaccaaagcaagacaaagggagtaaaattatggatatcaaaagtttaggatttaaaaattatcaaaaattcgactaagtaatcattgaaatttttctttcacaatcagatgattgttaatcactaatgtatgactgacaaggtcaaataactacattagtaaggtatcatgaattcaaatggaaactctcaaacatataccactaagttactattcgagagtaatatataggtaagttttgattatataattaggatctggagtctcgtttattaagtattatttttatatggtatactgtttagaaattgatttgtataatgtctttttctttttgtgaatttttctatatggtatactgtttaggaatgtcgtagacggtggcccatgagttagcaagagtagctccggcaagtggagctggccaaggtggccggcgaacatgacggaaataagtggaatcaaatagtagaaaccgttggtgattatcataggaagagaaaatagaacttgttgtttggcctcctctgtctctaacactctattccaccattgtcctctgttaacttcatctctttccacctctattaatggttccctcgcatcagagttt

SEQ ID NO: 66071 - DNA, 1548 bp, Cannabis sativa
gaaagatttatgtcctcgtgctaatggttcctgcacttgtgaagtggataaagtggctgagctattgatagataatggcagctggaacatcctaaatagtctctttgacaaggagactgtttctgcaatcctgaaagggggtaatctgtctggccagggtgatgatagatggatttggacttcataaaataatggtaaattcacgagcaactctgcctacctagccctagctgttgataggactcccacttgtgacgttgctccttcactttggaataagctatggaattgtaagatcattgaaagaatgaagaccctctggtggtgtctcctgtccaaggcaatccctgtgcgagttgagatctgtaaaaggttttctattgaggatgttacttgtcccctttgtaggacagagaatgaatctattgaacatctttttctctcctgtaacgtggctttccacttgtggaggtctctccttggggtatttacccagtttgtggcactggaatttgattatggaactggatcaaattcatctgggactttaaaaacaagggcactaatgtcgatgaggtgttcctttatgcctcgctaaacatggacactatatggcggactcaaaacaaaaaggtacataataatggtcaggttgatgtttataaatgtattaacaatattcgttcctcttttgcagttcaccatgcttctttgatcccttgtgcacctatgcgttggttggatgcctggtgccctccccctcaggactggttgaagctaaatggtgatgtttaagtggagttggacagcatgtgttctgcggtcgtggcaagggatcatctgggtagggtgatctgggtgcatacctctaagttggattttgttgatgctttatgtgatgaagcagcggcttgttgtcttgctctggatgtcgcgaagcttaatggacttaactattataattgagagtgactcgagggtagtgatcagtgctctcaatagggaggttacctgtagggagattgagaactacgtctcactttgtattagatcatctcattattttgttagttgtatttttactaatattagtaggaactgtaatttttctgcccataatgtggcaaagtgggtgttacccatcagaggctcggttgtattccgatttcctctatcccagaacacctattttgtaatgaccgcgaggtctaacatcttttgactttaatataagtacgcttttattcaaaaaaaaaaaaacaaaaagtatgttaatttaggctcaaatcacctcatagcatacatttacaatattctctcaaataattcctatttgtattctccaatcactctcctcaacaattcaatcttatatcttcttttccataaaacttattattcccccacacttaaattgttgcaagtattcattttttttcattgatttttttttttttgattaaatacttacaacttgcaaacattcattctaagggaataataactttttttttctcatcatcgcttatacataaccatgaatatttt

SEQ ID NO: 66072 - DNA, 694 bp, Cannabis sativa
cagacatggaattcatttatctaaggagttgtttccaactactttagaaaagataaattccaagaaaaaaattccctaagcatcaatagtaagaggtcttatgtatgctcttgtatgcactcgaccaaacatctatttttgagtgggagttgtgagtaagtattagctcaatccacattggatcattggaagataatcaaacatatcctgaaatacaaaaggaagaactatttgttagcttataagggtggtgcattaaaacccttaggctacaccaaactagatttctagacttgcgtcaatgctagaaagtctgcttaagaaatggtgatactataggagtggagcagtgatttttagagaagctttaaaacctattcagaatctctaactctactagtaaggctgaattataagactaccttagagataattagggaattattcaaactcgagaaagttcaatccagacttagccattattccaaacatggaataactgctagtgttacttaatgataacacagatgtagtttccaaatagtaaagaatcctgaaccataagaggagtaaaacatatagatgtgaaattcacaaatcatggattttatgactaaggagaatgtgatttcggagaagctttatactgaatactgttgggatttacttttactaggatctaaatttactaaca

SEQ ID NO: 66073 - DNA, 892 bp, Cannabis sativa
aattagggtaaactttggtaccctaattggggagcaaaaagaaaagagaaggatatgagaagaatggtggcattactacaatttgacctgacactatttagtgacacgcataaaaaagcatgtcactaaatagttatgagtaatttttagtgacatgcatcatgagactctaaacatttgatgttaacctcttgtaatgtgtgtcactaaaaatatggagtgtcactaaagaataaaataatttttttaaaaatttttattaatttaaaaaatattggcctatagtgacgcgccaagcgtgactgggtaaatgtattccgacacacttggcgcgtcactatatcataatctttttttttttaaaaaaaatactgtaattaataagtaaataaaataaataaaaagttaaaaaaaagtctgtacgtttttattaatcaaaaaaaaaagagaaacctaatatatattagctctctctctccatcatccctgaaacaaaaaaaccctagccgcctacccctttgttctctcttgcaaaattctgaacgaacccatggcccaacaaaaccttactttggcgatcacaaccccatgacctcatgtaccaacctaactctggtgatccccgaccctgaaactcctagcaccgagccattctcttcctctttcttctcatggaacactgcgatttcttctccaaattcgacgagcagcggcaagctttattctccaggtgtggccatcgtttaccccaggcgacacccactaggtccttgccgtcctcgatcatcgatttatttagtcaaaactagaaggtcacggcaggtaggctttccattgtttcttgaagttttttctttttttctcactgattctctttttcaaatccatgaaa

SEQ ID NO: 66074 - DNA, 629 bp, Cannabis sativa
  modified_base (51)..(70): a, c, t, g, unknown or other
cctaaacccaaattcagaccagaaccaatactgggacttcgacccggaccnnnnnnnnnnnnnnnnnnnntaaaccaagaccaggacctggacccagatcgggtcccggacccttacccagacctagaccaaaaaattgggaccacacccaggaactaaccaccagacttagacatgggacccaaaaatcagacccacgctgggactgggacccgaagtcgtacccgaacccaaacctggaccaagactgggaacaaaagttggacctgaacccgaattcggacccaaactcgaacccagactggggacccaaacctacacctggaccaagaccaagacctaggaactagacatagatgggggacctaggccctagaacccaaacccaaatcaaaattcgggactcgaacccgaactaggacttgacctggacccgagaatctaaagtcaaacccagacccagaccagaaacctaccccggacccaaactaggataggattctggacacgaactaggatcaaacccaaacccaaaataggacccttactcgggacctgaactcagacatagacctagaattagacccaaacctagacctagacccggacctgaactcgacccttgacta

SEQ ID NO: 66075 - DNA, 970 bp, Cannabis sativa
gaaaaagagcaacatcgttcttggagaaagatgtgtaaatttggtaagctaaatcatggaacaaaatttcagaagagcaggaaaaaatataagattgaatatattttgccaacgtaaatctcttttatcaacactgttcacaagatgcattgagaaaaataacttttaccagtgaaattatgagttgtactgacaaaaatgataatttttatgggtgaaaaaaatggtaaaaagcatttataggacttactacttttgcgagatatataatattgctattggtgtaaacagagtagcagacataatgataaacaagatgaggctctcccatatgctcatcttttgttgttaatgtataaaaaaattaattatataaaataaaataggtgtctatactaaataaacatatataattacatttatatgttgtattattttgaagttttattctagccgcgcttgaatgaatcttgggtgggtgaaaattaatattaagttcaattacttattttattttaataataattatcaaaaaccattaaacatttaataggacgccactataatggctgtagcaatttatgctccgttaaaaaaaaatataattatgtcgacaaagatcgagtatttaaatttgaaacgtcaaagtcaattacttttctcaatgtagtttggtttgtaaacactcaggtctacgaagctcgctacttgaccccaactaattgccaatcaaaatttggtcgctagttcggagaaactcattgagaacactacttttgaaaaacaaatacattgaaagtggcctcttagaataaatacaaaaacctatctatatctaattgattgagaagaaaacaatagtctaagagaatcttgatgatgttgtggatgtaaaataatgagtagactaaagaccccattaataatgaacacacaaaagattgaaataagtgtgaatggatctcatgca

SEQ ID NO: 66076 - DNA, 876 bp, Cannabis sativa
tccctaaagaagaataagacctgaatcattgtgaaaagactattcaataaaaatttagttagttgcaagtgggtttacaagataaaaaggtgtaccatgtgttaaaaatgaaaggtacatggcaagacttgtagccaaaggcttcactcgaaaagaaagccttgactacaataaagttttttcacctgtggtaaaaaaaaacgtcaatcgattagaataattcttgcaagagttgccaaagataagcttgggtggatcaaatagatgtaagaacaaccttcttacaaggtgaacttgagaaggagatttacatggatcaaccagaaggctttgccaatggaaatccaaaccaggtctatcttttgaaaaagtcattgtgtagactcaagtaggctccaagacagtagaacattaggttttataatcattactcaaattggcttcaataagagcaattatgatccctgtgtatacctcaatcaacatgtgtttttattattatatatggatgatattctcattgtttggaaagataaaactgagatatcaaagctaaaaatacaactacaactgagtaataaatttaaaatggaagttcttggaaaggccaagaaaatcttaggcattgagattgatcaaagtgttccaagagtaataaagttaagtcagaaagaccatttacagagaattttagagaagtttggaatgagtgattctgaagttgtctcaatgcccttagcaccatgctttaagttatcacaatctcaatgtcataagactgatgcgaaagaaaacttatggagaaggctccatgcactaatgtggttggaagccttatgtatgttatggtctacacttgacttgatctagctcatt

SEQ ID NO: 66077 - DNA, 893 bp, Cannabis sativa
ttctaaactagtccggtatacttctaattgaattcatcttttattgttgtgacatttctgaccactccgtcaagtagtttccacggtcgtcgggcccgaagatattttatttcaaaaacgatttccacgatacccccataatctgataaaatctctgtaattaacaaattatgctttatttgttcacttactcgtgtttcactaattaactcgtaattagcttaagtaggattataaatatcccactctactacttacttaatcacatatttaataaaatatgaccaattaaacatcattatattttttcgagatattacaccctcaacgactggaagtttaaaaattctaaagttaacagctctctgttcaatatttagccaacaaaacaagtgatcatacatattctaatatttgtggatgacatcattgtgactagtaacaaccctacagaagtgaacaagtttgtccaagaactgaacaaaatttttgctctaaaagaccttggataacttcacttcttccttggcatagaggtgcatcgagatgaaacaggaatgtatctaactcaagcaaaatacatcagtaacttgttgaagaaatatgacatgataaacctgaaaccatgcccaacaccaatggtttcaggaaaacccttatcaaaaaatgatggagagttactaactaatccttctgtctacagaattttgataggagctcttcagtatttatgtcacacaaggcctgatattgcctttgatgtgaataaattgagccagtttctctaaactcccactacaagtcactagagtggagcaaaaagagtattaaggtacttgaagaggactgtccatcatgggctcactacaagaaatgtcacttttaccagcgca

SEQ ID NO: 66078 - DNA, 1152 bp, Cannabis sativa
aatattggaatgtacttatattttataaggtgcaaataaaattttcttttttatttttcaaaatactaaatataaataagatatttttcaaattataagtacccctatttaatttagaagtgggttttgagggattgggtttatacgggatggttgatcatgtgggaaactcaaattttaaaacttctagacgataaactcctaaacaagagtgggaattgctgcagggaagaaagcagtcccaatccctggagagaattttatcaaacccgaaagtaatgagttggaggttctgaaacaacctacatattgcctgaactgtagcatagacctaaatacaatttaaccctaaaaactaccaaaacaaaatgagatgacaatgatacaaacaaactaagtaacaatttaatgcaatgtagcaagcatgtgaaggaaaaaagtaacttactgtttggagttagggcttgggaaaatgattggctactccgtccgcaaatcttcgaacgtagcaatgatcgctgtgaaaagatgaagttggagaaaactcatagaaaaaatgtcaagggcagagatgacatgcaagtcttcggacagccttaatggtcattcttggcgaagaagcttaagagtttctcaaactttctaaaatggaagaaataatgcaaagatggttctttttttttcttactttatactcatgatattggattcgtcagattagagaaaggttttatcctacgaacataattcaaagtagaagtagaaaagattgtcatttaatgctgatgtacctcgaaaccgcacaaccgccaaaatcaaaggagatgtgtctcttcaacaagaggatcatgacaaaaataccctttgtaatcattaaaaagctctttttattaaaaaagaactttttaaggggcgattgtcatactcaaaactcggcgagcacatcagaagaaaacacgtgtcgagctaggaataatgaagaactcaagcaatcgtaattacacttgacgtggaataactagttaaaagcataattaacagaatatatttataacttggatgattgaacagtcttatgcgagataaaaatgtactaactgttgacttgtgtctcgatgagaaaatgcaagtgtgcatgacgaggcattaacc

SEQ ID NO: 66079 - DNA, 954 bp, Cannabis sativa
  modified_base (299)..(301): a, c, t, g, unknown or other
  modified_base (404)..(405): a, c, t, g, unknown or other
ttataggttcctaaatcacatcgataataacacgtataagtgacttgctaaatcacaatcgagacttaggttttaaaccaaaaacctatctattgctacttaacatggtaatacccaaaactagcaaggagtctaccaattaggaacctgaaactgacacgaaactaatagctgaaaatcaggttttccctgctccaaatctgggtaaccggttttacaagcagtgtaaaaccggttagccggttttactagaaaaccaacaaaattcaaacccctaaccaaaacatttccaaactcannnaaactttccagacctgcatattataccccaataaacatattccaagtgataaaacaacaatcaaagctcagatttgaatttcaccattaaagctccaagtttnngttctaaaactcaaaacttggctaaaccttcaaacaactaccaattcatgcttaattcaaaatactaaaccataactaaacctctgaaaacagcagcaaacaactacagcaactacaaaagcaaaaccatcaattcatgcaaaaattccatttcttaaaattcaagaaaactagagagggaagtgctagaagcttaccctggcttggaatcactaagaattgctagaaaatacagcaaattgatgaagaaaaacaaagaacactagctggttctatagggttcgaatgagagagagagagcttgagagaaaagagctttttccttaattttgtaaaaatgagtaaatgaaatgattttcccttgttttattaaattgtttcagccaaaataaagcataaaaaaatcagattaaacataaaagatttattccactgaagacaaaaagctaatggagcaaaatgaccttttgcccctcccacactaaaaggcataaaaagacactaaagggtatttttgggaaattctaaaatcccgactattcccgacat

SEQ ID NO: 66080 - DNA, 697 bp, Cannabis sativa
  modified_base (96)..(98): a, c, t, g, unknown or other
agaatttatacattaagtataatcgtgaaataaatcatgtgaactgtgcaatataaaagttagttctgatctctattaattagtaaatctgattannntgaaatgggttttatttaaggcacaaacccaacaaacactttttcagaaatatgattagaaacagcattggttcacaaaatgtcaacctgggcattgggcccaacaccaggtgttaacctgggcagtgggtctagtttcaagccactagatggttctgtttgattcccaaaaatacttttatcttaatcttcgatgaaaacaaagaatattcccagaatacttcttgaaaaaactctttcgatttggcctaggttgacaaaatgtcaaccagggcgctgcatgagcactaggtgtcaacttgggcattaagccttctttttggcatctaggtcggtctatttcttccttgaaagcacttatttcgtcatttttttcaaagacaaggaaaatgcacgagatagttctttagtttaatgcttggaagttcccaaacctgggcactgtgtgcctgggccacttggtgctccagatgcttaaaaattaaagtacttcgaatctgatttcgatgcctcaaatatgtctgtcacatgtctaattcatgtcgaagttcaaagtttgaaccatttgcactaagacaaactcgaaaattaaaacccta

SEQ ID NO: 66081 - DNA, 860 bp, Cannabis sativa
actatatgttttagatttaacagaaattgtatattaaaccacaaacataaaaaaatacatgtaaacataaatggcttctaatcttttattgactataaataagattatactgaaatagattttatttaaggcataaaatcctaacagattaaatcaccacagttacatttaattttagttattagattattattaaacgattgtgattaatttaaaaattaattaaaaataattacttgtaacctaatacaattttattttatttccttataaataaaaaataaaaacatttataatattatttactaaataaatgtcttattaaatgtttttgttaaaaaaataatttattttaagtatgtagttaggtataattaatttaagtataaaattaacactatttggctcggactgttctaaaatagaatttttacctataacttccattgatcaagaatttcaatttttgtgaagtaacatgatcatccaataaaaaatatttttattttttaaattaatgatttgaagatttattgattctaacaactgatggcagagttgatcattcggacctttcaatttcatagatgtggatctcagacctatgaatggggatattcccgaaactcacaaagaaaaaaagaaatgagttagacaaaaagagaagaaacttggacaaaaagaaaagaaagtgacctagacaaatatattttgtcgagatcctcagacctatcaatcgaatattaactaatatgtaatcgatcgaatactacttgaaaataaaaatgactctctactcaaaaatgaaatgttccaaatgttcatataaattcttgctttctgtaacgccctaatgctaa

SEQ ID NO: 66082 - DNA, 3296 bp, Cannabis sativa
cactaggtaatatttttaaaacttagggtaattttatatttgcatatccaactctcaactaacttgttttcttctaatttgctattgacaaataataaactcattcattctttatgttttatcatcgtccaaatgtaattagaaagtaatcattataatggtgttaatattgttatcctttcttcttccaaaatcagccaaaatatatctttcataatttttttgtttcattgtgattattagcttttatttatcactctaaggtattgatatttgcttacatgcacatatgcaaggcctgagtccaaactagttgaagcaattgttgaagacattataaacaaattgaacagtgtatatgtatcatcttcatcaagtgatgatgattccaagggtttggttggaattagtaaacgttatgaacaagtaatgtcattgttaaccatagagtcatatgatatccgagtggtagggatatggggaataggtggtataggcaagacaactctagctagtgtcatattcacaagactcatctctcaattcgaaggtggttgttttcttccaaatgttagagaagaagcacagaaacatggactaaatcacttaaggactaaactgttgtcgactttgttagaggaagaaacttcaagtgcaagcaacatggttgcgggatcaacttttgccaggagtaggcttcgacgaaaaaaagtgcttattgttcttgatgatgtaaatgattcagaacaattggaacttttggttggagaccatgataattggtttggtcttggaagtagaatcattgtaacaacaagagatattcaagtgcttagaaaaggagctaatgaagtttatgaggttaaggagctagattttgatgaagctcttcaactctttcaattgaatgctttcaagaatagctctcctccttcaactgattatatagagttgtctgaaagggtggttgattatactaaaggggttccattggctcttaaagttttgggttcttacctacattcaagaagcaaaaaagaatgggaaagtgccttgaataaattgaaaaaaatgcccaatatgaaaattcatagtgttttgaggataagctatgatggattagatgagaaagaaaaggatatatttctggatatagtgtgtttctttaagggtgaagatagaagtttagtagaaaatatactagatggttgtgatttatttgctgatataggaataacagacctcatcaacaagtcccttataactatcatagagaacagagtttggatgcatgatttgctacaagaaatgggttgggaaattgttcgccaagaatctaaggaccttggaaagcgtagtagattgtggattgctgacgatgtttgtcgagtgttgaaaacaaatactgtaagactgctaaattctctataggaaaatcctttccaataaaaatttgaatatctatgcatacagctcataatctgtactttttggtaatgttttcagggaactgcaacaattgagggcatattccttgatatgtctaagatgagagatgtagacttgaatcctgaagtatttgttaacatgtacaatttaagactgctcaaaatttacaattctaacaatttgatcaagggatgcaaattgcatttcactagaggtcttcagtgtctccctgatgctcttcgttatcttcattggtatggataccctttaaaatctttaccatccaattttaatccagaaaatcttgttgtacttgaaatgcctcacagccaaatcgagcaactttggagcgaaaatcaggtatgttctggttggattaaaaatgtctatcagcattagataaaatcatgattcataacttctatattgttttttacagtacctcgacaagttaagaaagattgatctgagtaactctgagaatttgactcaattcccagatctctcccaagctccacaccttgaaagtatgaatcttggaggccatagaaatttgctgcaagttccttcatatcttgagtactttgacaagttaacagttctcaatctcagcggtaattcaaacctgaaaaatctcaaagccataccacaaagaattcagtacttagacttagagggcactggcatagaagaattgccttcctcaatcgggtctcttgacaaacttttctcattgattcttagaaactgtaaaggccttaagaagctctccagcagcatgcataaactgaagtccctggatcatcttaacctgtacggttgctcttctcttgacaactttccagatcttcccatggaaataagatatctaaatttgagtggaactgctatagaacaagtaccttcacaaattgagggtctgtcaaatctccaaatactagatttgggaaactgtagaaggcttaagacagcaccgaaaagaattatgcctctcacacaagcttgttatgaagattataagcctgatattgaaatggtctcttttatgaattgcctaaatttggatgagaatgcacgcgacaaccttatggaatacgcacagcttagagtttggcgcatggcaactgcagcagcatcattgaggccaacacctggtgatgaagatgtaagtctcccttttaactttgttaacataaaattactcaaataggtcatttaaagcttacttgataaacaatgtcattcttctcatgacttaggaacagtctcaacttttcgtttgttgtccgggaaataagattcccagctggtttaactaccaatctgaaggttcttccataactatcaagcttccttcacaatggtttagaaccaacttcttgggtttcactctatgtgttgttgttgcatttaacaactacaaggattacagtagcttggattttcaaactcagtccgaattcacaacaagcagtggtgagagctacaaatttgacaccaagttgataggttgggtaggaaacgagggttgggactcattcactgtggttagattagtggatgcagatcacttgttcttgtggtatgaccatagtttcaatctcaatgttttgaaaggagacgaaagagaaaattggtgtagtaatttgcggaatgcgaccgaagtctcatttgagttcaaccccgtggatcttttcagtgatcctgtggagtcttgctacgtcaaaaagtgtggagtctgcctaatatatgctcaagatcaagattcaacaattgttatggatgaagatgttggaaagctaacagtgggagaaagtagtaagagtaagagaccccgccaagcttac

SEQ ID NO: 66083 - DNA, 1302 bp, Cannabis sativa
aaaaaaaaagagaagagattacagagtggtatgtatgtttgtctaagtagagattttgagagaaagaaagatagaggttgaagttgaagagaaagaggatagaatcctccgctaccaaaatatcaatacatacgtgctgtgtgattgtggtgtttgagtttcttatcacaagttaagcaaatgacaatttagtcctcaaatttgtggtaggtacagtagtagagtagagaagagttagtggagggtataattggcatttaaatcctatggtttggtttgtaagccggaaccgaatcttattgtctgtcttaagcgttaaacaaatggacaaaaaaacgcgcatagagaaaagagaaaagctggattaagaaaaatattttttatttggattaaaatggatattagtttaatctacttaagcattttatatgatctactaacccatgacatttttgaagacaaacattttagtgttaatttctatagctaatgagagtaataattaatctataaatatatttttatagttttattttttggaaaaatacttcatattttttttatagttttgatgacgtaagattcataatttgagtgtaaatatttccataaaaaaaaaaaaaaaaaaattaatgtcactttatcttctaacgactctttctctttttcaaattggagtttcattttttatgtttcttctttttcttttctcgattagggaagttgccgccagcttagctatgcaaccggtgttctttggctgagatggacttttgtggtgcttcttttggtaatggatccttgctcgacgagagtttggaagacggcgtggggtgagttttcttagaggtgcccattgtgggggattgcgcaacaagacttttttgtcgtcaacatattcacttcatgaaagtaatgatgggggttccaaagtatgcactgatgggtctctggtgatatttgtataccatgcttgatcgtttttgctggttttggtcccctagccttttgtctgtggcctcgggacatgctgtggtggatttgtaattcggtctcactctccctctgtcgttgaaagcttgcttgtgtgggcagttggctcttcttcagtcgttgatttttatttgttgtttttgtagttgttgtttagatttattaatgtttttagctttgttgttttattttgtctcttgtctttggtttcttatgaactttctattgttagagatttgggggtttgtatccttatcttgtttctttacctttcatctatggtggtactgtttggttttatgccctaaa

SEQ ID NO: 66084 - DNA, 605 bp, Cannabis sativa
cattaactaatttaattatgccacgtgtacaatgtatctacgtgggtaatccaacacagcacttaatagttaaaattagatgaaaatattacattgctaacagaatatgagttcaggaaattttacagtcaaaaattggattttggaagttagtgaaatttttagaaatttttctgcaatttactttttttttttacatacatagatatttatcttaaattttcactcacttaacattgggaacaccatcagtcttactttcacaaagactaactatgccaaataagaggaacaatgtgagtattattgtaatttgcaataggtaaaaaatgatagtgataaaaataagaataattagtaattttacgtcctaaattttcgacaatattgattatactgtctaaaatatacggcttgttaataatctcccctgaacttttacatttgcagaaatttagtctttttgttaggttttgttccattatatagtttaaatactgacgtgtatttgtaaattagttactttatcttctaaactttgacaactatcaaatcatacattctcaaaataaaaatgagaaagattcaatatttttttagtaaat

SEQ ID NO: 66085 - DNA, 866 bp, Cannabis sativa
cattataatagtaatgaatattgtgtttatctggtgttaaattataatattttgaaattgttaaactatatttaatttttatataatttattatttatgtatttcatttttatataatttataattttatttatttattttatttttaaaaaacattaacagcggaggtctgccactaatgtccgctactattatagcagtggactttttgagtccactgctaataatcattaatagcgaccaattattagtggcagatttctgctgctaataaccaatagcagcgtgcaggggagttattagtggtggggtacttcgccactaataactataattctgtagtgatatcatacaaaaaaaagaaaatatatattgtacaaccaacaacctacaataacccataaaaaaattaatctaactttaaaataaaaataattttaacaaaactaatatagatatagtaccatgatatttaagtgatatgtttctaaatctttaaaaaaatataaaaaaaaaaataaatactaaatatataagaaccgtaaaaattttatgtgagaaatgataatttgaggaataaagagtataaaatagttatttctttacaaattttaaaataagaaaatttacctatatagtagtatgtttttaggtcatttactataatttttttaaataaaagtttaatgagatcttttatttttaattttaggcccttgaaaaatatgggccctaaacactggcctaacccgcctatacctagcgccgatcctgcttatgatggaggagataagttgaaaaataccacttttttgtatccattaatcaaaaataccctcatgttatattttattaaaatataccca

SEQ ID NO: 66086 - DNA, 674 bp, Cannabis sativa
tgcgactgcttacaaggtatatattatatatataactacgtacatggaaaatcattgaatgctgttttttttattttttaatggccatttataatagggattagttccttccaaataaaaaccaatagggattagttgataaatactcaaaaattataaaaaatataccttttccacagatctataatatcttttatatattaaaagttcttatctaaaacaattcttggtttaagtttttgttctttttcgtttaactgaagagtttaacatcgttactttaacttcttattcgaatattcagccaaaaaaaaacactcttattggcatataatttgccattcttattttcaattaatataattatattgccattatgtacattatgtacatattaattggaactaaagtgtttttgttctccattgtagtggttcttgggatcaaatttttagtttcatttatttggtttataattctaggtgggggtaactaatgactacgttgggatcaattgcagtcatttgacgctttaattttattttcttaatgtgaaagtttgggttttttgtttcacttttttatttttatttgtatttataattatagtttacaatgtcatttgcaattgaagcactataaacttatatgtatgtgatttttttttttttgga

SEQ ID NO: 66087 - DNA, 1580 bp, Cannabis sativa
gcccatgctctcaacatcgatccacacattcaacctataaagcagaagaagaggttgttggacaaagaatgcgcccaaatgctcaaagatgaagtcgagaggctacgagcccatgacttcataatggaagcattctttccatttgggtatccaaccttgtgcttgtacccaaacactacaaaaagtggagaatgtgcattgacttcacaaacctgaataaagcatatccaaatgactacgttttgctttttagaattgactagcttgtagacgccacaactggccatgaaatcttgagtttcatggacgcatattgaggttacaactagataatgatgcttacctccccttatttttttctagcaggtagtgcaaggtgttgaattggggaggtgacaactttttaggtctcttatttcttgtacttatggcatgaacaaaatggactctacgtaaggcacccccgtatgatcctcatgttgccatagtggtcacaaggggtcaagttagagcggagggggagactacctagccccttatcgaggctgagccaaaggtggatttagagacagggagtttcgatgctctagtgaggaggaggtataggacttgttctatcctccccgaccgtcccttgtgccattatgatgcccatggtaatccactaaatgggctcgacagtccttcagaattaggactagaccatctcctagagtaatctcctaagccggagatactggattcaaaaccacctaaagtaaggtcggtttttcctgcttctgctctctccaatgaggccttcagtcagatccttactagtggcctaatagcgggtgtccattgcaagattcgctgtagaaaatgttggatgcataggccccattcggattgggtggcatggtcgggtgccacattaaacatggggtggtgtttccgctccaatagtattttatagacgtcgctgcttaatttgggatgtgcccaacaaatctcatgccaaagagcataaagcatctctcgacaatttttgtcttctacagggagctaggttggcctccgtataccccttaagtactacttagatttgaagtctttgtggaagcatagtagaactggctatttttatttcggtcagattggccaccaatggtcgggtgacactagctacacatccatgtcaaagtttgcaagtacgccaaaaaatatttcattgcacaaggtcttagtgggattgagcaccaaggatttcagtatgtgccactcttaagacgttccattcctaccttgctaataagggatagagtaaatcacatcctttctttatcggttgagcaaagaaacattatcaggttgacagatgtggataatttctagatgtatggcttgtatcctccagctcatggagttctaagagtgccaactacaaatgaggcctgccctatggatgagtaaggctctgacttgatgatgataaattacctttatctcatatggcacagaatttggagaggagagagaaggctccgccggtgtctggccagcgggggtccagtaggtgatgttttacttcaaatcattcc

SEQ ID NO: 66088 - DNA, 614 bp, Cannabis sativa
  modified_base (265)..(268): a, c, t, g, unknown or other
aaatgttcattgttaatttgtgatataaagtcaaaaaaataagtttggattagaatatataaggcaacacaactgctggtagtactgctagctcgtgaacaaagtgaaatcataattatttcccttataatatataaccacttaattaacttcaacttcttttttctttttcattttttttttttaaaaaaatattcacttcaactttaaaatgtattatattaacggaaatttacaaaaaatactgaaatttgggttaattttnnnnaaaatactgtcacacggaaaaaattttaaaaatactgtgtttttataaaacaccagtagaacacaagacaaaacaactcaaaacatcagtaaaaaacaccagtgaaaacttaacacagtatactgcagtataaaacttataaaaaaatacaataaaaatagcaaaagttagtataccatgtaattttcccttatattaatactatgtacgtacataaaatttcattatttgtgtaaattgtttgttgtattaaatctctctaaacaaatacaaaaggaaattaaaagggaaagggtaaatggcggcaaaacccacaatactttggttttggtttcgctaaaccccc

SEQ ID NO: 66089 - DNA, 881 bp, Cannabis sativa
ggaccctgccctgacccagactcagatttggacccaaacttggacccgtacccagacccgcaccgagagccagacccatgcccaagaccctaactcgaacccaaactaggatccaaacccaaacttgaatctgaaccaagacccggacccggacccaagaccctgactcgaacccaaacgaggatccagacccaaacttggacccagacccgacccatagttggtgttggggtagagtttattaaaaatatattatctttacacaatctattagtacatttcaataccaaacatagtattgtattaaataatactcatacaaaattaaaatggatataaaattataagttaatattaaaattcttaaaaaaaagagtcaggtcggatctgatccgattcgagtatctgatctagcggggcggagcaggacgagacaaatccttatatgatttggatcaggtcagatcatagctggatcagatccgaccagacccatttacactcttatgtgacgcctaaagattggtcatcaggcctcttagcgatcagtcgccaccacgtagattgggagcctcatttcaatagcaataatatgtgactttatgagaaaaattcaaaataaaaaatgtagtacctggttaccctaaagcggtaactggttacccaaactatttttttcatagatatttttctaaaaaaaaatgccaaattctataaactttcccctaaacaaaaaaaaaaaataaaaatgaaaattaaccttatatatttatgtgtgtcttgcatataattaatgttaggccgtgtggacttttagtcatcacgagtttctttcaatcatcacttctttttatttattttttcaattattattattatta

SEQ ID NO: 66090 - DNA, 1638 bp, Cannabis sativa
agagaattttgaaatggatatatccatatgtgttttggggttgattgttttgtgtttaattgtcccttgattttgagtagaggagcggggaggattttcaatgaaggtaggatccactaaaaaaatttcgtcaatgacttcatgataccatgtaagatcttatcaatatgagcagaattgaaaaatcactaagtttgcaaaagttgcataacttagtattaaagtaaaagctaattcgattgtatctaagagctatcaggagactttgagctttaacaaaatatggtgaagcaccctattttgggactgagaagcctgcaacgatttgttttgtcagtccttgattgtagcaccaagcctgtgcaaaaaatttgtaaatcaaggctagctgcatctacacttagtttataattgccttcttttagaacaattcgttgatattaatttatacagatattggtttgcttttttatcatttttttattaatatctgtgattataaattatatttaaataaattccaaacttttcaaagaattctaaatatattggaatcataataaaatttaaatagttttgatactaattaatgataatatttttataattaatataaataatatatatgaaaaaataatttatatgtatacattatatatgtgtaattagatatgctaaattattatttttttcactcaagtacgtagcacgtagtattgtatatatttatatatatattattcaattcatgaaatctcacacaaatataccttattatatatgatgtatatatataatttatatacatgttcactaatgatgatttgcaaacacaaacttagcacacttttacctatctataataattgaggaaacccattttaaataaaatttgatcactacatattttaattaggccatataattaagaatgatatttgtgaccgctaatgtacacaacctgtttcttatgttgatttcaggtgatacatttttgtcattttaatttatatatataattaaaaaattagaggtatgaaattgaatactattatacgtacttggatcccctgtcaaaatttgttgtccaattttctgtcaaaccaattagaaaaggcatgtcattaatttattaattaaccacaacaattaaacaatatttaacaccttacattccctccgtttttctattaattaatattatatatattcaaatggttaattatttactaataaatgctgagatttataattaacatctagatctattccataagaaaaagctgtaaacatttcaaatattttctcaaaaataatttgtatatataatttgaaaaaaaataaattgtaagaagcaattaaaatgtacatattaattaataattagctgacaattaagtccacaaaagtacattataatcaagagctaaacaattgcacacatatttttatatattgacgataagggctagagttctttctctctcactctacaaatacagagagagagagaattaaagaaagagaaaatgccgcagcagcatatgcatgcatacgttataccgcgaaaccttatctaaatattaaaccctaataagcttttatgcggcgggggccactgtaactcgatcttcgtca

SEQ ID NO: 66091 - DNA, 1217 bp, Cannabis sativa
gatttcgtcgtacctggtagctccgccgatctaacggcgtcagtgcttcggactctgctccatacggtgcgttcagggatgtcttatttggttatgctcgccgttatgtcttttaacggcggcatttttatcgccgcaatttgtggacataccatcgggttcttcgtttttcggactcgggctttgttgaggacagcccattcgggttcgggttcggaaagaccgtacggtcatgcgatatgaaagttggaagagtttagtttcaaatttacaattggttattttaatttgttgcatgttgttgagctatgaccagatttttttttttttggagggaattaatgagtccgttttattatcatagccattactttcaattttaatttgaagaaataatttttagtttaggcacttttttttctttctttcttcttcttgtgaatagaatgatttttatcgaatataagactgcaaatacagacaagtattataaattggaagaatgaattgttttttttttttatgtgaaaacactattattattaatgaatgaattgttagtcaagcaaagagttataatataaaactcttaactaaaatgagaaaaaaaaaaccacctaaaatttgtcccacttatagaaatgtactacaaacttacaaattttagtaataaattaaaataaaaccgcttttttttttttttgaaatcagtaaacagcctttgaatttaatgatatgaatgaagccacctaaattttgtgtaaggatacacattaaatttcgttagccaactaaaattaaaatgccgaaaacaaatctaaacagcacaaaataagcctaagtagtttcaaacctgatggtttatttattgggatagagaaattgatattatttttgcattggcttaattttttaaaaagtgagatatttaagtatgaagtacttacatataaggttctatgggacaagtcacaataattttttttaaaagaatgaaaattatgttgcacaatttaccgggactaatataatattttgatataaacttgataaaatacaaataatatacttctattaatatgcttaaataaacactatataatttatagggatacaacagcgtctgtctcccaggatacaacagaataaagtaacaaggcgcaccaccttttacttttggcgaactaaatatgcccgaactctataacctaattact

SEQ ID NO: 66092 - DNA, 1040 bp, Cannabis sativa
  modified_base (757)..(780): a, c, t, g, unknown or other
ttctctttttcgaaaaaaaatccttaatatgaatttctataacaataaaatttaaacacatataaagtcgagaaaccttacattggttgtagcaaaatatatgactccttcaacttagatttttaacccttcttcctttctatcgtagagtattatcatgatttgagcccgattctccttcaagttgttagattctttaaagtcttacactttaggattgagtactagacttactatgggtgggcatgcactcactcactataggcgcaaaatttgatgaaaaaaatgaaggagattcaaaatagaaaaacaaagaaggaggtctcaagaactctagttgtctgacagaatgtaaactaggttatatgagttcttatataatgagaccatcttattcctttcatactatttcacctagggttaggattcaaatcatatggaataaaaaatgataaaataatagcaaattatacactaagtggtcgaccatatagctggcccacactagttataattttgctatttttcaaccatttatcttttatttcacaaatgctatattttccaattttaatcctataaatgccaaaactatttatttaataatttatattatttattaattagactccacaaagtctctaaattaacaaataaaccctaaaaactcttttttttttcacaattaaggcattgcttagtgaaaattcataaataagacctgtctaattttagaattgtaattgattaattaaannnnnnnnnnnnnnnnnnnnnnnnagtattgtctcaactagtatgggggccatgagcctgtataatcaagcttccaataagtacctcttgaatttaccaagtaaattctctaacttattaatatctccttgcaccactatagatttggaattatactctcaattatgttgagcgctctatatgttcgacgatatagatacactatgaaattatccaatgttgtaatcctaataatcaatgatcctctatatatgatctagattgagtagggacaaatttaccgt

SEQ ID NO: 66093 - DNA, 500 bp, Cannabis sativa
gtaaaataaaaaccgtaaccgattggtcgattataaaattgtaaaaactgatcataaccgactgatttttacccctaccttttagtcacaatataagactgacgatttataattagtcataattattttacttttagctagtcacaagttttgttatgaataaaagtgaaattttttgtagtgtgagaaggtgagagggcatatgcgagagagaaagaggtagatgaggataataactcaagtaaagagaagttagaagggttgaggcagctagggtttttggaggagaagaatcaggcaatggaagaagaagaataagaagaagaaaatagaaaagaaataggaaaaatattttatttatttaacattttaaattttatgttatttatttttaactattatttatttttataatatttaaatgattaaaattacatgtctcactaaaaatttatggttgtggcatgcctatggcattcaacaacaccttatagtaacag

SEQ ID NO: 66094 - DNA, 813 bp, Cannabis sativa
aaaatagatttgaaattttttgaacacgggtgatagactagaatattataaactctgttttcggagttgtaaactatttagaatttttcaaaaatttatagtgatgatattgtaactataaagaataccactacgaaaaaattgaaaaaaaaaattccagtatgtgattttaatagtggagtttaactgagagtttgtaattagcacttctctattttttttttaagatttccaattataacatcctcttacaatcttttagtcaatcttcacgcctgaagttacatgccgaaatatttttttatagcgatattcattatggttacaatatcatccatgtaaattttgaaaaattttgaataatttacagtaccgaaaattgaaattttaatattccagcctactactctgtcaaaaaaatttaaatttatttttcggcgttttaaattattcgaattgtttcaaaaatttgtagtgatgatgttgtgattataataaaattataaccatatatagatatacacataaaattttataagttgggattccgtattcaaaactgttagagatattatacaatagaagaaaatcaaaacattacaactttattattacaatataattgtttaaaatataaagttaaaatatgtaacactcaaacttgaaaacttcatgttttagactttaaccatatatagatatacacataaaattttataatccgagattccgcatttaaaactgttagagatattattacaatggaagaaaatcaagacattataactctattattacaatataattgtttaa

SEQ ID NO: 66095 - DNA, 1086 bp, Cannabis sativa
gggttagaagttggttttatatttcagggttagacttttttaaaatggatcaaagcccataattgatttcttttaatggcttattgcatcggttgtgcaccgattctaatagtgtgtatatatatatatttatatttcatcttttacttcgatttttattttagcaaccgataaataattgacgctaattaataattatttacgtcagtagataactgaagcaaaaaagtatgggttgacttttgcgtcagtcaacaagtttgacccggcacgttactcgatgcgaaaacccctttttgtagtagtatagatgttccagaatatcaatttcattcccacccaccaaacacacatcattattagctatattcagactgtacaacttatcttttcttttttgcaaatgatccaacatacacaactagagcataaacttgtgttttggtatgctcaatctctcccatacctcttgcttccaatctactttgttctaattagcctcaagtttgcataaccccaacttatttgatacgcctggacataaatctttgaatattaatgaaactcttaaatttatccttgattgatactatttcacgccagtaccaactactagtggttgggaccttataaactcgccaattcgtgtctcgtacctaagtacacattatagatctgttaatttgatcgataaattatcttgttcagttgcaatgatccatatatactttccaataatgactgtgtcctatgaaattaaagtctctaaatccaagtccacatgctgatttttgtaagcaaacttcgctccattccttttcacctggtccaccaaaactgaattgactaaagtagctcttcttgcaaaagacagattgcatgtgctctatgttctaattcacttactcattttattctctagaacctcagaatcggttctaggtagcctttttgaacagattggaacccccgaatacttaaattacatttcactcttagaatagcccatgagaatctagaacttgttgaacttcctgcaactccattccagaacaatatacaacaaacttcgctttatttaggtgt

SEQ ID NO: 66096 - DNA, 1150 bp, Cannabis sativa
gggtgatgaggtatgtcaatcttgattctgtatttaatactatgtttaaagttggtgcagcataacaaaattatttgtaatagaggtttcatttaaaatgataatattattccagcttgaactcgagttcattcatgtacttgttcttccttgttgtatcggatataagctttgattttgttcttaggcctgtaggtttgctttctgagattgtaattttttaaagctttcataatttatctagagcttcagttgctgattatgatatactatataggtgatggttgtaacaacacacgaaggagtacctgaggaattttatggtgcaaaattgattggatcccggaggttgctcttacgcctgaacttttgagttatgacccttcaagtttcaaatacaattatcaattgtaaatccttaattatttattttttactctctcagtttcccatgccccttgtatcagaaggtacccctgtcccttgcactgagtcctagaatcatttcagaggttgctcggtttaagcctgacataatacatgcctcgtcacctggaataatggcaagtactttattcctcctacctgttcttggtctatgccgtgtgttttataagatagaataatgttgaacaacttttttttttctcaggtatttggtgctcttattatcgctaagctgttatgcgttcctattgtgatgtcctatcatactcatgttccagtgtgagtttgatttttttcttgctttctttaaaaactttatttcatgcagacattgtctagttgaatatctgggaacgccaacagtaactttcgaattcttagatagtaaatcatatttctcactgacacatacaaactaagatttactctttcttggatcctgcagatacatcccaagatacacatttagttggctggtgaggccgatgtggttggttataagtatgtcaacttttttttttcggggggtattttggtttcttgctcttctgataactaatatccgcctttgatattaacattttggactctcttaccagaatttctgcacagagcggctgaccttacactggtgccatctgctgccattcagaaggatctacaagcagaaagagtagcagcaggtgaatatcaagtcttgtat

SEQ ID NO: 66097 - DNA, 583 bp, Cannabis sativa
ataataataatgggattgtaatggatatagtttagtggtaaaagaatatagtttggtagtaaaagtgtgatttgttctattaatcccttatatggttaaggggttcctttggtttgattaatagttcattccgattaaaaactttatctcgtaaaaaggatttatttctttttttctcaatgaaaaattcgagaaaaatatacattctcgttatttatatccaagagttaaggtgagatttgttctattaaccccttatatagttaaggggtttttcgataaatatttcattccgatcaaaaactttatcttgtaaaaaggatttaatctttttcctctcaataaaaattctaaaaaaaatatacaattctcgtaatttgtatccaagaattaaactgtgattcgttctattaaccccttatatagttaaggggtccttcggtttgattaatattctattctaatcaaaaactctatgtcgtaaaagaaaattaacccgttttgtcttaatgaaaaattcgaaaaaaaaatatacattcttgtgatttgtatccaagaattaattataaattaaaaaattaga

SEQ ID NO: 66098 - DNA, 811 bp, Cannabis sativa
tcaggtgcaaccggctccctattccgcatggagttatgtgtgggttgattcagatcgagaccctcttattcgttcacacgttctctgcgaatatgattattgttaggacgttcagttcatcatctttttgtcatagttacctgagggttacctaaacacgtgttcgggactcggggtggacgtcgagtcctgactctcccattgactttagcctgcaatgcccgcatatgttcctgcatgaccgtacactgtgctgttgacaactggacaattcatttagaggctacactcggcgtgataggcgggaagtggcccacaatggatgccggtgtcgatgtctctcctacattacgagtagttttgggaacaaattgagaggagtgacgttggttagtcccacacccccattgattgtgccagtcggattagttctatcacttggaagtgggacattcattgttccaacgttgaaagatcaagtgtttatgtttgtctgtttgcagccatgtagattttcctccaaaatcaaaagaaacttcccacagacggcgccaaatattgtcataagaatttggacaacactaaatataaaataaacaattgatatttaactaaaaaacagcgagtactgaacctaaaacaacgagtattcaaacgagactgtctagacaataaaaaacaatgaacataaggaagtatagtggttcagtcagatcacggtcttcatagtccactgttgcaaggaattttttctgtcttgtcttattcatgttgaaagactatcttgatttgactcacgaatctctcgaga

SEQ ID NO: 66099 - DNA, 589 bp, Cannabis sativa
taattctaatagcatgccaatagccattattaaccaagtataaactgaatttttcacgatgccaagctaactaatcaaagataggagaatggcccctgggtataacaagaaagaatagcctcagcctcatcttttttagaagagttgcgaactgtaagatttgaagagagatcttgaaatcagagagagatctcgaaccagaaaaacaaagagagaacagagatgaacaaaatgatgagaagcttaatttctttattgatagaagagatatttatacagagtctttaacagagaaaacaattctaactaactaactgacaattcagttagagcttttaactaaatacaacttgtacatcttttaactaacagtactaacattccccctcaaactaaatagtgtagacaccattttcagtttggctttgaggtacaaaaatctgtctgtagttagggacttagttaacagatcagcaacttggtcgattgcaggcacatatcgaacatagagttgcttgtccaggatttgatcacgtacgaagtgaaggtctatttcaatatgtttagaccgtgcatgaaacacaggatt

SEQ ID NO: 66100 - DNA, 1075 bp, Cannabis sativa
tagaattttttacctttgagtccagataatagcaagaaattgtcaagaatctaaaccgcgtttataaccatatttttctcatttatctctgatcaagcttgatttcgggtggatttgctctcaacacatgagttcgaatattcgagggagaaagagcctgtaatgcgtgatgaagcaaagggagagattgtaattgtcaaatatacatggaaaactatacctttaaggtagacttttgtggtgtgtttgcatattataatgagttcaatgagtcaccataccttaatatcctacgtttcccttatcaagcttttgatgatgatgagctacttactactaatggcggtgatatagctctagactcttagtctagaccagtaaattttgatgtatcatgaatagtgggacatgatgtttagttctgtgatattatttagtatgtgtgagaaacttatagactttgcttaacttatcttgcttactttgaatattgttattctctttttcaatcacatcttgcttaatgaattcatcggattgggtgaatttatcgaactgatgatggcctgagagtatgaaggtctaacacaacaaattgaccttatgtaacattaatacattttcttttacattcattaaaaaaaacaaattgaccttatgtaacaggaccattaatacattttttttacattcattaaaaaaaaaaattgaccttatgtaacattcattatgttatttataaggaaaataatgtctttaaaagggaaaacaagattgaccctaatttaataaagacaaaattgtttctctcgatctgctagagttatctcaaaaaacctagccaccagttttagttcgtcttctgaccaggcccgctaaccatttccaggcttgggtgtggctctgattgggtcccttatttggcacgttgggataagtggatggttcacctcaatcttgtctctcatagtttctctctatttctcctagggttgttatgcgttttccaaacctagtgtgttatggggcagtggtgatcagtccagatccagcagggcctagtagaggtttggtg

SEQ ID NO: 66101 - DNA, 1161 bp, Cannabis sativa
tagaagataaaaaatgcattgatcacgatgacactgtttaatcatttttatttttttatctattgatctgaaatagagacaacgaagatataggtctagaggctgttttgcttcataacttaaaaattattttcagttttaaaatacagattacagttttaaaaaattaataggagtcttttggcaaaaatttttaaaaaaagttttttaaaaactgagttttaaaaaattcgaaaatagaaaacatcaaaatgttgtttttaatttttaaaaacaatttttttcatgtcaattttttttgtctaagatattaaattttacatttttactcacatactcagatcctagatccgaaaccagactcgaacccggacctgaatgggttcatgtcatgacatagtgttttaatattgatttttttagtaagaaaaaaatctaaaaatagttttaagaaatttgtggcaaacaccattaaatttttaaaatgaccaaacaggctctagtatttggatttgtctttttttttttttttaacaaacaggtattaaaatgtattttatttgtcattttgttcgtttattgttatttataatttcttgaattgttttatttgagactcgtataagtttgatatctggtaattgtttgtgatttttatatcattgtattgagcatagaatcatttgtaaaattagttagttgacaattcattgtaggtagtttgtgaaagtttgatcaattaaatggtatgtttctattttttgatgtagtaaattcaacaaactaacacttggactacaaaacattatcccataaaatattaagggatattggcggttaaactacttgtgaattttaaattttttaacacttatccacaaaaattaatttttttggggcaaaactacctaaactcccattctgttttgctctatatcactccgtccaaaaatcacagttaagtgtcatagtggattgcccacgttacacacgtgtacacgtggcaattttttagtggcccacgtaatattaatttttaaaaataattataaatatttaaaaattaaaaaatcagaaaaaaataattctaaaaatattgttttttttggatatcggcggttaaaccacccaaactttaaaatttttaacacttaaccacaa

SEQ ID NO: 66102 - DNA, 1133 bp, Cannabis sativa
taagggtaattttgggattttaggatgtttggagaatatttagagtgtttatttaaaggtggtatattaaaagaataatctaaattttaagtatattttaacaaatttcccataatttatgttcgtaggtacttatattataacattttcacacaaccaaaagagaaataaaaataattaattttgatgcgatgaatatatactattacttattggacccataaattgacaagtatcactacagatcatcaaaacccccaatacttaacttatcatctatctcatgtactcaattcaaactccatcgaatgtagcatcaacacatgaagtagttctaggcaaaattgtcacccaaatactttcatctctatatgcctccaaatcattcatcaattctgatattcctaattttatactagactttctatttattgtcctactactcttcatccccatttgaggtaaaccaacaaaagttccagcaaattctctataacttggccccacatttgtctcatttactaaattcacatacacatcaaatttcactttcacatccctattaattatgactccataaaccaagaacttcctcttctcctttcatctcatccttaattcgataaggttttggcctataaacctttattgtcattgggttttcaagacttcgaccctttatgtcattgctcaacaaatatagccttgaagtttccttatagtaattctctcgaattttcaatgtatgtttcgctatttgtggcgaaacaaagggcttaggtcgcttgtctaaccaagtaagatcagtcttctcgtaaatatatcccatttttgtagtattcaaaacatcagagactttcatcttgattagttgaagattctcatcgtagaaataaaaatgtgaatcgagccaaacggtgtcgtttattggcatttgcatatcatgaatatctctccaaatatcccaaattcgatcaatatttgcatggtgtgaataaaacacatgggtcaaaccctgctgagtagaaagcacccatgttctcctggttaggattcgattcaagaccaacccaaatgtggatagtattgtgtggtgccaactcaatcgtaccaggtccatcacaaaacccatc

SEQ ID NO: 66103 - DNA, 1416 bp, Cannabis sativa
caggcgaccctggctcgcagggtttgcctcttccacattttgagcgattgtcaaatctccattctgagaaaattcaatcggtttgtcatctttcccccctttcttttctttgcatctttcttcaccgccactttccttctttgctctttggggattgaatttttacccgagccaaaggcaaaggggagactttcctttaactcgggtgtgtccatcgagaacccaatcggaacatcaattagattttggctttcattcatcaccattggattatttgctgtcctttgaagtttaccagcccccactacctctcgatcctccaccaatcttcgtttcccacgcccatcttgtgtcatatcatgtatttccaccccggtttcctcctgctgaagcttctccgatgttgtattttgcagctttctgatctccttgttacctgggtgtggttctttcccttttgttacttcactcctcacttgtacatgctcttcctctttattcaataatagttcaaaggaattacccatatggagattgagactttgtctactgccactttgtatgttctgttcttgtaaaattacattctcattattgcctcctttcccccttgaaatccatctctaatcccgttatcaactttcagccatgtcccatacgccattgccgtcgttccattctcccctatgatttcctttatttcaagagaacaatctttttgactatgaccaatccatccacatcgaaaacacatgaatggaagatcatcatacttgaatgccacccacttcttggagccacaacatggtaataaatatcctgggcataccggtttgtttattgacatccacacctgaaatcgaaaaaacccatctgccaccattcgagaaacatcagagttctgaactgtaacaaccgaaccagccatagacgccaatcttaaagtgtttttctttgtcagataatcaattggaacccccaaagctctaccccaaattggaaagacattcagatcattcttccaagattcactagagttccccatcttacccaaaatcagtaccccattcgataaataccatggcattcttgttaagattcgggattgagtttgttctgaattgaaagaaaaggtgaggaacataccagtgctaaatttttcttgaatcttgatgttccactccgtttccttcaatttccatattcgccccagcaggttcttcaagaatcccctgctgtgatccaccttcgaacacaatctcccctaaagattgaattttgcaatcatggtggatatactgtggtccacctcccattcttcttcatccgagacatgaagtttattggttttagctagcagttcttccatagtaatggcgagtacacaccagttcgatcaccggaaccccttcgtct

SEQ ID NO: 66104 - DNA, 1056 bp, Cannabis sativa
tggtaaaataattccaacagattctccttgggagcctgttcggttttaccagcgaactttccctttttcccattttcttgctgattgttattgttggactgtttaccacccgagcttgaactgctttggtactggggtagctggacggatgttccagcagaggaactttttgctggccaggtttttgctcaacctttgctcattgaatggcttcctcaagcttaatgaaaccatctgcacgatcaaggaagtcactcatagagtctattggtccaattttcttgatatctttccaaaaatctccaagaacattgatgccccccagtattgcggacgatttcctgcctttggtcaatcgtgcaaccttagttgcctccgtcatgaatctgttgatgtaagctcggagaggttctcctagtctttgcttcactttgaccaggtcttctaaatgcaacgggtattggcgagaagaggagaattgtgcatggaattctgattagaaagccttccatgagtttaaccttccgggtatcaacttgaaataccattactgggcagcctctgagagggtggcaggaaaaaatctgcaacatacatctcctcgtgctccttacaggtccatttgcatttcaaaatacttgagatgggataagggatcttccttcccagtatacatcttccaagttggcatcttgaactgatgaggcaactctgggacagtaatctctggggagaaaagggatccacatgctctgtcaacctcgagtgcattgttcatctcaccagccaggccttgccacataatttttagtccatccaactgtgcctgcacggctggattaacttgttcagcctcttgaccgaccagagtaacatcagcatctctttgagcatgattttaagcacgagccccgggctgcacaactggcacgtcatgctctcgtccaaccttctccttctgttcagatcatacctgagatcatgaatcgttcccaatcgattaaatatggaaacaccggttgtcttagtgactggttggtttcaccaattagctgg

SEQ ID NO: 66105 - DNA, 663 bp, Cannabis sativa
acaaaattcacccacttcatacattattgtttgccacaatcacaattttgataatggtcaaaaagtgtaaattaacttgtttgttttatttgagaaataaaaataattaattatgtagatgcattaattctccatttgtatgtcattagtcactataatattaatatcttaccttttataatcactataaacaatgttgttatacttatatggttacccaaaaaaaaatctatcaccaatagtggctaaaggtgtactaattataaaaatcatatcattcttcttctttcatcttaatattacaattaacataaataaatgttattttaataggtaaataatattttagatcttaataacatcttttattttataaaataataaattagactttatattttttaaaatagaaccctaaattaattttttgttaaaataaaatttaataataattcgatataaatatgttatgacaaaactagttacgttttctatatctgttcgtactaaaatttttcttcaacttggttatattaaaaaaataaaaggtttttttttatgatttaacaaaacaaaacagataatctaaccgatgatttttacaaaatacagtatcgaaaatagtattaactttttttattgggttgttttaattaattgaaa

SEQ ID NO: 66106 - DNA, 977 bp, Cannabis sativa
ttttaacgaccttaaaagttgaggaggtattatttggtacatgtcaaagttcagggaaaaaaaaatcctaattagcaattaaaatatagtgtaattactaattataatagactatgtgataatgtaatttatatgatagtaagctcttataaataacttttgtgatgtgtaatatataaaaaaaaattgttcaaaatataattttttaatagttggccaccccaatgatttagtcctggttccgcccctgattaccatcgtgacattcttggccaattcatcgagtttccacggtccccgaacccaaaatattttatttcaaaaatagtatacataatacccacatgttccaataaaatctcagtaattaataaattacgctcatttaattattatttttctcaaaagttactaattatctcataattagcattagtaagattataaccttactctaagacctatataactacatatttaataaaatatgtctaattaaacaaaattacatttttttgggttattacactctctctcacatcttactggtttttttccagcctcgcctgggttggggtagctaaaagaatgggtttggagttcaattgttggggtgagtctcagttgggtttgttgggcgtggctcagctaggtttagggtggtggcaggggtgtggcttatttttcagatctgacttatttgttttattttatagtttgcgtctcttcaaaatcgacgggaatttgaaaaatatatatcttcttgttttgcgttgatcatcagttgaaggtactgttcatatgcatcttttgacaattgtgacggaaaagaacttttcgcgtctatggttattacgtcagttttggcaaccgacacaaattttttatatcacttaagacttggtgggaatatataggcttttttgtagtagtgtataaggtcagtaacatcgtctgaaagtgcaactagtagattt

SEQ ID NO: 66107 - DNA, 1797 bp, Cannabis sativa
gataaacaaaatccaatcgctccagttggccaatggtggtatcgtctctgacgaagaaagcatcacccgtgaaatggaatcccactttaaccagctcttctcgtccacgggcccctcgattgatgagatcaacaaagccttgcatggtattacaaactctctctcagagttagacaaatccctcctcgccgaggagttctccttggaagaaattgaaaaagcttttttccaacttccctctgacaaagcccctggccctgatggtttcaactctaatttctataaagccaactggacctctgtcagaaatggtgtcctcaaagctgcctccagctttctcaatggtaatggggacatcacccctctaaataccactctcatcacccttatccccaaagtcaaacgtccttccactctttcggaattccggccgatcagtctttgcaacatcatctacaaagtcatctccaaaactattgcaaaccggcttaaactcgtcctcaataatttgatttcccccaaccaaagcgctttcctcccggatcgcctcatctcggacaacatcattattgctcaggaagtggcgcactccattaaactgaaaacaaggggtaaaaaaggttggatggcggtcaagttagatatggcaaaagcttttgacagagtggagtggtccttcatcgaagctattctccggaaattccaattcccctcccgttttatcactctggtgctttcctgcatctccacagctaccttccaattcaacctcaacggcaaagttacaggcagtgtttccccttctcgaggaattcgccagggcgatcctctttcaccctatcttttcctcctctgcgcagaaggtttctcttctctcttgcgtcagaaagaaattgataggtccctgcctggcataaaagtggcaagacgggcacctgccatctcccacctgctttttgcggatgacagctttcttttctgtcaagcttccattaactcttgtaacgtcatcaaagaggttctggatgtttacgagcgggccaccggccaaaaagtcaatttccagaaatcttcattgtatttttctcccaatgtggagttaagggaccaaaccttgatctctgacttcatgggtatccctgttcgcccctcttttgaaaaatatctgggtctccctcagcacataggtcgaacaaaaaaacaactgtttcattaccttcatgacaaagtttggggccacctccataactggcgaaacaaggttttctctaaaggaggcaaagagactctcttgaaatcggtcattcaagccattcccacttatagcatggcctgcttccgcatcccggttgccacttgccgctcccttgaatctaccatggcaaatttctggtggggagttaatgacaacaatcgccccaaaacccactggcaaagctggaaaaagctttgtagatccaagaaagatggcgggcttggttttcgttctttagtccatttcaatcaggctatgcttgctaagcaagcctggcgcatcttaaagcaaccaaactccactgtgtccagaattttatctgcccgatattaccctcattcttccctttctcagtagctccacgggcccattctccgtctttcgtttggcgtagtatttgctggggaaaagatttgctgcgcaaaggtcttatctctaaaataggcaatggacagaacacttgcaccactacagatcattggattccgggtttccgtcaaattacccccttatcccctgttcccgacagagtcgcttctttc

SEQ ID NO: 66108 - DNA, 994 bp, Cannabis sativa
caagaggctattcaattcgaacaatggctcaaagccatgaaccatgagctcacagaactcatacgaaacaagacttggagtattgtcaaactgcctccaaacaaacgagccatcggatgccgctgggtctataaaatcaaattcaatagcgatggtagtgtcgaacgacttaaagccaggcttgttgcccaaggctatacgcaacaagaagggctcgattttttcgacactttttctcctgtagccaaaatggttacactaaaacttcttcttgccatctcagctgtaaaacaatggcatatattgcaacttgatgttgataacgcctttttaaacggtgacctcaatgaagaggtctacatgactctaccaaaaggcttaactcttccttcttctcttattgcagaaaataatctcgtctgtaagttacacaaatccatatacgggctcaaacaatcatctcgtcaatggtacaaaaagctctccgatgccttactcgaagaaggattcaagcagtcccaagcagattatactttgttcacacgaggatccaatgatactttcatcgctctcctggtttatgtcgacgacatcataattactggacctaatctcgcacttctacaccaacttcaagcctccttgcaccagaaattccaactcaaaactcttggaaacctgaaatactttctcggtttcgaaattgctcgtgcacaagaaggtcttttcatctctcaaaggaagtatacacttcaactacttgaagatacagggtttcttggcagcaaacccagcaagactccaatggatcctaggcttaaactcgacaatgaacatggcgagactctagacaatccatctacttttcgacaactcattggcaaacttttgtatctaacattgtctcggcctgacatcacgttcgccgttaactgccttagccaattcatggccactccacgcacctctcatcttcaagccatacatcacctgc

SEQ ID NO: 66109 - DNA, 888 bp, Cannabis sativa
aaatttatcctaattctatcaaaagtttggcagtataacgattgtaattgggcgttcccaaaattttttaacatgcctaaaataacaaacaaaataaatataataatataaaacaaacaaaataatactaacaatacaaaaattatctacttatccgactgcagtatatgtatttgcagaacctattttactattgttaaatatttaagatatgcaaactcaacttacatacataatattattctacccatccgaccgtagtataatatatcactgaacctagttcactacagataaatatttaagattttcaaattccactaagtattgataaaaaattaataacaaaaagatcgtgaaggtatatacctgtagtaagctaaaatacgatcaactccaaattattcggaaccttaaaaattagctcacaacctacaatataataaaatgcaacaaaactaaaattttaattatttaagtactacttactagttattaactagttactagttagtagatgatatacataaattcttaagaaatttaaatatacatatatataataaattatatctcacattaataaaattttaaaaacatcatttctaaactaattaaatttctcctatctcatcctcattcacaatacatatatattccttagaatatattcaatataattataatatttttataaataaaatacacaaaagtatatatatgtaaatatttaataaaacctaaaatatatacatatatactatatattaaggtttaaatttttactttacaagcacaatctgatgaccaatttcgacaaaagttcagccaccatgaacatacacaataacataatattaataatataaaaaaaaaacctcaagaaaa

SEQ ID NO: 66110 - DNA, 913 bp, Cannabis sativa
tagggttcgattctggccaagtcctgtcttcttcctcgctttcgaagggttcccatcttttgggattgaggtgttcgcctcttgagtggacgagatactgaagaaaacccacaatcttcaggtcacggatgaagatgaagaatgggaagtggataaaagcttgtcaatcacggtttcaaaatttaatttgagaggccgcctctgtactaactcagaacacagtaggagatttctcaagaaagtgctgggagggatatggagattgaaggatgtcgaatggaacatcaagatcaaaaaaaagttcgaaacaggtcttttcttaacctttacatttgcatctgaatcaattcaaagcagaattttaactagaatgccatggtatttatctaatggggtgttaatcttgggcaaaatggagaattcaaatgaatcctggaagaatgacttaacaagctttcctatatggggtcgggcatggggagttccatttgatctgctaaccgcaaacaacacagttcgaatggcagccaaggcaggggaagtaatcacggtatagaattcagatatctccaagatggttgcagatggattttttcgcttcagaatctggatgtctatcaacaaaccagtgtgtccaggttttcccctcccctgtagcggccaaaagaagtggatagcattccaatatgaagaattacctttcatgtgctttaagtgtggaagaattgggcattgcattaaagattgtcatcaagatccaattatggttcaagaggaaggcacggaatgtacagctgcgtagatcggaagagcgtcgtgtagggaaagagtgtagatctcggtggtcgccgtatcattaaaaaaaaacaaaattttcagtgcaaaaacaactgcggccaattctaaatcatga

SEQ ID NO: 66111 - DNA, 820 bp, Cannabis sativa
aaaaataaattatatatgatatatatattttggaataattaacatttttgtcttctaaacttttgacgctacctgatcttaccccttaaaatatacggcttgttaaaaattctctctaaaatgtaattgttacataattataccccttctgttagattctgattattttatcgttaagcattagtatttttaccccctaaattttgatgaatacaaaattttactccctttaatcaaaaaaaattataatattttattagttttaagaaaattattaaaaaaaactaaaaaaaaaataaattatttaaaaaagattaagtttgttatcccgatttttgtccacctgacgtggcatgtctatatggccaacatcagtgccacgtggcaatacaactcactaacaagaagaccaagtcatctaatcagcacttcaaccaacgaggagtccgagtactcaagcgagacgacgaagtaacgaaccaaccacctcaagggggctggtcggccctatggccagcataggccagccaaattctagtcatcccatggccagccagcatccatcctgaaggtgcatggccggccagcctttggcctgacaggatttcggtgcgcagctttcagatgtggacagcaatctagaccacaaattgggccttaacaactcacaaatatagagagaaaatatctattttgaggggtattttagtcatttctaggggtcgaccccctactaacccaaacaggtcgacccctagaacccaaacgtcgtcgtgccctttcaaactcgaacccatcgtgcccttctcctaaccatctt

SEQ ID NO: 66112 - DNA, 990 bp, Cannabis sativa
cagaaatatagacttataagttttggcagtttactcattttaataataatattaaaaaaaataggtttgtaaaattgtattttcaattgtgcttatatttggtaaatagagtattgttgattaagtattaatttgtggggattgagaattatgtgagttattgcaacctcttttttaattttataattaattgtaatttttttagtatagttaaaaattgtaagtacgcggtccataatgtggccaaataagcatttgtcaataatgttacgggtatggtagagataactactatacctgttaatatcttttgtaatgacgatgaggtctaactttaatttcatttataaatgcatttttcaaaaaaaaaaaaaaaattgtggtgtctaacaacactattaatattaggtgtcattttgtgtgattaataatttttttttaataattgttaaaatatgtgaaattaaatatttatttataccgtaatagtaacttgatcaaggtgctcttaattatatcaaattaattaaacttgcatatataactcaattgatcatatttataacattacagttcaaataaataattatatatacaattttgaaatataaagtacaaaataatcattatttgaaaacatacatattaaatctatatcttgataaaacacatattttcataaaacacaaagtatcaaaataatattattatttatttttgccatggcttcttaattattagatatattttttgtattctttctatatggattttgaggtggatgtcactgctacctagcatatgcgcctttcccagttgaaagacagacactatagttatatgccaaacaaagatatgttttcatgaaaaatataattatataataaaaaagaatgtcttttttattttgtccatttgtttatataatatactgatttgtttaaatttgccatgtcacattccactttctatatcctctctacactataa

SEQ ID NO: 66113 - DNA, 2511 bp, Cannabis sativa
gaaattcgcctttaatttttacactatcttttaaaatctaattacgtttacttaaattttatttatactttaaatttttttaaaaatgccttattttatataaaatttataattttaattatattaaatttttttaatatttttattttaattcatattcttaaaaaatatacttattaaataaaaataaattaaattttaaatattatgacaaaataattaaaataaaaaatatacataaattaaaaaagaattatgaaaattaaatcaaaataaatattgaaattaatataaaataatatgagaaaaaaatttaaaaaaattttaagagtaatttttaaattataataggatatatttattattttatggggtacaaataaaactattattttttaattattttaccaattttgatttgccctaactttcttataaatctacatatttatctccaaaaaatgcaatctattatatttaaaactatatcttaattatgtaaagatgtgagaataatttaagtacaatactcataaatagagatatatttaaattaaattttatttaaatataaatttagttaatgtatataaaaaaaaatattcgtcgatattattattattattgttcaaaacatattgttcctataatattattattttacgctataagcttttaaaatttcaatattaattggtcgatattttgagattagggcttaggtaattccttaacttatataaatctcctaaaagaatgaccaattgaggtaaatcatcacaatggtcagaaactccaaaaaaaaaaaaaaatgcaatcaaatgtatactatatcttctcctaaaaacatattgatgttataaaatgtataaaatgagaaaagaactattataaatttcctatttaaagaaaaaaaaaattaatacaagacactaataaaatcaagagtaatttatagtataaatatttaagttaaattcttagttataaatacttaaatttaattttttacggtaataatacttaaattatatttttagaattctataggtacatgaccgttaaattatccacgtatcattttttattggtatatttaaattaactttttttaaaaaataaaaatttaatgactttgaacaatcaggaattgtcacgtgacgatttacttaacacttaacagctaagtacttataaaagttcgagaattataatttaggtattattaccgccaaaaattaaacttaagtatttatttacaattaagaattaaacttaattatttatgacacaaattattttaaaaccaaacacccaaaagtaataagctacgcatcctttagggccttaggttagttataaagtaaatttcaattaatagaggaaaataaaacaaccaattattctactctagcaataaatagtaatagtatcatagggatgcacacgggacgagaaattatagggagtattctctgtttctatccctgttaagaattttaatctctatttctatctcatctcgtttatttcttgatggaataggacagagaatctcctaatgagattaaaaatcccctaatataaaaatatttttttaaaaaaattaaatgtataaaaaacattaaattatataaaaattaatatatcacatcttatttattattaaatatattaattattatacaaaatataacttaaaaaattataaaaataagactaatatatcaaaaaaaaaaatacaaacacatattttaaatattaataaaaagataactaatatattaagcgggtccctgtcgaaacggggagtgtcattcctgtacctgtctcgtttaacatttagggacaaaaaatgatctttgccccagccccattctctatttagacaaaaaatttccatcccattaaggacgagtcttgacggaggcccatctcatgaaaaaaaaaattatgcatatctaattgcgtggcttatattttccattaaacatcatatcaatttgttggcttttgaattttagtctcaaatatttaaatatcccatattaaaattataatttatttgaagtatataggaagaatttttttttttttaatatttaatatgtaatagaagattctataatggttaggctgaaattctatgtcacaatttctacatctttatatttttggaagatcatatatataatgcttttatatatatagtattacaatcaatttcttagtttaatgtttctttgtcctcaaaaatacatagtagagtattttttttatattttttttttatgatggcttttgtacgtacgtagttatgatttttttttaatgataattttttaaaaaataacataatatttaaaacatattcaaatttgcataaaattattaatgtgacaattgtgagatgaaagagatctcaattcaatgccacaacacaacttacctactcaactctctcaaaggcttgctctaattaagcacgtgactatttctcattgtgaccaa

SEQ ID NO: 66114 - DNA, 1351 bp, Cannabis sativa
acatttatgaaaaaagcccattttgaaatcaaaaaaaaaaaaaaaacaacaatacaactgaatataccttatctttattatttatatctgatttggattgattaggagctcttgatcttttcgttatttcaagtcagttgttgccaattgtgaaccctgtttttttcattagttttatttgtatcaaaatttttttgtaactattataaaacgaatatgtaactattttcataaaactcaccttgtagaagtgatttttctttttcaccgtcaaacgaaaattcctacaaaatagataatctattatgaaatgataatgcaactataaggcaacaaaaaaaaaataaacacactcatacataactagttgtagattgattcgaatttgctattcatattgtgtttataaataaatatattccacattggaaatcaaaaatcaaccaaaatgcaactgtatataacttagatctattattcatgaccttttttttttaatttttcacatcatacctggttttggattcggtggggagctcaagatctgtttgttacagatttacatttcatgaatctggatttcgatattagggggagttgttttgatcgaataaaaccgaaaacaaatgtgtaaattcagtttcttcacagtttttctagtctatttttcgtcactttccgtttagatcattgcatatcttattttccagtggattcggcggaattaatagtggtcttcccctcaattttagtttcatttcgattgtgttactgctttgaatgatcgatgactgttgttcttcatcgttttattccgtgcggctgaaggtttagaggagatggtatttttgtaaatatttatttgccggctgtataattgtttaatggaccggcccataatatatttgtaattttttcttttttttttttttgtattttcctatttttttcctaaaaaataaaaaaaaatgtaaattagagaaaataaaacataagattaagagaatgccacatcaattaatatataaatattttaaatttgagtattaattttaataaatattggaattgaaaatttgtaagtgtaattatagaaagggaggttatgattaccatgactacaaaatgtataaagtttttttttttttacaaaattatttatttaaagaaattaaaattttatttaatagaaatttagctatctattcgtatcaaataaaaataaatattattttaaattaatattttttgtttatataaatgcacatacatatagaaacatttaattgtaaaattattattttttttatttctttattttttataaatacaattttctatctttattaaa

SEQ ID NO: 66115 - DNA, 663 bp, Cannabis sativa
  modified_base (591)..(598): a, c, t, g, unknown or other
gagtacatagttaaagaagatattcatctatttgaagtagaataaatacaatcacatatggcaacctcaggttatgtatagcgaggcagtcatcttgctattttaactaataaaatttaacgaagtgaaccatcgaaatcaagatgaacaaagaagataactctgattaagggagatacaattatccaaatcagcattaaccatcgaaaaagataagaacaaaaagcagttaagcagttatcaagtattatcctacacacaattaaatgaaacgtaggaattgtccacgtttcatgaacagttacattttaaattaaacccaaataaataactgtcaatttatattcgtataaataaggacagattccacagaaaaatggacgaagagtttgagagaaaaaagattatcaattgtatattgtatcatgtatccagaaaatatcataataagataaactcgtggagtatgcagatttaactataaaacttcgtaaaaatatctggagttatttaatcgtatattattatttctgtgatatatttattacgtaaagattcattatttttagttaggggtgaaaatcggtcggnnnnnnnnggtttttaaaattttataaccgaccggtcggttacggtttttattttacgaaaaccgtaaccgac

SEQ ID NO: 66116 - DNA, 1636 bp, Cannabis sativa
ttttggtttttgtcttggcaaaacggagtcgttttgactctgctgacttgagaaagtcagggaaagttaaaggtcaaaattgaccttggataaaactgattatttaatgttggtgtagggcggtttgggaaatagctaaaattcctacatttaggtcatgttttggtttgctataatcgtaatattgtttggtttcactttaaaaacattgtaatatctttacaatgtaatcaacattacactatctatatgattaataattagagttaaacgcctatgtaattactgttatttatatatacaaataaaattgtccatacacgcttattttataaggtcatgatatttattctttctttctactattctttcccagcaaaggccaaagcctcgctaatggatttagctatcccgctaaaagatgaggtgttgattgagaatgagggatctgctgttaggtgtgcctgatgtttttttgacccttgtggaggagggctacctcctccacaggagccatgagagatgttgtttggaaatgtcgggaatctgattacttgtcttgtttgtttacgtcagttaaggctgttgagtctcctgtttcgtctcctcctccaaaagattgggtcaaaatgaactgcgacgttaaagttggttgcgattccaagtgcatagtgactttggtgagggatcactgagagtctattttgtgggtggctacaaacattcttgacttctttgacccgttcattagagaagcaacgacgtgtttgttagccatggagatagttgtcttgttgaatcttcattttgtgatgattgagaacgactctaagacaattatcaagacaataaaggaaacctgttccaattaggatatttgtaactatattcatcattgtaaacaattctcatattgtttggttagttgtaatttttttttttgtttcgagattatgtaattttgccgcttataatgtggttaggttagctttcaccaaaaaagttattgatatgatgaaccttgcttctatatcaagtaatatattatataatgatcatgaagtttaattttaattcttgttttaatctattagtttttcgctttaaaaattatactttcttctacaatacaacttgcaaaaatccaaaaaaatagatgccaaatcaagaaaaagaaggagaccacgtgatatattttgatgtagaaatcacaattaactattttataactattttactctagaaattgtagtactatgtaattgaaatttaagtgtaatttagattaaactacggtggcgtttgattaggagaaatgaaaatatatgaataagaatgaaaatataaatataaatagaaaggaattaaatttaaaatgtataaaaaatattaataaaaaaatcattaacttttttctcatgttacatcggaatgatctttctttgcatttaaaatggaatagtcattccaccaaaatggtgaaaagagcattctattagaatgacattctaatattttaaaatacaaccaaactcttgtggaataaaatttatttctttttcattaccttcaaccaaacgccacttaaatgagacttctacacaaaattatttttggctaaagtttaacattttta

SEQ ID NO: 66117 - DNA, 849 bp, Cannabis sativa
tcagtaccatgtcgtaaatatctattttttttttttgaaagaaatgtcgtaaatatctacttgcagtggagaactttatttatatatatacatatataatagggtaatttttctgatatattattcttttatttttctcatcttgcattggaatggtttttcatttattttcaaaatggaatagtcattttaccaaaatgatagaaaagtcattctattggaatgacattccaatactataaaatgcaaccaaactaaagaatggaataaaaattatttcctttctattctattccatttcatttcattacctccaaccaaataccacttaagtgttcggtataagaattttacttggtgggttttagttgaggcatcgagattaaaaggatctcaaaactcaagtattttaagatttttagattatcccaaaattaatttaaatacgagacccttacaaacataaattctcaactaaactcataccaaacataggcttggttttcatttccattcccaagaacctaaacctgagaatagtagtctttaaagctatcttacaactttacaagaatcattctaagatagggagcttcctaaattagttttctaccaatagtccctaaagctttcttgaaatatcttccattgccagcttgccactcaaaaatcaaattgctttttgaacaattcttttgtgaagatttctactacttgttttccataggaacataaatcataccaaccagtccatcttttatcttctccttgataaaatgcttatccacttcttccacatgtttcttacagtcatgaagaagtcgtttgtgagcaatcgagatggtagcc

SEQ ID NO: 66118 - DNA, 852 bp, Cannabis sativa
  modified_base (656)..(660): a, c, t, g, unknown or other
agcaatcatgctttcaatttcatggtttatgcctttagagatccggaaacaactcatgacataacaaggcaaagcttgaaccacggctttgattaagatctcttttcccacttgagagaatagccccattttccaaccttggagcttagcttccacccgatcgcggatcttgccaaaaatctcctttttattttttcccacaaatgtaggcatgcccaaatactttgtgtgagttttcacaagatgaactccaaggaagacagccaaggattcagccgaatcttcattaattttccttcccacacaaagatctgatttttctaaatttatattctgacccgagagagaggcatagcaatctaacacctcttttagagctttactttcttcgaggttggcattcaagaagacaaggctatcgtccgcaaaaagaaggtgagatagattaagttaagctttattatgttctgaaggcttaacttaataggtttttttttaagaagtcctgaaatgggttttagatgtttatttaaaattatatcactttttccttataaaaaaaattatcattatttataaaatatgaaaaaaaatatttaataataaaaacataaatattaattattaagagaataaagattttattaaaataatannnnnaataataaataaataaaataattttaggagcgacaaaagtcgtctctaaaaattgaaaaaacactcctaataacaattatttttacaaaatatttttatataattattttacataaaatatatattgtctaattattaggggtgataagttgcccctaaaaacatttaacattgcccttattaaatttttaa

SEQ ID NO: 66119 - DNA, 771 bp, Cannabis sativa
  modified_base (710)..(725): a, c, t, g, unknown or other
caccatagctctcctgcaccaccaccatcatcactgtcgcaaacaacaacattccatagctaaacttgttcatcatcatcctgatttaattaatttctgagatttaaatatatatattgttatatttgattgtgaatgtcttcgttttcttttcttttctatttatagcataatttagtaaataattgaaataaaataatatgaaggatatgatgtaacatgtaccggccagccaactactacagcaacattaattattggttattggatcactacaaatatgtatagatttcatagataatatttaaaaaaaaaagaaaaaaaaaaagaggagcagcattagttttatagataatagatttcatagcatgtaaaaataactatattaatattaaaacgtactgatcagaagttataaaatcaatgtaacaattttacaaagataagaataactttgtgcttgcaaaagtttgatattgcgctggtaaaatgaattttacttctgatgtgttggcaaaaggaattgataaatcaacgttggtattagaatttttgccagcacaaaacgaaaaaagtgctggcaaaaatgagttttcatagcgcgtaaaagttagattttagccactataaatgtgcactggtaaaactttggcttttttgccagtgtaatttgcaaaatgcgatggtaaaagttacttttaccagcgcannnnnnnnnnnnnnnngtaaaagtgacatttcttgtattatgatttataaattgcatgtcga

SEQ ID NO: 66120 - DNA, 1123 bp, Cannabis sativa
ttctaatcccccatcatctcttctcctctaggaccctcctatacatatatatatatagtccaatgttacctgcaacacgtatatttaattatatatttaagattttttaaatattttaatttttcaaaataagaataaaaatattatatataatttaattaaataaacaatatcattttagtaaaaaaaaatatttattttaaaattctataaaagttacttttattataactagcgcatttcgtaaactgtgttggtaaaaggtcaaagttttactagctaccgctcattttgagtggctaaaatttaatttttacaagtgcatttacgcgctggaaaaagtcatttttgccaacgcttttcattttgtgctggcaaaatttctaataccaacgttgatttgccaaccctttttgccaatatatcagaagtaaattctattttactagtgcaataccaaacttttgccaacacaaaaatgtgctggcaaaagtgacatttcttgtagtgagtatatgttatagtgtgaatttttcacctagaaactcgagaccaagctcccataaggacgacacatggactcactttccttgaggattgctgagctgctgtcagaaggagatcgctcgaggataaatctcgcctgaaccaaactcagcgagatgatgtgaccctcaagtctagtcgcattattacgcctcgagtgacgcaagaccaaaaaggaaatgttctggttttgcatatacccagatatatgtgatgtctatgcatgaagacttctcctgcgacttagtaaagaccgtttctttacatatatagcgagttagtccaaaagacttaatatgctcgatgatccgataaggactcgcacaacctagatcatcaacactgacaagatatccacatatatgactcgattaggacgcaaatacctaagtacgagactcgttagtctcgtattaaaaagatctcgcaccctaagcctgggagcttgtgcgagcaatttaacagataacttgcactatgaaagtcgcatatgttgttgtatttagtaaaacggatttaaactgttctttatttattttatttacgtttttcataatttaatgttaatattcaatgt

SEQ ID NO: 66121 - DNA, 2063 bp, Cannabis sativa
taaaataatttccaacacttaacattttgtcggttcgattcagccaggcattgtcaaagagtgggacacatctagtggaatcatgggcgtctttacttcacctctttgagatttgttctcgatttgaattgaaatttccatcgctcctcctagaacgtggaatttcagttgtattggttctttgtgatccctaaggttctttttcagggcgatgagtagtctcctcaaggtggttttctcaatttcgaggggtgttatccgccatggatttgggtgtataattatatacaaaaggagggatttttttttgagtttttttatcactaaggctctcaatgaaagcaccaaactgttaacacagatttttattaactaaatatataagcccttttatgtaataaatttactacataatttaatagtaataataaatgaacacctgatattttacgtagttttatagttaaaatttacatactccacgagtctgttagggatattgatacagagtacaattttcaataaatgtacaatatagtttttctctgaattctgcccctatttataggtgtatagatgatcagttatttttattaggatctattcatttacaactacacatgaaacatggacattcctcacgtttcatttttatgctcatggaataatatttaataactacccaaccactttttgtctttatccttaaacggttatgttgactaagaaggttgtttctagctaaatgtgagttatatttcttcactgtctttataggaaaaaatgataagtatatgcttcctctcgtaatgttcttcgtattgtgatgatattagcgaggtggttattctatcttgtaaagggcaagataaatgaatgtagttatcttttccatgcgtaagtatgtgggtcaataaattgtaaactcgttgatgtcttgtcttgtacgctcttattatgtactctatttatcctgaggtggacatattgtcccgttaattacatccgttaatagttattattgttatctcgtgtattcttatgttgcagcgagtttgaatatttctatcaattataattaattgaaacgagttatttaactcgcatttaataatgcaatttaattattataatttttgagcaaattcatattccttttatagtacacaccttagtttctggttgataatcaaatttcgagtataacaacatgtgcattgagttcaaatttgaataaaaaaacattttatagacacatttaatataaaatataaaaaattaaaaaatatcgtgactttaaatttgaattgtaatatatttttttctttaaaaaaaacaatgcatatagccaaatttagtatgacataaaccattaaaacaataatttattggatacatattttcatataattgaaaaatatattagtgacaataactatcactaattatttttttttccttgtacatgtatcttatttttctagtaaagccaagttcattagaaattaaatcttactaatagacattccaataacttctcaaatacaaagagtttatttaaaatataaaatgttcatatctaaatcttttttgtagctcccctcatacatatgaacgatgatccaatcttctttcgagtattttattcgctgtacatatttaaataaaataaaatagaaaatgagttaataataataacatattatgcataaagatatatattgtataatttaatattgtacacatgcatttgcaataacttatagtaatacatatattagtatattgtataataaaagtttgcgtttgaaatctaattactcgaaaaataatatgttagaaaaatattattaggttcatactttgttaattatttgtaataaaatgacattttgaacaacattaaataatttgattcgagtaaaattattttgtttgaagtgcaaatacaacaacgataataataataaataatacttaccattttacctcatccttgagctcgtaaatcgtaataatatttaattaggctgactgacattttgatagtttttttttttttt

SEQ ID NO: 66122 - DNA, 613 bp, Cannabis sativa
tggctgccactgctcagccccgtcaccttgcatcaaaccaaggacacgggtaaattgtagtagagctatgagcagcaagccattgattaaggtaagtttttgccgaataaactatactttccgcactagataatttgttgttccaaaccttctcattccttgcgttccaaagtgaccaacaaagagcaaccaagagtttcttctgatctgaatcaagcaccagaaaaactgataaacaccagtccagaaacgctgcattatcttgcagcagagtgcctataccgactctattccagcagagtcgagcagatgggcattctacaagggcatggtaaatggtctcctcctgcatattgcacataggacagatcgttgacacattaacccttttagttcgcaactgaactatcgttggaagacacccttgacaagcacgccacaccagatttttcattgcatattgcattgttttaatttattgtattattagataaaaaaaatccaataatatataaacaagtttctggattatataaattattattaaactttcaaaactggaaaaaaaaaatatatacaacaattcgagcaaccataattaatttttacaaca

SEQ ID NO: 66123 - DNA, 1326 bp, Cannabis sativa
  modified_base (1260)..(1292): a, c, t, g, unknown or other
caataaacttgttgattagcaacagattgcacaattagtatttaaatcacgataacacgcctaatctagtagggtgttacaacactcatttgtggtggccttttgctctgtgatactcacattccttattctagtaatgctattccttcctccgtgcaacatacgctgaggctttctatagtggaccatattgcaggtcgctctgtacacattttctcatgtgtcaaccaaactggtatactgtgtgtatttggggtcgtattccttcctcgacttctttgaagaatcagtacggctattgcctttacctcctctttttttcgagtaaggctcacattagattctatagcgtctatttttgcctattcgggagccacactgcacccgatctgtgccgcccggtacccaaaaaaatgggtctgtgtaggtgcgagaccagagacagtgggtccgtaaacagttagagaaaactaatttctgagaagagtcaaagttggagccacaacttgagggataaagctggtgcattttcagaaggggcttgagcctgagggactccaaaggattgtatataagcgtcctcatggttaataatgccttgggcctttgacataaacttagtcaatgtctcagctctctttgtttgtatctttccccatagcaaagaactaatagtcaatccagactgaagggccatcaactttatgtcatcaccaactttaatttgggctgtagcctccatcttcctctaaataaaagcctttaggctttcattttgttgctgtttgatgttcgtgagaaagccaacctccatgtccagagcacgtgcaacaatgaactgtttgcggaaggctcactgtaaatgtttcaagctatgaatcgatctaacagccagacgcttccaccagtcttctgcgaacttggtcaatgttagggagaaacacaagcacttgacattttcactcacacgtgccacttgtatcatcttgttatatttttccaagtgtattgcgaatctatccttcccttatacaagtcaatatgtggcatcttaaagttttctggaagcagggattctatgatcctcctcacgcaaggtctaggtcctcatcctgagaatctgaaagggctctgctctactttttgattagtttagatagagttgcgatatactcttctaagcttttttgtgtcgcttttgggaagatcacgtcttcgtattttgtcagttatgtagtttatgttgggttttgtgccctnnnnnnnnnnnnnnnnnnnnnnnnnnnnnnnnntaattaataaagatcaaaaataacattttatgtt

SEQ ID NO: 66124 - DNA, 1006 bp, Cannabis sativa
  modified_base (313)..(324): a, c, t, g, unknown or other
  modified_base (924)..(927): a, c, t, g, unknown or other
tgcaagttagcaatcatcccaaagaaaagttgtggccaccatcaaacaaagaaatatctacgttgatcttgatactattagtttttggcaaaatccactgctcggccccatcatccgcctgaaaatcagaccatgataaatctatctcagagttttaagtatacctccattgattaagatacatttttgcatatgcaacaatgtttttagcctgaaacaccttcccttttacactagttcattacatgcacctcatatggcttaatatacagtaaccaccacacatttctgttggaagttattttatcaggannnnnnnnnnnnaacatgtatgtttgattataaattataatctaacatcctaaatatgaattccctaaaataataaaataaacacataaaagtttatagaaaaccttacattggttgcagcaaaataatacgacttcttccgttcagatctctaacccttgatcctttctgtcacaaagtatgatcaagatctgaacctgaattctccttcagttgacagtatgaactacacaatcttcctcactatgctaggtattactttgacatgcgtggacatattctcaatcactataggcttcaaaattattgagaagaagaagaaggaattcaaaaatacaagaggctctctttattttctattagggttaggtttagagttaaaatggaattaaaaagataaataaatggcttttttaatcctccttggtcgaaatcttattggacctagtggatttcaattttgccattttattacaatttatctttcttttcacaaatgtcatcttttaattctaactctatatatatatgtcaattctatatatttaataattataattaattatcaaataaaattgtcatttaagttatttattaattagaccttacaannnntcttaattaataaacaaactctaatatctcttttttctctcaaataagcccttgctaagtgaaaactcataaataagac

SEQ ID NO: 66125 - DNA, 838 bp, Cannabis sativa
agacagaaggatggcctccatccaaagtctggccttcgactccgaaggctggcctccatcaaagaaggttggcctccatcacagaaggttggcctccatctccggaatctggtctccatcacaaaagtttggcctccatctccaaaggttggcctccatctttggccagacgtataggtaggtaccaccaattctgcccaaacctcaagtggcagaacacttagaggacgtcattaacggaccccatattataggtgagaccaacaaagccaaagattgctatgctcagacactccgtcacgagcccaaaaatgacttcttagtaggcaaagaatgaggctctaagcaaccaatgcttggagagcccatgatctctttcttaaaaaagaagatcctatccaagacagtttctcgcacaatgatcccattgtcattaccgaacaaatcaggattataactgctacaagatacatggtggacaatggatcctcccttaacattcttttcaaaatcaacacatgaaaagatgaggctctaactcgctgacttggtgccctgcaatcaagtgatgtatggcctctctggccaaagcctcacactcattgagtatatcaaattacccctaagtgttagagaaattccaaccactagagctctgatggtgcagttcttcataatcaacgttccctcggcttccaacgtcatgatgggctgaccgaccctatgcaacttgaaggcagtagtacccatctaccatctttgcctgaatttcccaacaagacatgaggtggatgtcaagaggagatcaacaatctgctcatcacaacttggccttgtc

SEQ ID NO: 66126 - DNA, 1781 bp, Cannabis sativa
taaaataatttccaacatgaacttggtcattgacggtgcataaaccaaaagtacctaaaataagatacgaagaatttaagaaaaacaggttagcaagaagtagaaaaagaaaccaaagtagaattcaatctaattaatgtaatatcaatttaaataattctccagtaatgacgccaaaaacttattacgaaaaattgtaaaactacgaaagtgcacgtatcaagcagtactcacacaggtgaggtcgaagcacaagaaataaaaattgatgacagactttaaaaataacataaactattttcatatcattaaggtcataaactacatattatctattacatctttgagatagaataacatataatatgcattgagtaatgatctaaaaggtcacacaagttatgtgaatactctcatttcacatcaaaacctatatttattcaattagagcattcctaatattcactttctaaatttcatattaggatcttaaatcatgttgaaggtggtcaatctaaaacatgtattaaaataaatatgaacaaatcacccagatccagaaagaataaatagaaaatcacattaacaaattgaagtaacatcaatgaacattcatcatatccctaaactgaaaaattaattcataacttcaataattaaatctatgtttaaactaaaaacagaaatcaacatgagaaatcaaaggaaaagaaagaaactaggtggagaactcgatcaaattgccacgctcgctccaagaatcttcttcttttgtttttagggttctatttgtgaatgaatgatctaaaaatttgaaaccctctaataacaattagttttaaaactcaaaataacgaaattctaaaactacccctaatcccatacagagcacctcgctgcgaccacaaatagcctagtcacgacaattgtgttaagtcaaaaattattatttctgtgaatgatctcgtcgcaatgacaattagttgcaaccgattgcagcctcgccatgagtagcttcaagaatttttactatattttcttcgatttctaactcgtcttgtccttttgatatttaacagattttgcccttgaaaatctcgtgaaacctataactgagaaaaacaagcgtaaaaccgtctagaaagtaacaacaaagaaaaaaaacaactctaaaaagtgatccaaaagttaggctaaaaatatcctaacatttaattttaacaatacaattaaagtttaaagcatcagtaaaatttaatttcaaattaaaattttgaaccacaactactaaagacttatcaactctctttccccattttacacttttttcttcacatatttgattaaaagtattcaagtaatactaaataaatgcacagaagtactaaagtttattttttggggaaaatttacagtataattctaaaaagtttgttttgatccagattagtcccccacctcgagaaatagcggcaatagtccttaaggttacatttttgtaggtttgttagtcctaaatttaacagatctgttaagttatttataagtgtcaagtgttgaactattattgttctaaataataattaaaaaataaaaatacattataaaatatatttttttttctttttttctcctttgtcttctacctctagccagccacactcgaccccaaatcttcttcacttcttttttctttttctaatcctcgtatggccatggaacaagtgtagaaagacatcaaatctcgaagcccaaacctaacttctctctctctctctctc

SEQ ID NO: 66127 - DNA, 1266 bp, Cannabis sativa
ttgtatatataatttttttaatttttttataaatatgtgtggattggattggattggttacttttacatgtcaatcaacatcaaaattcgcacaagtgcggatgttgaatatttcccaatccaatctaatccgcataagtgcagacatctgcactttgcgtattggatagtgtggattgaattaaattggctaatttgtgaacaccactaattcatagactcacatctactagttgccctagcaccaccaaaataatgacctcaaaaataagtatttgcccacttacctctggacttgtactgctctttaatccacttgttattagccaagtcatatttatccaccatctctaccaaattttgctcctattcttcaatcatgcaatacctattttataatacaaaaaacatttaaatgaactcaaaacaaaaataagaaaataaaataaaataatcaattcaaatcatacctgaaaataaatttcttcaaatctgtattaaatcttattttgtgtatgtagtgcattgcatttttcaatatgtgccatgagcaaatttgatggacaacatcgggcatgacatttgatagttctttgtccatcgatttacaattgtcagtcaatacaattaaaggtatcttaccatccatacactcaaaaaatatttccaaaacccaagtgtatgtttctcaattctgtttctctagtagtgcaacaccaaaaatacatattttatcattattgtttgatccaaaaagtattactaatggcttttcatatctataaagaaaataaaatacattattataaaaactaaaagtgaaaattattgtaattattatactttttatgtgcatcaattataacatttctcgttaagtatttctatttctatataaaattatgcactatttaaatgtatttaatatataaaaaattaaaatttgatttttaatagcatatgtgtataataaatttgatatttaaggtagtatatgggtagcaaatgatgcatggcattcgtaaaaattaatatttggaaaactaatgataataaatatagaatttaaaagaatatcacacgcctacattgtatatattaatttactatagtgataaaaacttacttattagttttgtaagtaaaaattaatagataaacaatcactaaatgatttttaatcaattcggcaagaattgtcaaaccaaaataaatttattagcctgttttcatcgtctacttcatacttgtagaagaaatttggat

SEQ ID NO: 66128 - DNA, 904 bp, Cannabis sativa
  modified_base (26)..(31): a, c, t, g, unknown or other
atccacgtaaattgatccctgagttnnnnnnattgagctgatgactcatgatgcaaaagctgaattcactaagtgttgattaccctgcatggatcgctgaatatcttactcaggatgtgccagcgaggcatcgtgctcggtctatcttcccgagcaaatgctccaagtggactccacgtgtcaccattatcgtgatgccacgttagagtgcaaaatttgggataacgtttgcgcccaagtctgtacgggacctctgaggttgcgtgtagacttcttccgagctggttctgcctttggatggggacacgtggcgagcgtgaccgtttgagactcgatgtgaagctgactgggcatctcttcggttctcggctaataaatgtcgtgacaattaatagttcgaaattcgattttctctctccacggctgacggttgcactcaattacttttgatttcccatattcatttttgaggcgggaagctgaggcgtctgaggtttctttgagacaattacctctttgcctataaatacccacagcattggcacataaattcattttatcacccttctttgctaagagagctccagagcgaaaagaaaattttctggctttaaagttgccgaagtgccttcatacaactgctggcgggattaacgttgctcgaacccagacactcgaatcttgagtaagtttttgatttcctttatgcttatctttgcatgtttacattttgaatgcaactttcactgcgctgtacaaaaatgctcaagaaaccctagggttagaaacatctgcgattcctctttttcatatcttcatgtgggtttacagccataaagcttgtctctgaactgcattgcgtccgcctttcatctttcttattctaagctgcatgaactttttt

SEQ ID NO: 66129 - DNA, 1249 bp, Cannabis sativa
ttgggagtaatttctgacagacctcgttctactcatagattgtgtcctactaaacagacctcatcttgctcatggactttgtccttgagtgactcgtggatttactggttcccatgctttctcgatcattagctcgtcgagtactttctcctcttcgagttgatcgactgtgggtccttgacctccttgaggtcgcacttgcttcttcgcgctctgttctttccccctgagtgtggtttgtcatatttcccccattagtgtctgtacgagccctctctctatgggttcaggaagaatgctggtgatttctcgcaggtgacctacgctctctaggctgagtcccatcctcctcattttcatgaggaatttctcgttcatcattatctggttacctcccattctgatttctgtgagatggttcttgctgatcattttgatttttagggggtatctcattttccttgggttgttcttctcgagaattttcctatctcttggttcgtgagccacgaggcctgcctcgtggtcttctcactccaagttcaggttgattttgagtgttagtcccttgtgctgccctagtcgcggctgtgtcactctctagttcagcgttctaccgctgtgcctcttccagacggcgtctaaggcgacaattttctgtttcataagtatcttctcccataggctgagtacgtccataattgggctcttcatttctcattccaaggttttggccattcccacgctgagttctcctcgagcgtgttgttcgcgtactaggaccaactacaggttggatccttcgagaacgtgtggttcgaatgctggggccaccctcaggttgagtcctcctagaacgagtggtccgtctagactatgggtttgtagaccttctggaacccatgggttctttccgagaatgatggatgagtttcctcatgtggtgtgttaacattttctaggttttcagccatgaaggagattatttttcttcaaaagaaaggagggttttttttttgagctttttcacaaaggctctcaatgaaagcaccaaattgttaatgcagattttcgttaaccaaaatttgagcctcacagtgataatttcacacagaaaaatttaatggagtaaagaaagaggtatgaacacaaaggattttttacatggttttgcagtaaaaattctacataatccacgagtcaatcttattagatttctgatagattttcagggcttgttttgtatgat

SEQ ID NO: 66130 - DNA, 664 bp, Cannabis sativa
ttcatttgtcccaaccatcttttacacaataaaaaaaaatataaaaaatatgaaataaccaatgaaattatgtttgatcatctaaatatataagtgtagtagttttatagttgttgaagtgttgtttcttagttttcatttgtaatgtccctacatatttttctgttatgttctttttgtccacaattggtgcacttgtattgtttttttatttctcaagtcacagtcagccttattttccttggccttctagatttgactctttctataggaggcagcactacgatgtcttggaaaatttttggtagatcccattctcgttggttcccgactgggtcaattatttcttgatatgttgtacccatgattttgttgtgtagttgtgtgcacaatattagtatgtgtctatgttcatgtctttcatcacaacccacatggaatttcatcattttgaaatctattgcatgcgaatgttcggtcctgcaagtttacaatgtgtgttctgtcttcatctagcacctcaaataagtttttatttgttggcttcacttgtacatattttgatacgttttgtataggcatatcattttttgtgcagaattatataaagcaacttacgaatatcgaaaaagctttataaaaaaaaacggctttagtataactg

SEQ ID NO: 66131 - DNA, 794 bp, Cannabis sativa
ttatttaaccctagaaggtaattcacttaaaagttctaaatgtctactagaaggaacaaggacaaaaacccaattctaactcctgaaaagatcaagcaggagcttgattgtggcgaaattacgccttaaatgcaaaaagttctagacaacatgaaacgttttgaaaatgaacgggttttgaacgagtggaggtacctacaacttgaaaaacaatttcacaaaacaaatgtatggccggctccaccaccagggtttctcgaagggtgcctcgttgcaaattaggttattttaatggtaaaccggtgaagactggatctttatgcaagtattgcaagtctcacccaaaaggcaaagaattttaattttaatttctgtaatcgcaaaatatcgcaaatgtaatcgttaaatgtcgcaatatatcaacatttttccaaaataaaataaatgttccatccatctcgcattttacatcgctacatatggctaaatgtcgtgaaatatcaccattataaaaaatctaaaaaaaaataatttttcttgttcttgccatgtcgacaagatcattgatatatatcgtaaaaatgtcgttaaacatagacagagaattattattcttcttgttgccatgccgataatgtcatcgatatatatcgagagatgtcgttaaacaaccacatatagtgcttcgttactcttgctgtgggcacatgtcgatagtcatccatatatatcgaaaaatatcgaaaatttgagaaaaatgtcgttaaaacatacacagaactacaaaatagatt

SEQ ID NO: 66132 - DNA, 921 bp, Cannabis sativa
tgagatggtggacaccacaccaaaatggataactcccatagaaccctaccttaacactagtgaacttccaagaaacaggaatgaggctcgaaaaatgatgagaaaaattgctcgatatcaaatactggacagtgtgatgtacacaagaggcttctccatgtcattcctaagatgtgtcataaatgaagaagatgcatggctcttgtctaaagttcatgaaggaatctgtggattcatgttgggggaaagtttattcaagaaaatattgaggtagggttccttctggctgacaaatgattgaagattcaaaggcctatgtgaaaatatgtgacgagtgctagagctttcttaaaatctcctgagcaccacccaatgagttaatatagatgcaaagttggtggcctttttctatatggggaatagacctgatcacaaaatttcccatgaaaaaggtggcgtgcaatatgcagtcttgattgttgattatttcaccaaatggatggaagtcgaactattggaaactatcacttttatgaaagttttggattctatggtgaaaagtattatttgttaatacgaacttcctcaaaaaatattgtttcaaacaatagaaaataatttaacaaccaaaagttcgttgacttctgcgcgacacgtggaattataaagagcttctcagtagttgcacactcctaaacaaatagacaagtagaagcagtcaatgggacattgaaagaaaccatgaagaaatgagatgaagaggccaagggtaactaactgaaggaattacacgagataatttggtcatacaaaataactgagaggacaacaaccgggcaaagaccttttgccatggcctattactatgagtcgatgctgttcgttgagttagaacctccatcccacagaatattgacgtac

SEQ ID NO: 66133 - DNA, 877 bp, Cannabis sativa
ggattcggatccgtccgtgaatggagaagaggcatttcggatctggggaagaagatggtgaaggtccgatggttcgacttaggtgtctgattgtgtccgtccgatggtccgattgtatggtccgactaggggtccgatgcacactatcaatcgatccattggaccaatgcacctcaagaccttgccttgttcattcattgtttctaatgtttagtgttttttttttactattgtattatagttttcttttgtattcatacaaaaaaaatgtatcctttctaacaaacaaagaatgtattattctttgatttgtttctttctgccttcaaaaagatgtattctgtcatacaaagataaattgttgtaatactccctcaaatgaatgcatggattgttatttagacaaatgtgtattgagttctatatatatatatttaaaaacatgtttcttctctttatttcgatttcttttggtattcatcagtatgaagtggattcgtggaaaagtgatagggcaaggaggttctgccactgtctatagagcagtactcaaagatggtgatggttcgatgcacactattaatcggaccatcggaccaatgcatcggacccctagttggaccatcggaccatataatcggaccatcggacggacaccatcgaacccctaagtcggaccatcggaccttcaccatcttcttccccagatccgaaacgcctcttctccattcacagacggatccgaatcccattttcacttcgggtcgcctcagagtggtcgccagttgagcgttgacggtcggggttgagcgtcgacggtcctgggttcaccatggacagccgtgggttgagtgacgacgtctgctgcgggttgggg

SEQ ID NO: 66134 - DNA, 1013 bp, Cannabis sativa
tttatgattttatttatagaaaatactgtctttttatattgtattcttgttaatatgttgttgattttttattatctctgtgtgttattttcttgttgttttgatattatttggatgttattttcctgttatttttatgtaattttcttattgtttttatagaaaattgtaaaaatataaaaaaaaatctttaaacataaaaatatatatattttaaaaaatattactttatctaattatccctttactatatacataaaaaaacccataataaaattttcatagaatattaatagttctagtcttttttttttaaaaaaaaaaaaagaaacaaaacaaaaaaaggttttgttcagttttaataaaaaaaaataataatattacaaaaatactttcagctgaccaaataaataaatatatagcccaaataaaaaaaaattacacaaataccacttatacaaacctttaacccaggatccatgcttcttgggcaactatcgcgcaaccacgcagcaacccaatgcaaccgaaacaaaaattcaaccagaaagagaaccaccattaattttcgtgacttcacctgagaagacagccggaatcaattaaaacaggggttggttcgaattcatgaaaaaaaaagtgtagaaaaactactacgaaactaaaattctatcgaaaatctaatttaatttgcataaagctaatgtcccgacttcaattttcagatccatgaaaggcagatctcaaaaagttgaactggaattctcaaacaatccaactcaagtataatctaaaaaaaattacatcaatactatagtaaaatatttatcctggcgtatattcgttgttttctaaatttctaatggtgaatttattcatattaaatcataaagagacatgtagatagagttacgtacgtgaaaaatattattctgatttttaatatttcataacagttgcattacagctgcataaatattttgctagcagttatttcgtctgattgaaacatt

SEQ ID NO: 66135 - DNA, 786 bp, Cannabis sativa
gctatgcaattttactcttcaaataaaaatgatgccaatgaccgtgatcatgataacttcttcgagatatgagtttcaacatggaacttggaatatgtcttttaatctttagtttgaaactttagacttcaaatttatcatttctctattaattaggatattttagttttgcacctttcatgcctttagttatattttaagacttatagttaataatttcatgaattttatgaattttataatatatatcgtttttatgaatttttttattcttattgtcgagacttatgctcgcggtactatggcaaaacgcctcagaacccgttttcgcctttcaaaacgtttagatgaaatccaaataacattgcataaaaaactacttccgtttcagatacatgcttcaaggttcgagcataatttgaattttctaaaagactattttaaccatgaacaggcaactgcgtttgcaaatggaagcatggaatgtagtactgtgctaaagcacaaataaatatctagagttagacaaataaaatggcatacacacggatcacttatgtgagccttagagcaagtccaaggacacagcgaaatcttatatatgctgtgattttgttccaaggagactgcaattgtgccaccattttcaagttttgtctacaggcacggtagatcactgcatttctttttttatatataatttaattaatatttatatatagttatattattataattataaaattaagaattattttttgaaaatttttacaatacatattttta

SEQ ID NO: 66136 - DNA, 649 bp, Cannabis sativa
agtcacaatacttgtgactaaaattaaattagtgataacttgtaactaaatattatattttagtcacaagtaatattttgttttatgactaaaagtcacttttagtacaaaaaaaatgatactgtgactaaaaaattgtcactaaacatagcattttttttttcagtgagtacttatattttcattttatatgttagtgtcatttttaggttaagtgtgttgatctgaaaaaaaaaaacactaataaacctattaagcagaccaacataattttgatatgaaaaataaagtactttcactcaaaattatttattttgtacatttttaaaattatatggtcatgttgagtcacaaattatatcacccctaatataaacaagttgaaaagtttgtacctttgaaaggtacgagaccttttttgacaagttcatcgtattggagataccccatgaagctacaagcagaagctgtccatagcacaacctctggaatcccaaactcccgtgcagcttctatcccaaaagtcattatcccatcagtaacgatacaagtaacaggaggcacttcacaacaattgttgagcttatgtaaaagctttttaaatggacctaaacaattctttcttgttgagtcacataatgatggaata

SEQ ID NO: 66137 - DNA, 1876 bp, Cannabis sativa
atataaaatcaaatttcccgattttaaattttctaatccaatccaatctacataagtgcggatatctacatttttgcagattggattgggtattgtatgaacactcctagttaatactttttttgtgttttccatgactagatgatatttaatatatcctgtaaatttttgagaaattcaataaaaaaataataatgcgctaaaaacaagtatcaaataatttattgcacgcgtgcttttttcattttatacgtatgaaaaatagattgaacatgttttctatattataaattagtttgaatttcttaaaaaaattcaaaatgtcttaaataattatgttgtaagtgttatggtcagctggcatgaattcaaaaatggatttcataaagaaaaataagtctaggaatatgtagatgcacctgatgattatcatccaatcatatgtaaatgggtctacaggaagaaaaaaggtgttggaagagaagtcgaaacgtttaaagctagacttgtagcaaagggttatacccaaagagaaggtgtagactatgaggatacttttagtttggttgccatgctcgaatccatcagaatacttctctccatagcagaaatttggcaaatggatgtcaaaacagctccttaatggaattcttgacaagacaatctatatggagcaaccagaaagctataaacttccaggacaagaagagaaagtttggaagataaataggtccatttatggacttaagcatgcttatcactcttagaacaaaaggtttgatgaaataatcaaaacctacggctttcaccaaaataaagatgaactgtgtgtttaacaactcaaggataatcaagtggtagtatttctggtcctttgtgttgatgacattttgatcattagtaacaatatcaagaaaatgactgacataaaggaatgactaaacactcaatttgaaatgaaagacttgggtgaagctaattatgttcttggaattcaaattattagaaactggaagaacaaatcactttctctctcgcaagtaacttacattgataaggtactagagtgtttctcaatgagcaacactaaatgggcagttatgccttctagacatggtgtgcgactatctaaggaacaatgtctaactgatccctaagaggtagaagatatgagaaaatttccttatgcttcagcagttggaagtctaatgtatgctatgctatgcactagaccaaacatttgctatgcagtgagaattgtgagcgggtatgagtcaaacccaggaaaggaacattggatagcagttaagcatattctagaatacttatgtgttcatctacaatggtggtgctttcaatctcgtatgctataccgactcagatttctaagcttgtcttgatgacaggatgtctacatatgggatggtacacactcttgggggtggagcagttgtttggagaagtgtcaagcaatctgcaatatctgactctaccatgaaagccgaatacatagttgtcgctgaggttgctaaggaactggtctggctaagaaagttcttcacagagcttggcgttgttctaggaatggaaaaatcactagtgttactttgggacaacaatagtgctctagccaatagtaaagagccttgaagctacaagaggagtaaacacattgagagaaaataccacatcatcagagaatatgtggtaagaggagacgtactggtaaaacaaaattgatactaaagacaacctagtcgactcattcaccaaaactttgacagagactgcatttaaaaagcagagagagaaatgatccaattggtcaactttaacgaacaagtcaaagaacacaaataatataattgaactagaa

SEQ ID NO: 66138 - DNA, 1015 bp, Cannabis sativa
  modified_base (721)..(735): a, c, t, g, unknown or other
  modified_base (989)..(990): a, c, t, g, unknown or other
atgagttttcttcgaacattatttttgtagatacatgatgattgtgtagtatgccatctcctccatttctactttttcctctggtttcttctcggccaaaaatttctcatctccaagaacctttgaaaccttctagtgcactaggattcctttcaaactttctctccacagcgcaaagtctcttgttccatcgaatttctccaatttgaatctcaccattgatgacatttaaagtttttttgagaattacagcaaaatgaatcttgattctgcgttcttggtcgattaccgagctattttgcgttcttgatcgattaccgagctattctgtgttattgatcgattaccgagctctgatttatgagaaaattataactaaaggtgcataatcaaatcaactaaactttaaacaatcaaataattaataatgacaaaatttacaaatcacgaacaagaattagagaaaatagggatgaacagagtaagggaaaaccagaaaacaaataaggtagaaaacaaagaaatcaacaccgagatatacaatagttcaagtctgatagatcgatgtgatctatggctctactccattttttggaacaccactaaattttctttattgattgagcaagaataggtacaatacagtcgagatcgattctctgatgagttctctcgaagtgttttaactttcacactctttgttgggttttataccctaaannnnnnnnnnnnnnntataatcagatttactaattactaaaagttaaaaaatcattttatgttgcatggttcacatgatttatctcatgattatatgttttaatgtctaaattctattaaatccagatcatatagttattcatgattatagtgttgtcaacacagtggaatatagtcatgattatatgttcaaaagtttaagtcccatgatttgttagtacaaaggatttagaccaacatgataattagtgataaggtatacttacacnntggataagtgttatgtcctttctag

SEQ ID NO: 66139 - DNA, 647 bp, Cannabis sativa
taaaactacaaaatcaagaatgcaaaacaaaatcgaacaagatccatatcaaaaacaataaccaataaaaaaataataaaatcagataaacggattaaaaaaaaaaactaacctttggaatcatatttatgtttgggacaatcacagatccccacgggtcttaacgacagcgaatcaggcagaggagaaggctagagttccaggaggcggtcagaggaggtagagagatgcaggtgcaacggtggctggtgttcagcgaggctgggtctggacggggaggaggagggtaggctatggggttgggtgtcaacgtggtggaggactaggctgggctatcgggcgacaatgattctcgaatggattcgggggtagttgcgtgagaaaacgagagagaaacagagataagaggatggttttttttatatattttccctttaaattttaatcgtgttatttttataaataaaatactaaaacccaacctgaacgcttttagcattgtattgataagaatatgtaaaagttcaattcaaaaaaaaagaatatgtaaaaggtggacaatttggttgattgcaaattttttaaaatttaatgttttcattaaaagtataaaaaaagaataacattattattaattttatcataaa

SEQ ID NO: 66140 - DNA, 904 bp, Cannabis sativa
cagcagtttccacgacagtcgcgggttgagtgttcatcaaaccagaaaaccagcttgcaaactcaactgtacaaagattatgagatgccaccctagtgagattccaacaagatcgagcaaatagacaattaactagcacatgggagatagattcctcagcaccattacaaaacacacaattgatgtccactggcacatgtttttatttgagctgagtctgtgtacggagctagccagataacgccttccacaagagctaatggggtagaagcagtagattgtttttgagtttgcaacaattgatacgcactcttaaccgagtaaaaaccagtgttctccaaagaccaatactagcagtcaacaccaatcgaagcactcagagggatgctaagaataaactcttgatctctctcagaaaacaagtcttttacaacctccacatcccattccctcctaccaatttgtataagactattaacaataaagctgtcaatcccaggaacctcagatgtgacaaaaggatgagtaccatatggaagccaagggtcacccataatacgcactaaagtacccacccatatactaatctgtgccccccagtgatcaaatccttagtctcatatatgctacgccaaatgaagctcgggttattacccaggttagcagacaagaaattgccatgagaaaaatatcgagctttatacactcgactgacaagagaagaatcgttcatcaacaacctccacccatgtttaccgagaagagcactaatataatcatgaaggtcccaaaacccgagactcttggaatatattttatcaagatctagatttactaacaagtatatttttaacatcctaaacatgaacttctaaaacgaaataaaataaacacataaaaggta

SEQ ID NO: 66141 - DNA, 1471 bp, Cannabis sativa
  modified_base (1363)..(1363): a, c, t, g, unknown or other
  modified_base (1441)..(1446): a, c, t, g, unknown or other
cttaggttttaggtctaacctaatgctcttttatatagtttagagcttacaaaagatctagatccaaaataggttaatatccctcaaaatggggcgatattactcttttatcatatatttattatacaaaaataactaatcaattgctcttaaagaataggtagatatttggggttgaatccctattgttcgtgggctattgaaattgttttgcagctgagaataagttatggttcggctaaggcgaaggctgtagaaacaccaatcattcgggcttttttctggctaccaatactggtgctggctagcatatgtcattcaatggccgacatatgatttaattaatgaagaattaactactataaatagaagtctaatttaagaaatcaagagataattttttactgctatttttgaaatacataggagaaaagaaaaattactttctctctcaaatagttctttctcatttgttgagaattaatcaagaacaaatcatacaatttatcctaatagctcacactattccctgtgtatggtggatcgatttagaaaactacggtgtaagtttctaataaaccaaaaggatacaacttacgagaagttttgaagataccctaatagtcatgaaagggtatatattcttttcttgtaatttatgtattgatttaatctatacacttctagaaatctattgggactatggtacaatgataattagatataccaaatcttcctcttcgtacataattttgtattataaaaccaacaattggtatcaagagcagtttcatgaatgtacatacattaaatgatgtgtgggatttatgcatttataaatatcggtgatatgtatgtaaatagatggttatattatcgtgaatgtatgagaggtgatgaattgttaattaaatggtataattgagtgtagcttttgttattattttttctagattataatgtaacccatttcgggaaatatgaaattggcatgtaattttaattttatgaaaattaatttatatatgaaatttataaacctatgtaatgctcaagagaatttgagcttggtttcaatattaaaactcgaccatgaacaacaaaattacatgcatacgacctcaggaatttttccctacccatgcacaaccactcgagtggcttcgcgttttgtgccctcacactcgtgcatgcatgcatgcatccataatgaatgtatgacgtcctacccatgcgactaggagaaaggatggttgtccctgtggtggtcgtgttgaagatggaacccgaatgggtttatggttcttactgccatcgtgagccacagatcggacaatccatttattgggttttgtgccctaantaaaacccattttaatataatcatatttattaattaataaagattaaaaattagatttatgttgcatggttcacatgnnnnnnttcatgattatgtttaatgtataaa

SEQ ID NO: 66142 - DNA, 838 bp, Cannabis sativa
cgctctggtctggtgggacatggtgtccatgactgatgacatgacaactataacctgggaaaagttccaggaacttttcaatgctaagtattacaacgaagcagtcagaagtgctaacagaaaagaattcacccaactgattcacgaaaaaaaacatgagtgttactgaatacacgatccaatttgatcgtttggcaaggttggcctcgagaattgtgccaacagatttcagcaagaaagagaagtatctggatgggttaaatgcgaagatcagacacgaccttatgatcactactgatgatagtaccacctatgctgaaatggcagataaggcattgcgggctgagggcgcagtggagtgcactttagagtcttgtgggactccggttgttggcagggctcctacccctcctgcatcaggcattagcaggggaggtagtggctcggtcattcatcagaaaagaaaggcatctactgctaccactggctcgggttagaacaagaggttccatgggaactagggtagaggcaatcgccagagttgcgtcgaaacccaatacacttacctagagtaccccagttgtaaaaagcaccatccaagggagtgtaaagggcaggggtgctttcagtgtggtaggccagggcattacaaaagggattgtccccaactcaggactgaagcacgtaagactgcagcaaaatccactccggcaagggtgttcgagataacttaggctgatgcagaagccagcccctctatggtaacaggttagctctcggtcaacaactcttatttctctgtgttgtttgactttagggccactcattcctatgtggc

SEQ ID NO: 66143 - DNA, 1353 bp, Cannabis sativa
  modified_base (559)..(559): a, c, t, g, unknown or other
  modified_base (585)..(592): a, c, t, g, unknown or other
ccagttttcgaaggattgcttgacacaaatcaagcaatggcttcaatggaggacttcggcaacaaccttgaaaagcattagcaagtggttaaaaaaggcaaaatgtgacagcttctgaaggaaagtatttgttgctgccattgcagcgctgatatacttgatttggagcaacggaaataatggtttttagaatgggaagatagaaaattgtcatagaattgtatacaaagttaaagctgtcattaaaaatagaatagtttgtatatggccaaaagatgtacgtaactaatagagagaagtgttggtttaattcattgtaagtccattgtaaagattatagattttagagttggaggtcctcttcttgaggatgctcttaggttgtatgaattattgtttggtttttttaatacacttgttgatctaccaaaaaaaaaaaactttttagtcacatacataatttttttgtgactaaattgtgacttttagtcacaacaaaaaattactttgactaaaacataatatttaaatacaagttgttattaatttaattttagtnacaacaagtattgtgactaaaaatannnnnnnncacaataaattataatttttgtgaataatgcctttagccacggactttttagtcacaacatagaaatgataatttataattagtcacaattcttttacttttaatcataagttttgttgtgactaaaaataagattttatgtagtggtaatcaatagtgtcatactaataatagtggaacactataaataatactatatgtatgataacttttagagtgtgtttaaaataaatttagtgtaaaatctcatcaaatttgacattttaacgttttattggaattggcctaagtaccctcattattatgttaggagagcatgaatgagattatatcattatataacgagaatatttttcggtatgaaaaaattttaatagagtttacttttataaggcataaataaataatgcaaaaaaatatgggattaaaaaagtaatcaaagtttaaaatatgggaaataaaaaaaatatataattttgataaaacttctaataataagttttgccgaaaaaatcaccggcctcagaaaagttactagtgctagaaaagtcaccagaaaagtcattgtcaccagaaaagttgtcggaaaaattaccgaagttgtcatcatcgtcagattagtcatcagagttagatatctcagatataaattaaaatagaacctgttctataaaataataaataaaaataaatagtacaaaataactcaaacacgttataattaaagtaaaaccggatctatgcctaattcatgcatctcg

SEQ ID NO: 66144 - DNA, 879 bp, Cannabis sativa
tgagtatcaatggcagaacagagagatttagatgatgagaagaaagaaaattcttaagcttctgataccatattagtgaaagtaatgtcaaaagtgtttcattaattaataattcaggtatttatacaagaatacaggacattagacacaataactaacataacggaaaaactgttattaactaactcagtaacagactaactaaacaatagcctataacagattctagcttaagatacccaaaatataagtattttattatccaaattataagtacttcgttacctgaaatatgagtataactcaaaatataagtaattggttatccaaaatagtatatagttatctaaaatataagtacatacattagatgatgtataagtacttttttttttttttttgctgaaaccctaagtataagtacttggttactcaaaatataattatctagttacctaaaatataagtaccaagttgcccaaaatacatgtaattggttagccaatatagtacctacttgattacccaaaatataaaaacttggatacttaaaatataagtaaatggttacctaaaatataagtaattggtcacataaaatgatggtaactagttactcaagatagtaatttgttagcaaaaatataaaacacaattcataatcgtaattggttaccgatggtaatatattattttgtgtttacacaaaaaaaatatttactttattttaaaaatctcacaaaaaatcgatgtaatgtaatttgtgacctaactaaatacctttattaagaaaaatcataaaaaggattgggagtattttaaaaatacacaaaaacaacaaaaaaattacaaaaatatacggaaatttaaatattttta

SEQ ID NO: 66145 - DNA, 922 bp, Cannabis sativa
caataatcttttgcaagcatcccagtggacatttgtaggtgcatgaataaattgactcaatttattcacaatgaaagcaacatcgggtcgggttaaggtgaggtattgtaaggcccctaatgtgcttctttagagcgtgtgatcagcaaaaggttctccattagtgagagacagaacatgagatgaacttgttgggctgggacatggtttggtgccatccattttgagcttagtcaataggtctgcaatatacttacattgggagagatagagaccggatgttgttctatgtacttctaccccgagaaagtagtgtaaagaacccaaatctttgatatcaaattcatgattgagggctgttataacatcagatatagcagttgggtttggacccgttattagtatgtcatcaacatacactaacaacactattagactttgtccagaaccttgaaagaacagcgagttatctgattttgacagctgaaatcccttgctatagagtgtagatttgagcttttgattccaggctcttagagcttgcttgaggccatacaatgccttgttcaacttgcaaacatgagtgggtttttcaggatcaacaaaacccggtggctgtggcatgtacacagtttcctcaagagttccataaagaaaggcattggaaacatcaagttgtttgattggccaattaaaagagactgcaagagttatcaagattcgaacagtggctggtttgaccactggactaaatgtctccttgaaatcaattccaggggtttgagagtacccttttgcaacaaggcgtgacttgtatttttctagtgacccatctgcattgagtttaattctatgaacccatttgttgcctactaatgtcatggagggatggtatgggaccaaagtccaagtattattcttg

SEQ ID NO: 66146 - DNA, 2389 bp, Cannabis sativa
tttataattattaattttttttagagtaaatatgtatgaaaatttaaatacataaaagtaattatttaaaatactacaaattattggttccaaataaaacttaagtgttttaaaaaaatattttgctaacatactaaaaaaagaaaagaaacatataataaaaagattaaaaaaataatactaataaaatgaaaagattaacggtcgttacggttccttttttctgtatcatttttgtcgttgctccatttaatatttagagataacattggcgcccgaaaaaataggagcaaaaatttataattgcattgtaattaacaaaattatcgagtatgcacacgtgtagaatgccaaaagaaattaacgaaataattaatacataccaaataataaacagatcatgtaactaaattaacaataaagaaaagttataaaatatttaaggaattaaattgatccatcatttgcacccactaatcttattattcttttataattattgatttttttagagtaaatatgtattaaaatttaaatatataaaaaagaaaattatttaaaatactacaaattattgggtccaaatagaaattaagttttttataaaaaatattgtgctaacatactaaaaaaataaaagatatatataataaatagataaaaaatatatattaataaaataaaaagattaacggtcgttacggtcccctttttttgtgtcatttttgtcttcgcctcatttaatatttagagataacattggcgcccaaaaaacaagagcgaaaaactataattgcaccgtaattaacaaaaattatcgatcatgcacacgtgtagaacaccagaaaaaattaatgaaatatttaatatataccaaataataaaaagatcatgtaactaaactcaaacaataaataaaagttaaaaaaatatttaatgaattaaattgatctattatttttgcacccactaatattattgttctttcataattattaatttcttttagagtaaatatgtattaaaatttaaatacataatcaataaaattatttaaaatactacaaattattggttccaaatagaacttaagtgtttttaaaaaaaatattgtgctaacatactagaaaaagagaagatatatataataaatagataaataaataattaatactaataaaataaaaagattaacagtcggtccctcttcttctgtgttattttagtcttcaccccatttaatatttagggataatattggcgcccaaaaaaataggagcgaagaattataattacatcgtaattaacaaaaattatcgagcatgcacacgtgtagaatgctaaaaaaattaacaaaatacttaatatataccgaataataaacagatcatgtaactaaagtcaaataataaagaaaagttataaaatacttaaggaattaaattgatctatcatttgcgcatactaatcttattgttctttctaattattaatttcttttagagtaaatatgcattaaaatttaaatacataaaaaagaaaattatttaaaatactacaaattattggttccaaataaaacttaaaagtttttttaaaaatatatgctaatataccacaaaaagatatatataataaaaagataaaaaaaaaaacaatactagtaaaatgaaaagattaacagtccatttttttgtgtcattttatcttctccatttaatatttggagataacattcgcgcccgagaagataggagcgaagaatcatattttcatattaacaaaaaattattgaacatacataggcgagatgaggcagtcggtccctctaaaaaaataataaaaaaaatgtatgtgtaatttaattaattacgacatatttataaaaataatatttatagacataatatattcattgttttttcataactattaattttttaaggtaaatatgtattaaaatttaaataagttaaatagaaaattatttaaagggtaaatactgttttggaccctgtattttgtaaaagttactaattagaccctctgttttgttaaatgacaaaatagatcctgtattttctaaaattgtacaaataggacatgaactgattttttgtcaaaataaaacttaataagaatatgatctaaagatgttatgagaaaactggttacattttctgtatctgttcatgttaaaaattatcttaaaggccccctcacatgtgagatccatttaaattgtggaattgactctgataccatgttgcatattagctaggggttgcacctatcattaagagaaaaagaatccacttacaagtctttctacctcaaaactagggctgtacgaaaaaattcgtaaaccacccaaaccaaaccgaaaaaa

SEQ ID NO: 66147 - DNA, 792 bp, Cannabis sativa
  modified_base (326)..(332): a, c, t, g, unknown or other
tttggtttgagcagacttcgagtttcataagaaaaaactcaaagctttgttagggtttccattcgatttggttctgtgttgtgtttgtgattcttgattgttttttttttttaatgatgttttgtgtataatcaatacggacccggactcgaaccaggacccggactccggacccgggacccggacccagacccgaacccgggacccggactcgagacccgcgacgtggacccggacccgtagttggtgttgggatgaagtgtattaaaaataatattataactttacacaatcaattaatacaagtcaatatcaaatattgtatnnnnnnnaataatactaatacaatacaacacaatccaacacaatacaacataccaaacaagcccatagtacatatatttgttcaagcaaaaacggtgaaactcaaacattcttcagctgctattgagcactttgataataaaaactgaacttacaaaattgaaaatgaaacttctttaaattaatagggattaaccaatttctgtacatgattaggatccgcttctgcccttaaatccatacctagtgtctaagaactaacataaaatgttactaatcaaataagaaaattgctttaaaaaataaacataatgtaaccaaaaggagatatttaaacaatttttatcattttgtatgtgagactctacaagggtcataattaaggaggaaaaatctaatttattattattgttattatcatttcatgtagtatggataatccaactaaaaggattaagtcattcaatc

SEQ ID NO: 66148 - DNA, 788 bp, Cannabis sativa
aaaaaatttataaaataaatcaaaaatttgaaaaagtttacaaaaatacttcaacacgattttttttattattatttttactctttaaacttttttatttacgaaaatagtacttcttcagtaaaaacaataatctctctctctttttttttttatttttttttcttatatagtttacttatagttgtcctgatgttatttttttcattgtcttatagtttatttatggttgatttatagctgtcatagggttaatttctagttgtttttcttactttttgctgaataaaatgtatttttgtaaataaaaactttaggtcgtaaaattataataaatataaataatatatttttaaaaatttgccttataattttttttatataaatcagcttagattgtaatgcattacttcaacttccatttatcttcaaaccaatttaacaagaaaaaattgcttataacttttcaaaccaatctaacctcctcttgccttatcttcttaggtattgttgctatgactctgtatttaacattagttttaatttctttcacaactgtatctatagtttgtactctttggttccaaaaagaatcatttctattaccaaatactgtatatagttgtgacactgttgaaggctcgaagctatcacatttttccgaaacttgctcaatttgcctcgatgtattctctttacaaatcagctagcaaaatacttatctattgtccaccccaaccacatcttcattgctgtcaaacattgatggcttagatgacattcaaaga

SEQ ID NO: 66149 - DNA, 815 bp, Cannabis sativa
accaagcgcccaatttgacatactaacatcaacatggacgttgtgtgagtgaaaaatcgctccgcacttgtattttttgatgcctaagtgatatgttgacatcacttttttcaatttctttgttttggtgatttcgttcatgagtgtttagagatgtcactttttcgcgaaaacaatagacttgaaacatcccaatttgtggctcatttgttgatattccactttgtcgaaaaggagaaatatcaaagtatgaatttgacttgtcacaaaccgtatcactcgtttactataaagaaatatttaaatggtcgagatggaaccagaatcggataaacaaaacccagcacaccaagccatatgtcaacctgggcactaggtgcttcttagggaccttcctcaggatcactttgataattctacgacattctagattgcaaacaaggtgtcctaccttgcttttaaccaaaataagaagaattcatgaagcaaaatttatgtttgaggagcaaaaacatatggactagtttgtatgtcaatctgggcatagggcccaacacccatgtcaatctaggcactgaggccctattttgactctcaaaagatctcgtttgatctcgagagcacttatagtatgttattctgaaaacaaaaaagatgcgcgtaacatttttttggagagaacacttggaattgacccaggttgacaaaatgtcaacccaggcgctgggtcctagttttgcccactatattctttgtttgatttcaaaaaatactcgtatctcaattattagtgaaaatggagaatatgcccgaaa

SEQ ID NO: 66150 - DNA, 1175 bp, Cannabis sativa
catttttactccccttcaatcctctagtgttttgaggtgatgacataaaatgaaaaatgttcttctatccatacgagtactctctatgcgtgttaagtcactttcataaatcattctataatgattaattgacgaatttgatgcctacataaagaaattccactcatatatttttttcatttactcgatccctataaatgatcataaaaatgtaaaatatgaacaataatttcatgtcatttaaaatctcaatcaattgtcctaaattcgcaataaatttttttttgtggctagagaaagttgagtcatatctgtaaacaaattacatctatattagtaattttttttggacaaagtatctatattaattttaattgtaagagtgatcttactaactttgaagattattgatgccatacataaataatgattatttagattcagttctatattgtatatgacatagaattaatattgaggttaaataataagaagaattttcttaagtagtgctagttgtttaccactttaattctcacaaatttaaaattcattttttaaaaaaggaaagattttaaaataaaaaattaaaattattcaattatgttaacaatatatacatatataaaacactaaccggattccaagacaaactctccttcattccaaaaacaatatatatatacatatatatttcttttatttttttatttttactttatctttcttaacagaatatatatatacgatcacctttcactaacaaaaaactttatatatatgtgagcagctttaatgtattaactatggtaaaatatatccacactcaaatcgttagaagtgaaagaacaaaaaaaagaagtcttaatttttatatatacttacgatcatccacatatatatatataaaatacatatactctgaggcttgtttttaagtgagcaaactcaaaataattaggacattagatatgattttagagctcactaacctattccaagtaatgagtagaacccaagctacaagcagtggccaaagttgcaacatcgagagagctgtaacgttcccgctgttatattattttataatataataagtgtagattaaaatgtagtaatatatattattatgtgaataatatgtattaggtatttggtaaataaattgtgtaaca

SEQ ID NO: 66151 - DNA, 1085 bp, Cannabis sativa
tgtttattttaatgcattgccttaaaatccatgagtgcggtagtaagattgcaaattgggccgttgtcaaaccaaactgacttacgaattgataagttagtcctatagaatggacacctggtgcaatatggagagtcagaataatgtggtcagggctagtaacagtgggagagaatggaatctaagttgttcccataaccgaggtgaaagccattggagggctattggcgggggtgaagattatctgccatagactttgttagattttgagcaaaggttcacagagatggaagctataattcaatggcaataagaggaaatttagaggttgaaacaacaaagatcttatatagtacctttacgagatataccaaaagttttcaatccattattaacggcagaccaaagtatggctagtaaccaagtggaaccattccaagggggaaactggatgcaagaatctccaacccttcagggaaattcagaggtgaaggacaccttttggactgggagcccaaaagaatttgttttaaagcctcagaaggttatgacagaaggtctagtaacggctccccttatttccatttatggtggaggtggtaggggctccatggttgagcagaagaggaaacctacatcgacagtggtggatttaagaagaaacaagcggctctgagggaatcaaggcagaggtggacacaaggggtattcttaccatgattgcccacatcgcaagaaacaccttcccagagagtgtaatcggaaagcatgctttcagtgtggcatgattgggcattttacaaaagattgccttcaagtggagaaagaagagatggagcaggaagcaaaacccgtacctactcaggtgtatgctattactcaagctgatattgcagctattccttctatgatgtcatatctgtttctctttaataactcctattttacggtgttatttgactttggggctacacacttacatgtggcatcacagataattaatcagttgggttgtaacaccctaactaattaggcatgttaacgtgattttaaacgtattgtgcagctcgttgctaatgaacaag

SEQ ID NO: 66152 - DNA, 687 bp, Cannabis sativa
gtttttctgataaagtttttaacgaggcaactttaaatcatgttaacatacttgcactttatgaagcaagaagagaatgtgtgggagtgagatcattgacataccatattcgaaaaacatatagattgcactatgtaacgcagtaacaacattagcgattctctataaagataacgtgaaatatattgctcaactaaagctataataaagaagatagagctaaaggtattttcaccaaattcttcttaactcatgatcttaaggagtgtctaacatattcaatatagtgtcaatcttgcagacttatttacaaagttattaccaacatcaatatttgagaagacgacatacaagattaaaattcgtcgattagaagatatccacgaatgcataaatgagggggagtttgtttacactgtactattttttctttgaccaagttttccagcaaggtttttaatgcgaaaatttttatggacatccaagggagagtgttatgaaatattatttatggatgtccaaatcaccaaattaattatcattattaatgcttggttgtatttttctttattacattaatttagtttcccattattttagttatagttttgtataaataggggttcaccccattaaaataaataactaaaaaattctcattcagtttctctttccctcttcatcttc

SEQ ID NO: 66153 - DNA, 966 bp, Cannabis sativa
  modified_base (507)..(510): a, c, t, g, unknown or other
tctggcactgctaatggtacggccaaggctgaggaaaacattgcctttgcttcaaaacccagcaaaaagaagaactggaagaatagcaagaagcttcttaaagctgtgaaatcagttaaaaagaaaaaggctgctaatcccgaggcaaagacaaaaggaaaatacttctattgcaatgaaaagggccactggaaaccccaatgccctaagtttctagcaaagaaacaaggtatttctgtctatgttataaactcatgtattgtagagaattattgcccccttgggttattaattctagatctactaaccatgtttattttcttcttatttcagctccagctgcttaaacttggattgctatcctagcgagttgagtcggatggttggacagaagggtagagattatccaagattgaagatgaagctcggaatcttcttttaatttttgaattaattgttttgatttatgaacaatttaatttaaattattggtttgggattttattnnnnatttcatatttatgcagacaatttttttttttgagaatattaataaagttttctcttttagttatgaattgagcttcatgttttctttatcttttgtatgccaataccaattataaatttatatgtttatcatgttttgtatgtgtttgtgttttattattgatgcaaaatctatggtatattattctttgcaaggagataatattacataaacattttgaatttgaaattctatgtttatgaataattgttaattcttaagcaattattaagattttgtttaataaaaagatcttttgatctagtaggggtggaagaagttaagaaaaatatatgcaattcagtgatcttttatatctattgaactctaaattatattcataactccacatgatctctatatgtaacaccctaactagcctaggcgtgttactgatttttaaacgtactgtgcag

SEQ ID NO: 66154 - DNA, 660 bp, Cannabis sativa
ttcctcctgcataataaacaaaaacacattacaattaatgacttgtattgaaaacaaacacagacacacacaaccaatgacgccgattcaacagtgaatcctcatcataatttcctcaagtgcaattaaatgctcctttcaaagtggtctgaatgaaccaacccatattttgaacatacaggccagcagtaccctcgtaaacaattaaatagagaaactaaaaatcaaaagacataaccaatcactttccaactatgataataatagctacatgtgctacacaaccaaataaaggcaccaaaaggagaaaccaaattttctcaacaagttaacggagcagtaagtagtaaactacataggtttaccttatggaaagtaaaggtgaaatcctgactgaaaaaatgcaggactcaactaccaagttccaaccaagtataacatgttgagaaataaagccgtccaatattcaggtaaggttcaaaagcttaaatctatattattcaaggcttgtatcacattgggtcaaaagatgggtgcatcactaaacaagcttggtgcaataagacatgacactaaacaaataaagagtatgtagttggaagaaacaattcaaatttatatagtttccatatgacaaaaaatatgtgataaattaccatc

SEQ ID NO: 66155 - DNA, 2665 bp, Cannabis sativa
aagaaaaagacttgtaataaagtttgtaaatattttttggatcccaactgttgtaagtttaaattattactagttttattttcattttatttatgaaaaaagtttaaattctgtgcctttttgattagttataatcccatttaggggattagggtttcgtaagtaacttgggtagcttgcctaattatttagggtgttacagtagttgtaaactactctaggcttgtgtcacttcagtttcatactcgattctacttaatggcagtcctaagaaaaaaaaattatccgggaagagggtttaggcaaggggatccattatcccccctttcttttcctcctttgtcaagaagtgctgtcaaaattaatcgtaaaggttgaaagtaatggcgatatccatgggatccagattgtgagggcagcccctcccatatcccatctcatgtccgcggatgatattattttattcttaagggctaatgaaaaggaagcatctatcattttagagattctttctacttacgagagacgatatggccaaaaatgcagcacgactaaatcgagtgtgatcttctccaacaacttgaatcatcaaaggagaaactttattctgaagcttctccatgttcagcagtcgtctggggaggagaaatatcttggtaacccttttattttcaaaagaaggaaaaaagaagcctatgagaatttaagagaaaggatgaaacaaaaactggaggggtagaaaatgaagctcttatcctttgctggtagaacaactctgggaattcagtagtagcagccatgccagtttatgcaatgtcaacaaataaaatccccttctctgtctaccgatctctagttgctctggctagaaaatttttgtggctgggtaattaatgtggacaaggaaaggttcctagctctcaaatcttgggatattatttgtcaacaaaaacaattaggaggtctggggttcagaagatttgaagacatgaaccgtgcgttattatcaaaacttgcgtatagtctgtctcagcaagaagagaacccctgggtgaattgtttgcttcacaagtactgtaggaacctgaatttcaagacagttcaacagaaaaatggtgactctgtactttggaaaagaattatggaaactcagaatatattgtggcgaagagatcctgctggttaatctcttttggtagttcagtgaacctgtggaaccaaccatggatgccatggatacagattggtgagttcaaagaccttatgtccattacttctcttcattttcctggtttaaacaaagttgcagatatctctttgggtaacgagtgagatgagaatttggtcactaatgtttttggagaagaattgggaagaagaatattggaaattcccagacttccaccttcttcttaagattgtatcgtctggaactgcaatggcaatgtgaggttctctgtaaaattttcctactatctggaccaggagcatcgattcaatgacaatcgtaaaatctagagatggatttggaacccgagtattcatcctcgttaggcgattatgctttggcgtgtgatcagcgaatgcatccctacaaaaaacaaactgcacttcttgatagacaaggattgtttcctctctgatgcagaagaggaatctggtgttcatatttttaaggagtgccctctggtgtgggccatatgattctcgtgcctgttaccctgtctttcaacacagatcccaggtactgatatgatcaactgtttggagaattttgtttaaggattctgaaagcagcagagttgaagctttaaaagtggttgcctgtatcttcaacgagatttggtatgcgagaagcctgaatcggacgaaaagaaaaatgatggatagtaatgagatacttgtctgtgtccataacaagttcaataagttctcctctatatttcaggatatgacaggtcttgaatagaggaatatccaagatcctctgccatcaaatttggtcttcgctgagacttacatgatcacagatgcctcttgaactcagaatgtggctgggttagctgtcctttccatcagcagaactgaagcaaaatgggaagcgaaaatgtgcaagaaggatgcaatttctcctatggaagctgaaattcaggcaattttgctggctattctctgggcaaaagacaaaggttggcaggatatcaccatcttttctaatgctcaggcagtagttaatgccttaaataactcttcgagccctccggactgaagaatcaggggtctatcccttctgattttagatttcttaatgtctttttctacttatagattaatttacattatcttttgttgacgatttagccaagagtgctaggagatctagctaggacgctaaacattttaaaggggagggtgaaccccctgttgccccgttttttccttggtgttgaatgaactttttcattttcaaaaaaaaaatggaatcaaagaattaattaattgataattaataatcaatcctcatgtaaatgatagtctatttatcattatcttacttgtttcgattgcgtatactataatgattagaaattatttaagtcatcatctcttcttttatattgttttgaattatttgttattattattattaatagctttaaatttt

SEQ ID NO: 66156 - DNA, 1123 bp, Cannabis sativa
gcaagcccatggtgcagttcggcccatattcaataagaatgcagctaaccctgtttgtgggtcgggccaatgggcctttggcgtctgacaaatgggcttttagggccttttccatccattctcaacgtacctaaatgaatggacgtgaagaagcagtaagcctgcctgagaaaacaaaatagaaattgaggaaaagataaaagaatattattctaaataattttaaagaagtaaacaggaaataaaattaaaataatgggtaaataacattttgaatcatgtgttcgttaaaagttattaatccgaaatttagattttttattttattaattaacaaattagatttagtatttttgaaaatagtacaaaataatattctaagctcaatttttcgtcaattatttttttaacctaacaaacccgaagtaagtttctaggacgaacatgtgcaaagaatataattaatctagttataacatctcttgattaaattattattaagttttattttaataaaaattgaattcatagtattatttttaccatttaaaaaaaatataaaatttaaattattatttaaaaaaacaaaaaaaaaaattaaccaataacttttaagtctaaaataatatttactcttaaaataatattaaatttaaccttttaaaaataataattacccctacctctcttgttgccacctttaatttgacattggtgtccacgagaagttatattaatgtggaaagtttatcattgaacaatcaaatttgtttcaacaaaaacttgaacatctctaaaaataaataaaaatctcattctacactacagccacgagagtgggaattatcttattttcacgaggagataaatggtgttgttcaatagttaattaaattgataatttacacaagtacttgtgccagtgccactgccactgcccattggtttctccaacacaagggatgaccctcttatgtgatttctatttttaattttagcataatttataattatatattttctttggatcaaaatagaaataaattaagttccgtgtaaaggagaacaaaaatgatattttaagtttgaattcccattctgaatattagaaaaaaaaaaaaaa

SEQ ID NO: 66157 - DNA, 677 bp, Cannabis sativa
cagcaaagatggtgacactttgagaaaaatgccacggctgtccttctaaaattctacccttatcaccctcacatccgaaagtcactaggaaaagaccatcagcatgctcagtgacagaaacagggaatctacactgtgatgaccaaataccagatagggttttcatcaaggatggcctattataaggtctaatggtatggagtttcaaaagaaggctaatggtagcaggggtagaagaggaagagctagcatcataggtaaaaatagtgttttcatcagaaggaaagactaaagtattagaaacagtgttgagaaaatcatccatagagaaatagaaatcaaggcagacacacacagaataataacaagcaaaccaaggaattgaaaagatgaaagggaagtgccatgatccataccttagtcttactatatatagataaaaccagaaaccccgtaggtgccttctcgaatcgcccctagtcacatccctagccttcacctgaagaggtgtaatgatgatgaggctattaaaatcttcataaacccagacctccgcccccattttccaatcttcaagagagaaaagatggctggagatatcctcaggcgataataaatgccaaagatcccaacataaacccccagatatgaagtaaaacaaagaaataggaagagaa

SEQ ID NO: 66158 - DNA, 1032 bp, Cannabis sativa
  modified_base (426)..(432): a, c, t, g, unknown or other
agccagtgcatcaagaattgatcaagtctcatccaattttgaaaggccgggttagggacattacctgcaagaaactgtggtggttacggaagtgatccaagaacgtaggcatcaagatcatatgctcgaatggcaacaaggataagatatctccaaattgtgtagtttgatctgtcaagacgaagattgagggggagaagatgattgttggggaggggaattggatttggagcttcaggagctagttcaacagctcgagcttgttgtggatcgattctttcctctgctggtggttcaactcgaataccaggactatttgcgttattgccatgattcgacatggctttgataccatgtaggagtactgaatttccagtactcgagcttgagcaaaaagacaatggaggagagagagagagagagagnnnnnnngagagagagagagagatggaaaaatattgctcaactgaaaaaaccagttggccaaacttggcatttatatactgagttaattacaagagaagtataacaaactttaactaatttctaagtacttcttactaactcaagaactattacattgagcaaaacataaaaaatagaaagaaaaaaaaaacaataacaggggacttagccattttcaattctaacagaaactctttacatctttgtccatctgtttagccattttcaattctaacagaatctctttgcatctttgtccatctattaccgtttgcttcagtattctttctagcattgtgtcatgttcttatttttctggttattttttatactattaattagtgtcttgaaatttatgttcttgataaattttaattaaccacataactattttaaattggaacaccaaatttgaacaaatacacatacatactgagcatttgatgaagaaaaacaagtatcattgttgtggcattgttctagagcaaagtaacctaaaacgtttacttacattgttaccgaccttggtacaaagtatctgtcaacaagttatttgatgatgatgaa

SEQ ID NO: 66159 - DNA, 1354 bp, Cannabis sativa
tgtataaatgtttaatgggccggcccaaagtatttttgtaatttttttttccttttttgtatttttctatttttttcccatttttttttctgacgtgaatataatattaattaaataaaaaaaattacaagatacactattttaatataaagtttacatttatacggtagcatagtaatttttataaatttacaatttcacattttaaagaatcacagctattgtcataacttataggaacatccaagagattcccgggatcaattagatgtgtgtcaaccaagttcccctgtaggaaagagttggacaagctatctggtaatttagactcacaatttgagataaccaacctctctcatctctccaagaaccgcttcgtttagcattacagagcccctcacgcaccctttccacaccagaacatccaccagaactagaatttccatcatgagcctgttgctcagcataaatcaaaccagtaggatcggccaaaccaacctccttactcttttccacgaaaccaagcccagtaatggtgggagtaacaaccgaacccgctaccttccttggtaacaactcaggacaaataacagaagaggagctacctgcattaaccttcccaggattagtgggcaaaacatcagaatgagagacctctttcactggaaagccagggtgagtggtggtctgagcaaatctgctagaagaaccttgagaagacaaagcagagaagtctcttctctcatcaacctttaaccaagaaccatatcccgagagttgattccccaatccatcctcaaaaaatttgactggctctgcacaaacccgagcatcatatcccacaaaaccacatttaaaacacataaaaggtcgatcatacctgaatgggagccaaatcttccgaccctcactcggaaaaaggaagcctgggcatataggaattgaaatatcacaccaaaccttgaaggtgaaaaatcccttagtcacgatcttagagatatcaactttttgaacttcaataacttcgcccgcataacccgccagtcgctccaagttcccctgtgtgatcgaacgagtaggcaactgaagaattcgcccactaagagggaaacgagtgagcactttatcccaatcttgaggaattccatcaagcctctccacaattagaaagccattattaaataaccaagggttcttggtcaaaatcctatccaaatcttgagatgatttgaaggagaagactaagaaacttgattctttagtagtaagtttaatttccactccccaatccctttttgaaattccccaaacacgtctcagaatcgttttcaataaagaacgactcatcggacgg

SEQ ID NO: 66160 - DNA, 870 bp, Cannabis sativa
tttaataaaatagagagtataattggtaatttttacaaaatggtatttatattttaggagtatatatcaatctttttattaactctttcaaattaagtaggtctatttttgttttagatgaaagtctgtcatggatttgaaaaatactattttttttaatggtaaatatttcattgaaaacattatttagtaaaactcattgcatgcatatattataaattaatttggacataaaagttaattataaattattatttgacacatatgatatttgtcattaatcgtaacttgtaactttttcgtatttttcaataaaaaagaaaagaaaaaataaaactgaatttttttatccaaaacactctcaaatgatttctttacattaaaaaataggctaaaaacaaattaaaataaattgggtaagtttacagtataccataaaggaatatttcggtagactttatctatttcgatacctaataaaaaattttagtctaattttttttcttcataattatagttatttaggactacttataaattttcaaaaatagtttacaatgctaaaaacaagatttacatattttattgtacacgcgattattttttcttacacgcatggtaagtaattgtttaaacattattttcagtattgtaaacaattcaaaattttttaaaaatttataagtggtcttacataaacgtatacaataatataaaaaaaatagactaaaaaaattttctgattgcagaaacagattaataatctactaaatctaccatttaaattttaaaagaatctattacaaaaactttcaaagaaatttacccaaacaagaactttgtcatcaattaaccaaacaaggaactttg

SEQ ID NO: 66161 - DNA, 728 bp, Cannabis sativa
aaacagttttttagttatgatgtcaaacatgcacttaatttcttgttgggatttttttatgaagattcatgaattgattaatgtattaaatgatttcatatgattcaaaaactagctttggctatgaagacctttttttctctcttaattctgaatcttgacaatggagacttcgtttgtctcgtattttgctactcacgtgaccgaaacaaaaacttgctccgtcaatgtgcatcattgttttgatccaaggaatttctacgatgagcgattgggcctactcgaagccaatgatcgtcctggacgtgttgtggaatgctacgttcgtggggaatgggatcgtagtgctctggcttagcgttgatgagaatcctttggtgccacttaagctttggattattagatatgcgcttcagtgtgtgttccacatgggttgcgttgcggctgagtaaaagaggcgccagcgcgaggggcgttgggaggaattggaagggagtcaaggttgggagagcgatggggattcgaattctaagtctggaagtgataggaatatgctcttgaggagggtcttgttgaagctgaaagtggaaataggtattttagggttatgctaatttgaatactggaagggaaatttgaaaaactatacattaaaaaccctaatattttatgcttaaaccaatacatttcaaaataaaaaatatatgacacttttatcaaaaacccaa

SEQ ID NO: 66162 - DNA, 767 bp, Cannabis sativa
tttaccataggtgagaagatttcagtgtagtttattccttcccactcgttcattctcattgattccctctttcaccttgagaatccatttgcattccatagtctttttgttctctgactttggtaacaacccacgtcttattttttcgaagtgagtccatctcctcatcatggcctggagccattttgacttgtttccacctaaaattgcctctttttagcttacgagctcttcaattttaatttgttgtattgttgctagtacaaatgctattaagtctacttccgtaaactttactggagggtgaatctctcttctagttctgtcatgcgccaactgataacattccatacttgtgtgttcgaatccttttggaacctctgtttggtcttcattatctttcagcttagcatcagcttgtgtctgcgcactgtcttccggttccataatagcctccatctatgaaccttcttctagatgtttcattctgtattccatttccatgtgtgtagtgttcttgtttcttattttttctgcatcacacggagacacactacctttcctggatgttgttatcccaatttctatcctcgtgacatggcatgcttacatggatagaatctgtgccacgtggcagtacagttcacccaaaaggaaggccaagttagcatccgagccaacgaagaccccgacactcaaacgaggatcaagtgacatccagctcgctctcgggagctggccagccatgttgggaatattttaccagg

SEQ ID NO: 66163 - DNA, 5295 bp, Cannabis sativa
tagatatgaatgtatactgtgtcttgtgtctactgtatatgaagagtctttttttttaaaaaaaaaaaataattaaaaaaatggaataatattaattaagtattgacaagtgttaacccgaccaatagtctttttttttttttatagaatctgaatagtctttttttttgaatgtgattaatatgtgattaagtattattaacttttttttttttaaaaaaaatgttcgggttacgggttacaacccgaccaaaaaaaaacctacttatccacacctgaacccgaaacccgattggaggctttttcgagttcaatctgactcgactacacgggtttttaggtaatcggtttttttggcagcgggttggggcgggtggtcgagttttttgggtttgcaagtctaaaggtgcagtcgtaattttacaaacaagattaaaaatacaattatttctatttaactatatgtagtatatggcagtaacaacaatggagttcacaatcttcccttgaaaacttttgtgaggagccgagagccaatcactaagatcatcaggtcaatcgaaatagtgaacgcacaatctccaaaaaggtgtttatgagtctcttgaactctagcacaaatagggcatagatcgattgtgatcaaattgaatcggctgagatgatcacgggttaaaagttaattgttgataacttaccaaccaatgaatctgtgcttcggaattaccatgtgccaaacattttcaacaaactttactttatatgcttgaataagagataagtaaaagatttagttttaaacttacttttattttcatcttcaactacaatcttcatgtcaattttatctctaagcctcaaaattttcttgaaataccaactagcaccatgtttgaaagccatcgaccaaaagtcttatccctttaagtaaatgcattgatccaccaaacccagagattatcatgcttgcttgcaattgcacaaataaacttagccatcaaagcaacattccattttctaccctcccaaaaacctattccaccaaacttcatggggagacaactttctcccaagacgggatgtgaaatttgctctggttgcctttggatccccaaaaaaaatccctacaatatttttcaataactatagtaattttttgggggagaatgaacaagctcatccaaaagtttcttatacccaagagcaccgagtgaatcaattgcgctctgctgcaaaagacaaatttctgctagcccaattattaagatttttgttaactttgtcaagaatgattccgcaatctgaagctcaccatttggtgggtctcagttgaacctccaaatacttaagagggaatttttcttcttccgtttgtaacatatgaagaatattgcttttacaatcatcattgacacccccaaaataaactagagatttgattttattggctactaataaacctgttaattcactaaaggttttgaatccttcatggatgagtctaacagagtttaaattgcacttgtaaaatataataagatcgtctgcaaaataaagattaaccagcttaagagacttacagagggggtggtagccgaatcccttctccttggttttttatctcaaaagtctcgtcaagtattccatgatcaacacaaataaaaagggggacatcagatcaccttggcgaaggcctttttcacctttaaatgaaccttgaagctggccattcaataaaaggacataagaggtaccatgaagacagcttaggatccaattgataaaattggaagggaagcacagaccctttaacaaatcagcaacaaatttccagtccacagtatcatatgcatctagcatatctgtttttctctttataatctttaagtaagtcttggaagatcaagatattatgtgtcaactgtctattaattcttgacaaaggcgccctggttgttactgatcacactaggaagaatttctaaaaatctagcataaatcattttggagatgcatttatagatcgtgttgtagcaagcaattggtctatagtcaatagcattctaggggtgttccgttatagggatgcgagatatggttcattaaggtgcttagggagaattctttttggaagaatcccgaaatagctctagacacatcctccccaatctcattctagagaccctttaaaaactctactccatacccatgacctgggcaatacataataccagggaaatctcacatgaatggtgttgttgagagatgaaatgaaatgcttaaggacatggtaagaagcatggttaatcattctttttttacctaaatcactgtgggaaaaaacacttaagactacaatctacattctaaatagaatatctagaaaattggtagctaataaatcccatatgaactatggacaggaaaaaagtctagtagtaaacacttacatatttgggattgtccagctgaagtaaggcctttttaggccacatgaaaacaaaatggactcaagaaccattaactatttttttgttgggtatccaaaaagtgagagggtttaatgttttaagatccttcaaccaagtccgtttttgagatgggaaatgtaagacttcttgagaatgttgtgtattaggggggagataaagtaaggaatatttttttaagagaaataaattcttctaccaaatgttattttttgacaatgatcaacctattgacatattgctaagaaatatttgaagacaacaatgaggattcacctatggaactccctactcaatatcaagaggttgttgagtttgctcttctagaacaatggaagtgcaatttaaaattattttattgtgtttcttaaagagcatgagtttgacataaggacaatggaagatggtccattcaatttccaataagtcaaataaagtgttaattatcaaaaatggattgatgccatgaatgatgagatgaaattcatgaaggacaacgacatttaggatcttgttataagtcaccaaggattttatacaaaaggatgaagacattgattataaagaaactttctctccagcgtcatcgaaagattcttttagaatatctcacttttagcttatcttgacttagagctacaccagatggatgtacattaagacagttttctcattgacgacattgaggaaactatatatatgatgcaaccaaaaaatttggtgtcaagtaatccaaagtctatagttgtaaactcaagatccaatatctatggtatcaagaaagctttccatcaatggtatcacatttcatctaatcgctgtctcatacgcggatttaaagtcaacgttgttgacggatgtgtatgtcacaagtttagtgggagtaaattaatctaactcttgttgcaaaaggcgacaagtttagtgtcaaatatttccccaagagaaaaatttaaagagtgaagagaatccttatgcttcggttattggaagtcttatgtatgctcaggtatgcacacatctagttttgccgtatagtgattatgttgggtagatacttaagtgacctaggtatagatcattggaaggcagccgaacgagtcatgaggtacttataaagaacaaatgattatatgctcacttgtcaaaagtttgaaaatttggagatcattaggtattttgactctgatgttgcgggtagccaaaaaactaagagattcacttctggctatgtctacttgttgtctgaaggagctatatcatgaaaaagtactaagtagacactcacatctcatcctatcatggcaacgaaattcatagattgttatgaaacaactaataatgcaatatggctgcaaattttatcccttggctacaggttgtgtaaggaattgaaagaccactaaaggtatattttgataatctattagcagttctatatttagatgacaatagaatcttatcaaagtcttaacacatagacattacgtttctagttgttaaagatagagttcaaatcagtaagatagtatttattgagtatataggaacaaacttattgctagcagacccactaactaaagctttaacacccaaggtctttcatgagcatatagcttacatgggtgttattttatttgaggatgtgcagtttcagtgggagtttgttttcaatattagttactttgatgattgacactattaccctactttgagtaggttaagttttctacaaaataaaattcatagttttattatttttattattctggatgtgctatcttttaattgtggtttgacataaagtttgaaagattaaggattgatctcactaaggaataaatgacgattggaaataggcatgagtaattgcatgtaatttctagttacacatccatacttgatctatgtcattgaatatatttgatatggtgatcattgatgcgtctagttacgataaatataacgacgaaggtcactttggtctcatattggtataggagatggacaagattgtttaaggagatgtttagagaatagatagcaagtttgtgcgcacatgaagttatcaaatgtaattgtcattagaattaatttagaacccaggtgggagattgttggattatttttaataatttaatatttgagcttacaaattaagacaaatatttgagctaatattttaaattgggctaaataagtgatcaaattaaatgagctcaataaatatcttatttggtatgggctttgtaatgtgtaatacccaatagtaaacttattagggtttatggggctctaattagtttgctatataaagaatattagggtttgatcccaagactaatctcaacccatagagagaagattagtctttggaagaccatatacccacaatctcatctcgtatccaacatcacggaatcatgtttgtgttccatcttattgtttcataatcttatattttgacatgagtttaagattcatatgtatatctaaatataatttctaacagtaacttacagattaaaaaattcttttgctaaagaaaataaaatttctatagaatttttcttggagaacaaaaggtctatgttcacgttcatctttcccatctctaaatcttttttcttaattaattcttaataaatcacgtgtttttcatatatacataaaaagtaaaagttataattttttaaatatatattttaatactaaattatcaataacatgtgcagggccagccatgagctaagaggaaggaggcggctgccttaggcccccgccgctcagggccccatttcgaaaa

SEQ ID NO: 66164 - DNA, 1563 bp, Cannabis sativa
tcgacccaaccggccgcccttggaactcacggagttggtgttccaagttggagatgaaggtatcaagtttgccaaattgctccctgttccatttactcaaggcaaggcgggtagctcctaatttcttgaacactctagccggcgcccaggaatgggataaagacgcccaagcagagtccactattaaggagctacgaggatccctggtccaccaagcctcaaagcgaaactgccttttggatctaggatctagatttgccgtactcacacaaataggtcggtgatcagagttacaagagtgaagcgactgaaccacagccttagggaataagattaaccaccattcattgaccagagccctatccagggccgatttgatgtggtactccccgatttaatgaacctaggcactttgcttttatcatgtttaaaattaaaattaatatatttccatatctaaacatttaaacatgataaaagcaaagtgcctaggttacattcatattaatttttattattattattttaataaaaacacctttttttattacatgttttttactgtatctaatttttcattcttgaaaaaaaaaattatccaataatatgatttacttttcaaagttttcttttattttttttttttttattttaagaaatacaatgtcttaaaccataactaaaaatcaattaaatattaacagatcaaccgtaactcacttgtatttgatatgttctaggttgtataagatatgtaatgatgtttataatttggatagttaaaagtttacactttaaatcttgatgaaaaataagaaatgtaacttttaccaacacagtttgctactccgttacttttaccagcgcatttcgcaaactgcactggcaaagaggtcaacgttttaccagcgtacatttgcagtggttgaaatctaacttttaccagcgtatttacgctctgaaaaaagtcatttttgccagcgcttttcattttatactgacaaaagttctaataccaacattaatttgccaacacatcataagtaaattttattttactagcgcaatgctaacttttgccagcacaaaaatgtacttgccaaagtgacatttctcgtagtgatagcaattataaatgattatttaatttaattatttaatagttttattaaatatattttcttttgggaatcaggtgagtatttattcatttcacaacatgttatatacaaactttagtaccacatggcttgaaggattctatctatgtttataactgagcaatttattgtctatctataacaaaattttgatttaacaactgaaagtttattttacttataatcttatacttaacttgcttaacaattacatgataacattgcacattttggtaccgaaaaacttgattccagcttttctagatatgatatactgtggcgactaccattgttgcatacacatggcatttacactttgacatttttctcttccaaattcacttcaaaatttcttgaacaatagtagctgaagtattccaattgaaccaattcttgagagctt

SEQ ID NO: 66165 - DNA, 854 bp, Cannabis sativa
tttaaaaaatacaaaatttattttgtcatttaacaaaacagaaggttcactctgtaacttttacaaaacacacaatccaaaatagtatttacattttttttatttgaacattgctattagtgtattatacggactttatggttccaacaacattcccatgtggcctcttacagtacttttggcagtgccccttaacatttttttatatttgtaccatagagcatttttttaaagagtactataaatatagggatatgcatatttttctagctcatattcataaaattaaacatcaataataatgtataatgcgtctaaatttgataaatacgtcgtatcaaatttaacacaaaacataacatatgctaaattttatactaaatatcgttttttatttacttttttttttatcatttattaatataattaataattttttatattttatttatatatttaatataattttttatgtttgttgcctttttttacattattctataaaaataaaatttatttttagtgtattagagcaaattataaaatttagcccaaatataatatgtgaaaattacatgaaatatgggacttcataaaaaagttagtaaaatatggcatttataggtttgtcaatcttctatggtattttttcacatttaaggttttttattgtatttgatatgccatatttttataaacttattatccaatcccatattttatgtttttgtttttagcttaattagttttattttttttttaatttattttacatttatattttagggaatctttctatttggaaaatttacaccaaatactacatttttttttcaaacattacatttttaatt

SEQ ID NO: 66166 - DNA, 1400 bp, Cannabis sativa
aaaattatatttttcaatattattagtacttaaaattttatttttgtggctggttctatcaatggtcatatcgatatattttaaggtattaaataataatattctttttatttatatatgtaaatatttattattgattgatttaatatatgaatattaactgcctacataaatatgagggatcgatcattacaaacgaaagaaaagaggaagatcttatatatttgccaattgccagccttgaattaagcgggaacagcacgtcataattgggatagttggtaggctatatttaataattaaaaacaaaaaacaaatacatacatatatagctaaatcaatacacatatataagtataccatgtcatatataatatacatatatacatacattcactatatgtgtctaaatactgtttataggcaataagatcatgcatgagtacttgcaaataaatgtatatattaattaattattatataaaatcaagcatgtacgttagatatatttatccaaaatagttaatatactatcatagtatcattaattcatgtccatatatataataaaattaaaactcatgaataatgtagtatgtctacattatgtacattcgtacgtgtctgaatattattatgtgatattgatcccacccctgacacaacacatgtcctaataatattatgttgagcttttcatccaaaatttattatatatatatatatacataatgtattgggaatttattatatggtatactacaggggtagtataccatatatgtaagaaattatatatttttatatgaccgatatgtatattttaattataattatgatgcaggacctttcactatataatttttgaaaaattagatgtgcatgagctttacatgatgtgtatacatgttaaataagctaaggcctggccacgcccataatcaacacaaagtccaccttaggatcggaaataggttatgggcaaaaataattttttaagctcatactatatagagataaatgatattttaaaaattattaaaaaattatatatatattttgtaaaaattattttttttatttagactcctaaaatgaataggccctaggttgggatccagcccgcctatgcctaggaccagtcctgatccacctacaatttaagagattccacctcaaaactatatagtaataaggggagtagctctttagccttatacagtgatcaactgtttttttttcatcaaaatgtgttattgggaaagatatataagtaattttaagaccatctctaacagtgacgaagccagaaatttaattgagtgagggcttgaataaatattaagtcaaaactaataaaaataatgataaatgtatctttcaaattttcatcttcaaca

SEQ ID NO: 66167 - DNA, 929 bp, Cannabis sativa
gcttccctctccaagctaccaaaccttaggtccctccggctggaccggaacaaattaagcggatcgatcccggaatcgttcggagagtttaaaggggaagatttttatttggtcttgtctcataatcagctctcgggtaaaattccagatttgttgggaaaaaagaaggactttgctaatgtagacttgtccaggaacaagcttgaaggtgacccgaatgcgttattcggatcggataaaactatccagtttgtagacctgtcgaggaatttgctggagtttaatatgtctaagattgagtttcccaagagcttggccacgttggatcttaatcataataagataattgggagtcttcctgtgggactgaccgcactggatgatttgcgcggtttcaatgtgagctataataggttgtgcgggaaaattccggtgggtgggaatttgcagagcttcgaggacacgtcgtatttccataaccgttgcttatgcggtgctccgctacaaagttgtaaatagtaaattatatattgactttggagaagtactaaaatattaattcagtgcaattatatatatattgaatttctgatgttgggtgtcactatatttgattacacattattgtaatggatgagaatatatattccattagttgtaatttgttttatgtatgcaaaagttgatccaaatcgtgtgggagtacagtaagctttcaccatcaattgcatggcgcattatttgttttatgttatgaaggatgttattccaccgattttatttctcacctttgtttatctggttgaagcaatcaagagatttcaataaaaacatataaacgaatgaattactattgaatcattatatcattaagattatccatcacttctaatatttacacttcataatttgtataaataatgtaggac

SEQ ID NO: 66168 - DNA, 1116 bp, Cannabis sativa
  modified_base (582)..(604): a, c, t, g, unknown or other
aattgggagtaatgtttaaaaacatcctggtcagactttgtgagccaattctttatttggtctattacacttaacagagatttgatggtaactttagattttgcagatgtattaggagtaatggcacgaggtatacatggaagctctgttgttaatatagttttggtcatctacaataatgtgtgaaatgaataaaaatatataaacgataagaacataaatataaaaagtataaaaagaattacaaatttaactaaatgaacaaggtcgcacgtggtatgaaaatatatagtgcaaccctatacgattgtgtgcgaccttagtggttgtttatggttgttcagagaaaattcaagttacatagtgtaaattcaaggtcgttcatatagtcattcagagcaaattaaagttctttaaaattggttgaagaacataaaagactattatggtcgcatagtgtaaatttaagatcgtttatgattgttttgatcaaattcaagttctttaaaattggttaaagaccatgatggtcgcataatataaattcaagattgtttatggtcgttcaaagcaaattcaagnnnnnnnnnnnnnnnnnnnnnnnataaaagactattatggtcgcatagtataaattcaaggtcgtttatagtcgttcagattaaatttacgttctttaaaattggttgaagaccataaaagaccatgatggccgcttaatttaaatttaaggttgtttatggtcgttcagattaaatttaagttcgttaaaattggttgaagaccatacaagaccatgatggtcgcataatgtaagttcaaggtcgtttatggtcgttctatgcaaattcaagttctttaaaattggttgaaaaacataaaagaccatgatggtcgcataatgtaaatttaaggtcgtttatggtcgttcagagaaaactcaaattctttaaagttagttaaataatataaaagaccatgatggtcgcatagtgtaaatttaatatagcttatattcagagcaaattcaaggtcttttatccataaattacaaaaattaaaattataacccaaaagaatataataaaatatatatatgttacatgttcatgttca

SEQ ID NO: 66169 - DNA, 640 bp, Cannabis sativa
tttgtaagtataaatattcacaccgtgtaaatttatgatcacaaaaccaccataatggtcttttatgggtgtaatttgctaataatttcttttagcaaaaatctaaaaaaactaaaaatgaacaattgtagagaaaacaaaagtatcctcactgcacgtgaaaaataaaataaaatgaaagctgaaaacaacccaaaaagagcctcattgactagtttgactctcaagaaaaaaaaaatagccatcataagggatgagagaaaaaccaggttgaacaccgaaacacaagaagaagcaaaacaagaaaccctaaatactcaaactgatctctctctctgtctcaccctctctccctctctccctctctccgagtcaaatcacatattataacaatcatgttcaactctgttacagtggtcagattacattttgctaacattgcagctctagatctagaaccatatagttttgctttacactaaatataacagcaaacattgttagtctatagtatatccaaaataattgaatctgaatattattggaagtaataagagaatgaggactcccaacgttattcatgtcataaaaacaaggatttattatttttactttttacttacaccatgattcaacatat

SEQ ID NO: 66170 - DNA, 2042 bp, Cannabis sativa
tcttcaaaaaaataaaaaaaataaattagatattagttgaggagtatatcatgcataacaacaacaataataataataaacaggccacatataaagtaaaattgtaatttctctttaatttcgcccgtacaaaccctgttattttcttaaacaggccacataggtctagatttttgatcattgggtttagacagaaacatgtagtatcagttacttccaaattttcatttaataaatttaaaacagagtttgtacggacgaaattagagggaaattacagttctacagacattgggtatttatgccgttaaaaataaacattaaatttatgtcgtttacaaacttaaaactttgagtacttatgctgttatttaccctttaaaaaatacccaaaaaagtaaaataaagactaaaacataaaaataacatgttacacttgcctctttctaatgcccacatcccacatccaacaccccctaaatgtttcattagaggcccttatccaaatccaaattgaaagaccaaaattttccttgttgaagtggggcccttttatactcttctctgtttccatgcaaagccaaacaacctccctccctggtttcgtcataaacagcatatctaacaagcaaccatggcgatatctgctctgagcgtttccacaccaaaaatctatacccatcacagcattaacgccatagctgcctcgaaaaggcccaattcattttgttcatccaaacctaacgtaaatgccgctacgaagctttcttggtattccaatttcgcgcttgggacgaagaaatgggttttcgatgttggaattgggattttagcagcctcggttgttgccatttcacctttggacgccgaagccacaaggattgagtactacgccactgtggcagatcctccatgcgacttcaatttcgctaattctggacttggttactgtgaagttcaaccgggcactggtgtggaagctccttatggggagctcatcaatgtgagtttctgagaattttgactttgaggttgtcagtttgccttatttgtgcttcataggaagcttgaacattttgttccaattaatgaagtttatcaatgctttcttaaattttaagtgttggtaatcctccaatatgtccttgaatttagatatttggtggaattgaagtatagcaaaacaattttagttttctattgactgtttttcttatgggcaacttaagtggcaaggctatatggattaaggccaactcaaattagcaagttgctaccttctacataatcactggtcattcagagctagggaacagaattgactgcataaaacacagaaagaaaacatagttagagttatacagatacctagaaaaatatatatagcccttatgaaaattgcaacaaaagaaataggactgttctaaattagaaaaaatgcttatccagggaatgcatttattaggatatgcatggttcaaatttgttattaatttacaagttgaggaattgacatcttcttcatttgactctgttaaaagaagtttgtcaaaaccagaaaaatctatttttctctatgtaacttattgtcacaattcacagagttttgtgtttgttgtaacctatcgaattcagtcttaataaatgctcggatggtactactacaaaatgtctcgtatagatggtttaggaatatggaaatgtatgctcatgagtatagcagatatgataggtgcaacattacagataccatgcatgcagtttttgtttgaataactacctttgggccatgcctatggaattatggcccttatatttgtagttattttctcactacaggttcattacactgcaagatttgctgatggaacagtctttgatagcagctacaaacgtggtagacctctcactatgcgcattggcgctggcaaggtgtggatttcttcaggttactctattatatatccaatttgaatgtaatgtcactttatttgatcaataatattttgtttctttaaatatcaatatgcatgtgtttgcca

SEQ ID NO: 66171 - DNA, 653 bp, Cannabis sativa
ctatcctgactaaactaacaactcataaattttaaactaatcgggtataattccaatataacacaatttcaagtaccgtgatagttctgactactccatcgagtttttccacggtcactaagcctgaaaatattttatttcaaaattagtatctacaatactctcatattccagtaaaatctccgtaattaataaattatacttactttaatcgttcactaaattcacaccaatttacctaagtaagatcataatcttactctattatcaaaataattacatatttaataaaatatgctctattaaatgtcatactatttttcgggatattatattaggtatttatgtcgcatattattcatatatattaaattagaaaataaaacagataaatgagaaaattatttcttgatgaactatcaaatatccttgcaatatttttgtaaattgaacggtttagaactcatatgcgatctttcacatctaccaccacatacaatgatcagaagttgataggattcaaaaaatatttcttaattcttgttttgcctccacacatgaacaaaaataatttacatgagagaaaacttaattatgccattaatatttttaggctcctaaatatattgtatatttagaattaagattatacc

SEQ ID NO: 66172 - DNA, 1328 bp, Cannabis sativa
tggtaaaatatattccaacaagttgtacataatgtattccatatttcaatattgagaaaatatgtgtcaaacttgactaatatcttgagtgacgaagccctagaactacagtcatatttgtcttatgaggaatagccagttcagatcctcgatacataggaaaaggtttctcggcacaagaccataacattggtcaaagtactgtagacgaacagtaaggtggaggaagccacctgggaatcagaattcggcatgagggctcaatatccagaaatttaggttagatttcagggacaaaatcattttaacggggggatgattgtaataaccgcatgattagaatatgaattagtagggcaattagagttaattacttttattttattattatatttgaatatgtatgttgtgggctccattttcaaaaaataggcattagagttataatttcacaataccggagattttattaaactctaagtgtattaattatgtcatatgtgaaatttaaaaattttataatttttgctcgttatacaatggaaaatataacgaatggccaattgattcacatgggtaagatttagaatccttttttagtagggcaatcattagtgatattagaatatcgagattaggcagaattatagtatttgaccattttacccctaagccatttaattacttaagcttgaggtaaggttaacttagtcattttgttttaagtgataagtgcattattccactaaatctaccagttggccattgtggacgaagtgataagactagtgttatcttttatttatcaaattaagttaagtagataaaacctaaactaagatcaagtcacctcttcatctttttctccttctccttcagcctcaaggaaaaaccagcaggaactaaaggtttctttaccaatttttgaggatttatagaagaattcaagaggtgtaacccaaggtataaccctagcctctttctcttaagctttttgggagtttttggtgaaattcaagcatgcaatttggtagtttggctctgcctgaactctaggtttaagggtttgttttctaggttattttttagttgactaagggttatttttgagttgattttggtgattagttttattgttgcaagtttgtgtttaataactcaaacttggctacaatggtggtttctaaatttctacatattttgaggttttatcacttgtaattggtctattgtgatgttattaggttttctggagcttagttttaagtttggggttgaactgggattgtttgaagactcttttcttttctgcagcaaaaaacggcagg

SEQ ID NO: 66173 - DNA, 3138 bp, Cannabis sativa
ggaatccatttatcaagtccactttgaatatgatggccattcccaactttaaaccgaagccctggaacaagaagttcccttccccaatggatactttgccatgtaagtgaaggcgagtgaccaagtcttgcttctaagaaggagttattagggaaatatctgctctttagaagtcgactgagtaaggatgtgggcatgtcaaaaattcgccaagcttgtttagcgagtagcgcttgattataatggacaaatgagcgaaatcccattccgccttcaaatttcgacttccaaagtaagttccatcttttccaatgtattttagatccatctttgttagtgccccaccaaaagtttgccatcatactttctaactgttgacagaaagttttagtcaatcggaagcaactcattgcatatgtaggtatggattggaccactgctttcaacagaacctctttgccaccaactgaaaacaatttgtcattctaggcgtgcatcaatttccaaactcgctctttaatgtggctgaacagagccttcttgtcacgaccagagtaggaaggaagaccaaggtatcgctcatggcactcactaattggcatgttgagagtttgttgaaagaacaattgtgccgacataggagtgtttggagaaaaagacatgaccgatttttgataatttatcatctgacccgaagcttgatggtagatgtcaagagccttttgaattgccaaagcagatgcttgagtagtttcacaaaatagaagactatcatcagcaaaaaagagatgtgagattgatggtgcttgcctagtgatccgaagtccttgtaagctgccagtagcttcttcatgttgtaataacctcgaaagtccttctgagcatattaggaacaaatagggtgatagtggatcgccttggcggagacctcgtgtaggcttcacatggcccgtcgtatcgccatttagtgcaaaggtaaggctggatgatgataaacacttaaaaattaagtccgtccatgaccttgcgaaccccattttgtccattacagcccttaagtaagtccactcaactcgatcaaaagccttactcatgtctagtttaagggcagagaaactttttttaccctttgtcctatgttgaatgttgtgaacaagttcaaaggccacaagcacattatctgtgatcaaccggttggagagaaaggcgctttgagtctctgatatgacaagaggaagtgcttctttgaatcgcataacaatcattttggagatgatcttatagatgacattacataagctaattgggcgaaaatcagccataagagaaggtgtattgacttttggaacaagggtgatgatcgccttattaattaagtccatgtcaagaccatgattaagaactcccaacaccacatctataactgaagggccaacaatatgccaataatgttggtagaacatagcagacatgccatcacaaccaggacttttatccggactcatagtcttaagtgcagcaataacctccacatcagtaaaaggagcagtgagtgactcattgattgctggtgtaattgaagtgggaatgacgtctgtaacttgcgtaatagcagtcaggtttactggtgtagaagcaaatagatttgcaaaaaaatcagtaattctattggacatcccctccttggaagttatcttggtaccattgctgtctaagagagatgtaatccgattggtagcctttcttgaggaagcatgtgcgtggaaaaatttggtattttgatctccactccgaagccaatcaacacgcgatcgttgttgccaatattgctcttcttgttccaatagttcatccaaaatgttttcagatttctttaaatcatctatcaaagtctgtgatcttacttgttggttgttcaaccgtgtgacttgcttttgagctttggaaattttttctttcatattgccatatgttgaaacatgccactgctgtagagttgatgagcaggctgcaatttgttgcagaaatttgtctatggctgagtttcctgatgcgtgggacagccactgctgctcaataatgtttgctgcctgttcattaccaagccaaatttgttcaaacctaaatcttgtgcgtcgatgatgttcttgctgaactgaagttgtggcagtaaccttgacaacaatagcacgatggtcagagttatagtagtccaaatgagtagtcacaatcgggttgaactgtgttgtccaagaatcattgacgaaacaccaatccagcctttctttgatcgtgttcactgtgcgccttcccttgatccaagtgtacgggtcaccttcaaatggcacttcagataagtgacagcaactaagtacattacgaaattgttccatttgatcctcattacgaagtgatcctccaattttgttgtcattagaaaggatctcgttaaaatcaccaatcacgagccatggagataaaggtgaaacatctttgagtcttttcaagagagtccatgtttgtgaacggagttgagtgcaaggttctccataaaatgcagtgaaatgccattttggttggtttggagaggcaatataacagtcaaagacacttttattataagttaaaatagatacatcaacatcatttttccaaagcaacatcaaaccacctcctaacccgactctaggaacttcaagcccattattgaaatttaaagcattacgaaatttagtaattacattaggtcctaatttagtttccataagaaagagtacatgaggagattgctctttgacaagcaaccgaagatgacgaaatgcgcttggattccccaatccacgcgcattccagcttaggattttcatggttgaaggcggggctgagcctcagccgccgctgcattgtcatgtgaaccagagaaatccatgtcgacattggaaatttgctggttttgatcttccccagcagacaaagaaggggaaaatattggttgttgcaggcctctgcacctcttgagagtgtcacgcattgaacctcgatcagattgtcgtttgaagcttcggttgggtgagcaattctctttcccataggtagctgctatagcagaaacaactactgatgaggaagccgtggcat

SEQ ID NO: 66174 - DNA, 702 bp, Cannabis sativa
  modified_base (34)..(34): a, c, t, g, unknown or other
acgtgattttgcagttaactctgcatagtccacnagtcaatcttattcagatttttctaatacagaactagggttctttacaataagtgtattttattttctctaaggatttttcctccgtttttctgtataatctgcccctatttataataacataggttggtagttgattacattcaaattcaaatcccacaaccatattttctcaaaattgtgggccttaattactctccacgtaaataaatgcaatattatttgaaaatcacatagctatgatttaaactgcttttaaagggaacgctgatgtggattaagacacattgaaaaacatatctcgtcaaggcatctcgcttagtacatgaaaaacttagttcattcataagtcttccagcaattgcatgagcactagtgtactggcaaacttaagaactgctctttgaccataaggccttacagactggacaatcatgtcttgggagttctcaatagcaacaataaccctggcagcgagctggagcttaccaagagtatgccttcccatacatagcgagatggatgtctcgctatgcgttatctatgtcctccttgggattatcccttcgaacgcaaaatggtttcccatcaatacgccaaccaatagtttgcacatccttatctcgcttaagaccgtgcagtcagcgagttacaaatatactctattaa

SEQ ID NO: 66175 - DNA, 1041 bp, Cannabis sativa
  modified_base (312)..(314): a, c, t, g, unknown or other
aaacctttgagcgtagtccacccaacaggccattcacttaagagtaaatcttcattcagtacttagtgtggtcgtccgacctggtactttattggtagtattttcttaaatgttcattcaatattttcatcatacttacctaatttgtatgccccggattcgagaacttcaaccacttgatacggtccttcccagttaggtccaagtacatccgtcgtactgtctttggtgtttaaaaatacccttcttaggaccatatctcccacgaagaacttccttgccttcacttgcttgttgaaatatcgagctacnnnttgttgatgggccatcaacttcaagttcggagtggctcgtctctctttgatttcatcaagtgattcggctaggagtatgtgattggtatcttcattgcacatcaatcttttgtgggatggtggctcgagttctataggcagcatagcttcatatccgtacgccatagtgaattgtgtctgtccggttgtcgttttctcagttgtctgatatgaccatagaacttcaggaagttcttctggccaatttccattgccatcttcgagttttttcttcagtgtatccttcaaggtcttgttgactgcttcaacttggccattcgcttgaggatgtgccactgcgaagaaacttttgatgataccatggttcgcacaaaagacagtgaaggtttggttgtcgaactgcttgccattatctgaaactattttgtacggcagtctgaaccagcagattatgttcttcccaataaagtcttgaacgttctttgatgtaatggttgtgagtggttcagcttctgtccacttagtgaagtaatcaaccgctaccactgcatactacactcctcctttgcctttggataattatctgatcaagtcaattccccaaatggcaaaggtccacggactctgcatctgagttgattcgttagatggagctcgaggtatctttggaaatctctggcatttgtcacatttcttaacatatgcttttgaatcttcaatcatcgtt

SEQ ID NO: 66176 - DNA, 1023 bp, Cannabis sativa
tattcgccattatatatttagggtgtttataagaattgtgttctgttgattaagattttaagactctatgctatattgtttttctataaacttgaaaaatctagggcttcaatttcgttgcatgggtattatttgttgatagtttgttgttagagaaataatttggtaagagatattttgacaatgaaacagacatagttgtgcaatagagagagagtttgtacatctctattgtacaagatatttgtttaaattttgttaatttgtagtaataatcactcgttccccaaaaacaacttttatattgaaattctacataatagtggtgttgcgataattgactaaaatacggattctattcaattgaaatttatgattaagctactcttatggtgtatctgttatgagattagtattcagttttttagacagataatattggttaaatcgatttatttatgataataacgtgggttaaaatagttaaaagagtttcaagaagaatcatcatcagatttcttcgcttcttcctcaactttcttccctttacaatatccaagaaagccagcgtggagttcgtccttgaggtagtcaaaattttctttaggatttgccttccagaattcataataaacctccatattggctgtttcgtactcttcaacctccttttggaatgtctcctgctcagaaccaaaggattcttccaaggaaatcttctccctaggctccttggttaaattctcggtcaactctctaactttggcttcttgattctgaaggagtgtgcgaagtccttccctctcatcggtcagagcctgcacctccttggatactgccttaagatcctcctcaagcttgactctggatggtatgtcctttatctcttactttaaatcatcaatggacttattcacagcaacgagttgcttattcactttgcccagttgatggctagaatattcagcatctttatgagcctcttccaatgccttcttcaagtcaatggggtcatggtagcct

SEQ ID NO: 66177 - DNA, 4382 bp, Cannabis sativa
tgaaaataaaatgaagaagaagaagggaagaacaatggccgtaaagagagtaatttatcactctttttttgtttgtttttgttgttaaaaaaaatcaaagaaaccgccatagacgtgacaagcccaattaaaatcaaatttttttattatttttttaaataaaacaaaaacttcttgaggtgacaaatagcaaaaaagggaatataaataatttcatactgtacacagtatacaatatataaaatagacagtttaaatataaatataaacatatgaagtataaaaatatcatgtaaattgcccattaattttgtgttattgagttacatgattctttgttgggattatttaaaaaaaaaaaaaaaaaatacaaaattacggttgtataggatttaaattttatgatttttaagattttatttacgtaaaatatatttttttgatgttttttgtatgttatacttttgttatttaattattaattttttgttatttgtatattatttttatgttattttgatattatttgaatgttgttttcttttattatttttatgtgaattttttgttgtttgggtattatttttatgaataccctaagaatgtaaaaaataaaatctttaaactctaaaaattttaggaatttttacaaaaatattgaattttagataaaagtttacaattttactgtcatacagaattttttacaaaaatactatctttttataaaataaccgtaaaaaacaaaacagaataattaaaataatagtgaaacaactaaaaattaacagtggaacaatattaaaaatttaacacagtacacagtataaaacttatacaatatttttgaaaaaaaattctgctccacagtgaaaggtaaaaaaattaaaaatttcagtatgtagtgtaaaaaccacaaaattttacccaaaatattttaatttttacctttttactttacatattttaatttttacttttatttctatattcattgagatatacccacttttatagatgatatcttcataataccctttaagttaatgaaacttaatagagagtgaaggtaaattgggcaacccactaataaaagtgggtacattttaataaaatataataaaagggtatttttaattaatagataaaaaaaagtatttttgaacttattccaaatagtaatttttgtaaatttgcgttgtgcttaagcccaagacgggtagcccataatgataagcccaaacctattttgtgagtgtttcatatgttcctttacaaacaaacaaccactgttttcgttactctctcaactcaagtctctgtctctctttgacttctcttctcttctcttctcttctctacccatttctttagggtttcatcacacaataatatctgacccctaacctagattctaattctcaactctgatcggagaagaggagttccgttctgttgcgggatcggtgaacattggttggataaacaatcgtcaatttactcaaagtcaaaggtatgaatttggggcgcttctaatgaggtttggttccggaactttaggtctctgattcgttgtaatgttttttctttcaattttgtagataaatttccaattacgcgtggaattcgctcaaaaaagaaagtatcaacagagagagatggaagacgatggtagcagcggaagtagcagtaacttggacactaataagtcagagagggcggtttggctgatgaagtgtccggtggtggtggccaaaacatggcagtctcaccctccctccgatcctcaccctcttgccaaagtcgtactctctctcgatcctcttcaatccgatgatccttcttctctccaggtagaaagttagggctttgatgctcccttattaaaagtttcttttttaagtaaacttagtaaataaaaaacgtaactttaaaaatttaggcttgtaatttgttttcagtttacaatggaaatggctggtgctgagtctggaaataagcccaaaagttattctttgaatatgtttaaggactttgttcctatgtgtgttttctccgagacaagtcaaggtatttcactagtttttatttgtttttgatgaaccgtcaattgatattagttgttttctctagtgtgatgttgatgatgatgatttggtaaggagggaagataagaatttttgattaggtgtgtaattagctgaaaagaatggtgttagaagcaattagtttctactaagagtaattatgaccaagttcttgatcgttttctctcttgtgtgagaatagcattacatgccactttggtggctatatactactgtatctgatgccttagtcaatctacagcaactaacatatcctctttttcactgcatattaatataacttagatacaacattttgaggctgtgtttatatttaaaagttttattgctccattccaccattttcttgtgcctctttaaaccgtcacctacttttatattcaattttaggtggtaaggttgcagtagctggaaaagtggaacacaagtttgacatgaagcctcacggcgaaaaccttgaagagtatggcaaattatgtcgtgagaggacgaataagtccatgattagaaatagacaaatacaggtaacttcgcttaactttcaatttgttttgctgctactaatatttcactatggcttgtgacaattatgttttcttctatttcaacaaaggtgattgacaatgatcgtggagtgcatatgagacccatgcctgggatgattggctttattacatctaattccaaggtatgtcccaaactgataatgttgctttccatctatgctgcatttgcttaatttgtcattgtagttagtattggatatagaataaacctttcaatgtttccttgggcaacccttgctgagattggccaaccaatcagccctattagtttcagggttatacgagctggtgtggcgtagatataagttgataattatattgcttaatatatcccatgctttcaaggaataggggcatgatattttcaattcacttaacatgtattacaggataaaaagagaacagctccagtgaaacaatcagaaatgaaaagaactagaagagatcgtggggaactggaggatataatgttcaagttatttgaaagacaaccaaactgggctttgaagcagcttgttcaagagactgatcaacctgcggtatgtttgttgataatgatttgcgtatttaatattttggggttatttcttcatcatgtcaaatacagtattaaagtttagttttgatccaaaaggggttcaggactatgctgttaatgcaacccaataaaagttagtctaatcaattgttttccttttgttttgtacagcaatttttgaaagagatactaaatgagctgtgtgtgtacaataaaaggggaactaaccaaggaacttatgagcttaagccagaatacaagaaatccgttgaggattcaaatgccgaatgagtcaatttattttatatgtacgttttaataactagccatcttaccttgggacgaaagagtgtgggaaacgaacctacatgttaggttatggttataaatgaaccaaaaaaaggaagggaggaaccccatgttggtttttacatccacaatattaagttataactctgtaacataggttgtatatctgagttggtttttacattcgtattattaagttatctctgtaactgtagggttactggtttgtaaacttcattattaaatcttcaagattattttattaactatcattatcggtagggatatttgtgacagaggtatataagttcttagtatttaagcacttttgttatttttagagtgaagtgcattccatttatgttttagtgccagcttattgttcaaactgtttaagtcttttattttttttacgtataaggtaaaaagtatccaattaaatgaatattttgtgaccaaattatagagatgtttgtggtgaaagtatttagttaaaatggtattatttttatttatttatgtttcggtatcaattcaagttttacattaaaagaattcttgaatataagtgttctacatagataggtgttcaaaaataaaattgtgcgggttcggtcttaaaacggacaatatgataaggtattaattcaaggggagcttagtgtatcaaaatatttaaggcttgtttcgaaagccatgtgagtaattgaagacaattatatacagtaatgtggaaaatttaattacgttttctaatttttatgggattaaagctatgtgtctaatttacctttttcattatttgaactttgatcaggaccgaatggatgtttccaatcggtctaaggtagctacattata

SEQ ID NO: 66178 - DNA, 659 bp, Cannabis sativa
aagactcagccagggactcctcacaaatttcagatcatcagaattagattcttccttaatggaattattcaaacatatcattctttctttcacatgtgaatcacaaaagatgttaggaacaacagaagttaaagaaacattttttaaatcatcctcactactttctgaatcatcatcactccaaataatattataaacctttttgtttcttttcaaagtgtttgcactttcagattgaatgtgaccaaaacctcacattccctgcgtggaattctcttttgattgttagtcacactgaaagttttttaaaaaaaaaagtattacctttagagaattttgaaaaattatttttgccacttatctttttcacgtatttttttaagtgtttagttaaaacaccaatctcatcatcttcttcatcatttaaaatttcttttttagcaacattagaagcaatacctttacctctatcaactgtggactttggtttgtctttttgcttgatttgttgattcaactcaaaggtatgtaaggaccacatcaactcctctaccttcatctttctaaaatcttttgcttcttccatagccaataacttagcgctgaatttgttaagaaggactctcataatttttctatcactgattcatcaagttttt

SEQ ID NO: 66179 - DNA, 559 bp, Cannabis sativa
atgcattacaggaagcatgcaaaccagaagtaggctcagattggcataagattgctcatgttcccaatcgtattattggtgaagctgattagaacgaaggaagaggtatgcatctacttttgttgttgatgtatacatacatacattacatacatatggtatggtatatactcatgttccctgttccattcatgtttgttgatattaattagtattttataacatagaggaatgtatagttatcatgattatattttttttgttatgctaatatatgtatgtttgtgtttgtgtttgtgtgtgtacaggtcctcagttgttttccctaaagtgattaacttcatgaagttggtatctcttttgtcaacatgttcaactaagatttaagtattgtgcttacttttggtattattttagcgcatgaataattgttgctactatatttttctatttgatgttgtataatgtaattattgctttatacaaacctcatgtgttaagatgaaacaaatcataggcaaaataaaataatgtttgcaatttaataaccaatatattc

SEQ ID NO: 66180 - DNA, 898 bp, Cannabis sativa
ctgtcgtcaaattaacaccaacagtcaactgttgccaacacgctttggcaaaagagcaatccaccaagcaataatagatggtttcatcagttactttgcacacatggcaaatgatatcaacaagcaaacaagttaggggctttaggcaaacaaatttaattgattttttgtacatttgaatttgctctaaaggatccctaagtatgattgttactcatgtctgtctcaagttaattaggggctttaggcaaacaaatttaattgatttttttttttattttttcgtatatataatggttaaaatttaaaatgtagtattataaaatataattgagaatttttttctcaaaaaatattaaatttggtattttaaaaaataaagtatgtaattttttagaaaatagctatatttttcaataaatcataataaaaatatataaatagtattttttaaaaaaataaatttaaattctttttgttaaatattttttggccttggttgtgggcccctattgccccacccctaaatcgatcttgttgttactcctaattaactatgcaaaccaatattttactcgtaattagggttaacatgtgttaactgcaagcatagttaaagtcccatgacttatcttgttcttgtacaacatataagcattataaacacaacacttatatcttcctcatttcatacttttcataattttatatactatctggattatttgttatctggtttgtacttgagaaactaaatccatcatacctatttgttcttcaatccacgttattacaatttacaatgaataaaaataccaagtaaatgtaggtaggggcggacccacattgaggcgaggtgggcagttgtcttcccgaaaaaaaaaatcaagaaaaaaat

SEQ ID NO: 66181 - DNA, 515 bp, Cannabis sativa
gttataaaattgtaaaaacttaaaaactgaccataaccgaccgattttcacccctaattcagggggtagccctgatttcctccttggagggccttctaataagctcagcttggtcgtccattgacaacctatcctggattaagtcgttacaattaagtatgttgccattctctgtaccaatgaaaattccttggaagaactccatgaattcattgccaattagctctcttttggtgatccacatattgtctttattgaggatgctcaccaagtttttataaaaccaacactactacaaaaaggggtttttgcgtcggtcaacgcgtctggtcaatttcattgactgatgcaaaagttaaccctcactcttttacttcgattgttaactgacgcaaataataattaatttgcgttggtgggtacttcaacaaaacaaagatcgtcactaaagatgaaatttaaaacaaaattgagggctcgaattttacgtcggttttactcaaacacagtattta

SEQ ID NO: 66182 - DNA, 652 bp, Cannabis sativa
agagagactaaggagagaaaaaaatttcttttgttttgattttgagatgattatcaaaattatctttttttatgtaacaatatcaaccaactaatataggataattgtctagaaaaattgactactccaactagaattaacttaggataaaaagactcagcaagaaaaataacaatgaaagcacatatattaatgaatatttagattaggatcataatataattaaacaacaatgttcaaatagttgtataataaaacaagtcgtatttgctgcttcataaagtaatcatctttagtattgtctaacaaaacaactatgataccctaacccatcatccttatatttcattgcctaataagtcaatgtcgaatgtcggtgccctagcttggcatccctatatcacattgcctaataaggtaagtcgatgtcttaacctggtatccatatatcacaatgcctaataaggtaagtcaatgccctaactcggcaaacatatatcacattgcctattaaggaaagtcgatgccctaacttggcatccttatatcaatgtcattgtctaataagaaatctaaccacgatttcagttaacgtcatgaccttaactcattttaacggtaatcatcattccattacctcaatcataatcga

SEQ ID NO: 66183 - DNA, 1031 bp, Cannabis sativa
ggtgtaccagagtccctatcctccgaacaaactcactgaacccagtcgagctagggttctactgagtggcactcaaccgttggtagtacttacactatcactggctgtgtttatgggtcccgtgacacatagtatgtactcaggtttgttgtggtgtaccggagtccctatcctcctaacgaactcactggacccattcgagctacggttctactgagctgcactcaaccgttggtagtactcacactatcactggcggtgtttatgggtcccgtggcacatagtatgtactcaggttagctgtggtgtaccggagtccctatcctccgaacgaactcactgaacccagtcgagctagggttctactgagtggcactcaaccattggtagtattcacactatcagtggcggtgtttatgggttcagtatgtactcagttcatcaatagtatactggagtcactattctcctgactttattaccgtagtcactttctgtctcaaactactactgtattcataacattaaactgtttttttttttttattaaatatctatatttgtatagtattcaaaatattattataatctttattccaacgattaataccttaatgtaatcttaaaaaaattattgtaatatttattccaatgaataatattttaatggaatattaaaatcctatttaataataatattgagttttcattatttgtaaacatcataatttaatttcttattcatttggccacacatgtttatttggacataatatcaggatattttttgctacatgtgacaagtttatgtggccattgttgttgtttagggatgggaacaacatttcacttatttaaatacataatttttctaaccacaatcaaccaaaccataacaaaaccgatcatttggttggttcaaattacgtcttccaagaaaaatttaatagttggttgggtttgttgaacttacattttttaatgcattgaaaaaattagatttatattggggttatatcaccccttcttta

SEQ ID NO: 66184 - DNA, 509 bp, Cannabis sativa
ggttgaacctctttaaaatcttttgttctttactgatgattagttcttactttactttaattatattttctatcgcttactaactcatttcaagtgaggtcaacattttggtgctttctttgctatcaataatccaagtttgctctttgctttagatttaatcagacacacaagatggtggtgcaaactcgcaaaggcatggtcgatcaggttgatcaattagtggcagatcctactctgtagactccagggaatgaaaagggtcccacaagtcaccaatcctgagcaaacaaacacgcaaccacccaccataggtcaagatgtgacatcctctctagccgtgatcacaccttgtgtgcaagagactagaaacaccagtttggctgccaacctgggtactcccagtattggaatcccttcagcaaccaatgttcagacgatcatagcagataatactgagattctgaaccttcgtaatgctcttcgacttatgcaaggtcatactaata

SEQ ID NO: 66185 - DNA, 629 bp, Cannabis sativa
ctgacgatagtttgatttttatggatgctgatatggggagttgtcagcggttcaaaggacttctagatttatactcggatgcctctggacaattggttaactttcataaatctgaagtgtgctttgggagaaatgtggatagggggttcagcaacagcttgctacttttttgggggtccgagaggttgaacaccatggtaagtatttgggattgccttcttttgttggaagaaataagaaggaatttctggatcaaatcaagaacaaagtgtgggctaagatgaaagggtggaagagctctttgttctcaatggcgggtaaagaggttcttatcaaagcggtggttcaagctattccgacatatgccatgtcttgttttcggttatccaagaagactatttcaagtattcactgaatggctgcaaggttttggtggggatcttcggataaggagaagaagatacattggtgtaagtgggcacatttgtgcaaaccaaaggagaagggtggattgggcttccgtgatttggggttgtttaatcaagcacttctagccaaacaagtgtggagatgcattaggtttccagataacctgtgtagtcaagtgcttaaagcatcgtatttcccca

SEQ ID NO: 66186 - DNA, 1502 bp, Cannabis sativa
ttaacaactatttcattctcgccattctagcgagaaggtgtggcttagaagtctagtccagatttgtgagtcaatattttggtactttcattgagagccacagctcaagaaagttactagcaagatggttgcaacatgctctacaagtgttgatagagaaatcccaacaactggccaaataattaggggcatgccaattgatggagttggaactaaagccactcatgcgccccaggtgccaagagcagacctcaaaatcggctccacaactcgtcctctaaggccacaaaacactcatgggacaggcaccaacattcaaatcccacccggggagcctcatgtggatattgatgatcctgaggaaactgatcctcgggttacccagctcagccaaactatggctaacttacaacaacagctgggagactctctagaaaatcaacatgaatagttttaacactggttcgtggaaaactagaggaacattgaaagccaattagctgagcaggaatagcgacaagctaacctatctcaacagattaagagatatagtgagattgagagagagagagagagatagagtcaaaaatagtagttacggctcgggctaggctgacgcgtgaagggcagagagtagggcctcgagtggacgacaaacggctagcctttgggcttcgagtggaggggatttcgattaggattgagttatcttagagagagagagagagagagaaggaaagaaaaatgagagagagaaaagaatcgggttgggattttttgggtcgtcaagtttaattcagagggtggtttggcctaggggtggtcggagaacggttgagctatggctctgcaataatgaacagagggagagagtgggagatgcggttgagatagggaattagggtttctagtttttagttcctaatttcaaattatttttaattttttaattttttaatttttttaaataattatttacgtggactaataaaattatgtcatatgtacattgtgtccacatagataacacactgggtatacgtggatattccaacatgacaatagataaaaatattaaactgctaacagagagaacataaattttaggggttttaccgtcaaaattttagttttaaggattaatttactagtgaaatgaaagttttaggaattttaccggcaattaacccaatcaaatataaaatacatcaatccaacaaaattatcattcataatatattttttattaaaaaaatgatgcaaccaattaacataattactaataaatatacatgtgtgatataaataaatatatattatacatatataatcattaaaaatttgtaaaagtagcaaatattatgtgttttttctttttgttttatatatgaagagataaaaattattaaattaaataataataataaatctaactcaatttgtatcttttaagatatataaaattaatttaaatttaaatttgtatcatatttaaatttaaa

SEQ ID NO: 66187 - DNA, 745 bp, Cannabis sativa
gtccaaaatagtatttatccttttttaaagtaccaaattaagattgtaaactatacgcaaattaaactctacaaagatcaaactaaatatttaatgtaaaaagaataaaataaataaaagaaagagagattaattaccttactcataatgattaccactaacactattttttctttttttgaaagaattaccactaacaacattataaaaaagaaacaaaaaaattcgcttggtgtagaactgtagatatttagctctttattttatttattgttaaaggatttcaaactataaaacaaggtaattggcggtgatcctattttctcgtgttttaattttatatacttaatttttttgataatatttttttgtagaaaatctctgataatatattaaaagtaaatatcatatataagatacatgagctactttttttattgtcaattagttttgagatatagcactttatgcaccttaccatacactcacctattctactaccttaaccctacactttcacattctaacatagtattagagccaaattaaactataacgactaatcgatccaaatccaaacatcagtctaaaaagacgagtcaaagtagccgcttgtgattcgaggaaagtgagccaaaaagagctgcagtgaactaagagtcagggccggccctgaaacaaagtgggccatagggaaaaaaaaaattttgggcccttatgttagaaaaaatgtggtatttttcaa

SEQ ID NO: 66188 - DNA, 1241 bp, Cannabis sativa
gagtttggaccaagttgccgaacgctgccatgcccctgaagatatcgaaatgatttacaagattattgcccatatggcggcaaatgacagagcagtgatcaccgaaggcacctgcggttcgccaaggggcttcaaagttttccttggggagtgtaatatggacgatcagtcatttgcttaaattattttcatttggtatgcatgccatgctgccttagttttctcattctattttagcgaatcaaagcaaaattaacttgaataaattaaagtcttattttgtcattagaacggttttttggcatgtgagacctaataaatagaatagaaattgggaagaaaaatgtttttatcttcttatgtaattttctctttgtacattttagttttggtttgcattttctttctcttgttttttaaaccagtgagaatgaatataatttacaccgggttttctttgttgataaagttagagttgaaactctccatccttatcttctgaaggtgataattagactgtttagcaataagcaataataattgaaaatgcttagacttgaagaatttgtaatgatacttttgtgctggttattagattcacaccagttatgaacttaaacacagttatgatagtgaatcattattatttccattaactttgaataatttgattagagattggtaagttttcccatttagactatatgatagtgatttgattagattgctaattagctacataattttatttggtaattatttgttattgcaacaagagaagtcgaaaatctggtaaatggctcaggtcctgtctcctggatacactgctgcgatatatgcagtgcgtggtaatttgaagcccgtagtttttgaggggtatcaagtaggtggtgttccttggggacaattattgacaaggtggagaactttcctgggtttgttgatggaataattggtccagatttaatggacaggtatgatatagaagtactacagagtcaaactacagtcttttgtttttgattttatgcatatgaaagtatgaagcagacacttggattagaattgtatttaaaatcttggcaatgtgagtaatctaggatgcggaagctgagcgttggggagctggagggttatgaaagttaaccctttgacaagccaaagtagtgaagtgttaggtatgttgttctccccaaaacaaatttcacaatcttcttaaatgatctcctataactatgctc

SEQ ID NO: 66189 - DNA, 685 bp, Cannabis sativa
gataatttcatgaatggaaagaataaaatgcaatactctgaaaactataactcaaatatgataaagagatgattaaaacacagggaatgcataccttcaaaatcgttgatttgcttagtttacccagaggcaatttatcagcattgtatcctataataaaataccaaaaatatgtaaagaatacatgtccaaaaaagaaagaaaaaaattaggagagacaagatccaatcaagttctagtgaatcaaagaaactggggagaaaaagaaaaacatccagttgaccattgcccatagtttaattatcacgagtcatgaccgtaacataattgcagaatactattagctgaatcacaaacctatttccatcatttgctgtctcatcatgctgacattgcaaatcagagatataaatttggcaacacgtgcctcaagtttggtattccgggggtgtgcttggatagcagagacagactgttctttcacctgacaatgaattaacagggatcaagaaacaatagggaagataacatctcctccccgccacacaaacccacttcccagcgtgatttgggaacaagctcttcattcaaacaaaattaaccaagttttaaatgtcctaaaattaatgagaacaaagctgaagagtagttcttctgataagtacattcacaaatgctgtccttc

SEQ ID NO: 66190 - DNA, 1882 bp, Cannabis sativa
  modified_base (1021)..(1021): a, c, t, g, unknown or other
gttgttcctcatatgacaagtctgcctaaagttccaatgcttcataactcagaatatgggacgagtctgagacatacttccgaagcattgaaacgtggaacacatcatgtattgctgtcagcgctgggggcatagccaacctgtatgctacttcccctatcctctcaaggatttcaaaaagtccaatgaaccttgggctaagctttcctttcttaccaaagcgtttaatgcctttcatcggtgatatttggagaaatcccttgtccccaatttgaaaatcaatatcccgacactttggattagcataaattttttgtctactctgagccgcgagcattcacgctctaatattgccaacgacctcacttgttctctgaacagcctcaggacccaagaactttctttcacccacttcatcccagtgaatgggcgatctacactttcttcatataaaagttcataaggggccatcccgattgttgccttgtatctgttattataggataactcgatcaggggaaggtactttacccatgatccttcaaagtcaagaacacatgcccgtagcatgtcttctaaaatttgaatactcctctcggattgcccatccgtctgaggatgaaatgctatgctaaactttaacttagtaacatatatcgatggagactctcctagaatctcgatgtaaacttcagatctctaaccgaaataatggactttggaacaccataaagacgcacaatttctctgacatataacttagtataatggtcaatggagaaattcatctgaacaggtaaaaagtacactgactttgtaaacctgtccaccatgacccacacagagtcaaactgtcctgttgttctaggcaaacctaccacgaagtccatagcaacatcttcccatttccactctggtatgttcaatggcggaagtaaccctgtaggcctctgatgttcagcctttacttgctgactggtaagacacttagcaacatactcagcaatgtcatttttcatgnctggccaccagaacatggctttcaagtcttggtacatcttcgttgaccttagatgaactgaataaggacttgtatgagactcatccatgatctccattttaataaaatcatccataggcacacaaacacgatctccgaatcgaaatattcctgttacatccactgagaaatcactagccttcccagccgaaaccctatctcaggtttttaccaactctagatcttgcatttgtacttctttgattcgctctaaaagagtagattgcagggtaacattagccaactgccccacaaccaactcaatcttaactcgggtcatctcatttgctagctgctggaagatttgtttcaaagtatttatctaactctgccccttttactcaaggcattaggaactacgttggcttcaccagggtgataaaggatttcacaatcataatccttcaccaactctagccagcgtctttgtctcatattcaatctctctgggtaaagaagtatttcagactcttgtgatcagtgtatatctcacatttctcgccatataggtaatgccgcaaaatctttagcgcaaaaaccactgctgggagttttaaattatgagtagggtacctctgctcgtactcctttaactgtcgagaagcataggatattacctttccagcttgcataagcatacagccgagaccctgtctcaaggcaacacaataaactacaaacttagtcttatctgaaggaagagttagtactggagcggtaatcaagcactgcttaaactccagaaaacttttctcacaccgatctgtccaaacaaacttcaggttctttcgggttagttccgtcaagggtacaaaaatcttt

SEQ ID NO: 66191 - DNA, 2079 bp, Cannabis sativa
atagcacttgctatctgttaaattaaatatcatatcacaaaaatatgttattacttgttagatatatggatattttgtgtcatttttacattaatgtacacatatatataccttgatgccaaagagtttaagaactaatttggccatggaagaagtaaagagagcctcaagagaatgcttttttcgatcaatgatagctttagctttaagaatgtaatctatggggtcatcccttaaagaaatatcaaatggaaggagcacgtaaccaatccaattcccccactttgcttcagtattcttctccatcatattagctagatcctatatatattattaggatggtcaatgcatattattaattaagaactaattcatttctttatagtatgtaataaaatgttacaaattaataaaataagcattattagaactgacctgaattcctgctgcaggtctaaggtttatgagcacaacagatcttaggcgaatatttttgggaagattgttttgcttctctgttgatccttcgtcatcgttcctaagcttgcctacatatatttacacatcaccaacatacttcactcttataaatattgaaaataaatataatcttttttaaaaaataccataccaagaacctcaaatatttacaaataattaagttcaaatattttaagatatcatttactgatttatttattaaggttatttggtagtatttttttatttggttttttatttttttttaattgaaaaactgaaaatatttccgaaattaattatgttatataattttttttttatttaagaatcaaaattttgaaaactaaaaaaagttactttcaaaatatttttaaacaattttttttttattatcaataatttggacttcaaccccaacttagactttgggacctgaacccggaccccaaccccaaacctaaacccaaacccgaactcggatccaaactccgacccaaacccgaacccagacccggaaccccgacctggactatctcagacctcgaacctcgaccttggactcgatctcggactcagacccagacggtaccctggccctaaacccgaaccacagaccctagaccgggacttcagacacgaaccctgaccccaattccgaacctcagaccctataccccgaccccgacccccaaccctgacctcaacccagacctggcctcaaacctagactcggagcccattcctaatcccaaccccaaacctggacccggaccgcgactccgcacccgacttaaataaaatcacaaatgaaaataaaaataaaattataaatacatttttttcaaattgaaaactaaaagtaattatagaacatatttttatttttcaaaaataaaattttaaaaaataaattttacttttatttttataattaaaaaatttaaaaataattgttactaaacgccacaacactatttataaaattgataagtgatatataaagagattatatgatttaataattaaaattgtatttgtgagtagaggtggcaaaacgagtttcgacacgaattttacgggtagggtcgggaaaatcagacgtgggtcgaaaacgggtcgacacgacttgacacgaaataaaaacgggtcgaacacgatacgacccgcttaacacgaatacgacaagtttgacacgattttttaaatataataaataaaaaattaaaattaataataattatataaaaatatatatatttagtgattcaatattatattaaaaaattttaaattaatttttttaatatgaaattaaaaatattttaaatttattattttaatatgaaattaaaaatattttaaatttattatttttctctacaattctagcttcaataatagtaaaatgggttacagtaggtcaacacgaacacgatacaattttttatggatcgggttaaggttgagataattaaacacgagttaaaaaaacaagttgaaacgcgatgattaaaaataatacgattcaatatcaaaaggtgagagatgaaagaatataatcacaaatgtttgaagagttctaaatagcaatgatgg

SEQ ID NO: 66192 - DNA, 2835 bp, Cannabis sativa
taaacagaaagtaaatgtcagcatcaaatctaatcactccaccattagcaagggcaattgccatcactgcagcagcttccatgacccatgataatggattccacataaaaccaagaagtaaaatacatgatttatcattttacaaaacgaatttttctacaaatgttatgaatttaaatacaagaaaagaattctttgaacttattgatacctgtttttcgaggaacgacaattggggatatggattctacaattgccatcactgcagctattatcttggtttttgatttattggatcaaaaaaaaaaaaaaagaattggggatatgggtgccaacttacttattttaaacttttggattggaacccacatttctatacattaatataaatatattttttaaaaaaagaaaagaaaaatttcatcaaaatcccattacacattctttttttctttccctctaaaaattaattatccacaagctcctcccgttgcactatataagctctttaaatcaaaatttagaaatgtttttctctgttatagaagaattagattagataagaagatgaagcgagaagaacaagacgttgaggagaagaaagaggaggtagaaatcttggtactatctctctgttttacattatacattttgattttagtgatcgactctttcattttctacgtgtttcttctattatatttcttgaattttaattatagacaagtcaacaaaactattgaaaggaactaaatcggaattgcatgatctgaagcgagaagaacaagtcgtagaagaaggaggaaaatagatcatgcaaacagagaaaatgaaacatgcaattctgattcaactacttccaatagttttgttgacttgtgtataattaaaatccaaggaatataatagacgaaaagaaaatgaaagagtctatcactaaaatcaaaatgtataatgtaaaacagagaaatagtactgagatttttacctactccttcttctccttaatgtcttgttcttctcgcttcatcttcttatctaatctaatttttctataacaaagaaaaacacttctaagttttgatttaaagagcttatatagtgcagcgggaggagcattgtggataattatcttttaaaagaaaaaaaaaagataatatgtaatgggattttgatgtaatttttcttttcttgagaaaatacttgatggactactaacctctaataccaggatcttttttcttcttctttctttttgttgttctttttctttctgtaaaacatggcttcaaatttttctttttctttgtcagccatggttctgagatttgggagagcaaccctaataatataatatatatatatagaggagactgcagagaaatacaaccctaaattttttttaggaaattatatttacacctctaaaaataataattatactttattactaaatttatcctattaaatattattttttttatatatataactacactttgttgtatagttaccaaaataataatatttagtacacattggccggaagcaaaacctcacaatagaattataggcaaatatatgccattacgaattattggaatcaaaggtataaccccattacagtgtccgaaacagataagtttttttttttttttttgaatttaaaaatcaataattagttaattttacaaaaagttaaggaaaattttatttctagtcttattttaataatttttatttacataaaatttatatttttaattatattaagttttctaatttttttcttcccatttatattcttaaaaaaatatacagacaaaaaattaaaataaaaaatagatttttttatttatacttttataattaattttttattcatttataaaaataaaaacaatataatctgaaaatgaaaacaacataaccttaaaataaaaataattttataaaataaagtataacttcgaaatagaaacagcatagtctcaaaatagaaaaataaaaaaaaaaactaaaaacttaaaaaataaaagaaaaatgcagtatacatgataattctacaatgaaagagcttatataatattttcttaaaaaaaaataaagaaaaataaatatggtttagaaaaaagatacgaaaaaaaatcaaataattatcaaaattaatataaataacctgaaaaaaattaaaaaaaaaatattaaagtcttattttaataatttttatttacataaaatttatatttttcattatattaagtttttttttttttaattttttacttcccatttatattctaaaccgacaaaaaaattaaaatttatacttttatgattaatttttcaatttatttataaaaatagaaataatataatttcaaaatggaaacaacataattttaaataaaaactattttataaaataaagtataacctcgaaagggaaacaacatagcctcaaaataaaaataacttttataaaaataaaaaaaaaattaaaaacttaaaaaaaaaaataaaaaaatgcaatatatatggtaattccccaataaaatggattatatgatattttcttaggaaaaaaataaagaaaaccttacatggttagaaaaaagatatgaaaataaaatcaaataagcatcaaaattaatataaataatgtgaaaaaaaatattaaaagtaatttttttttttttaataatatctctatataagagatattattataatttagtgaagtatttccttcaaaaacatcttcagaggactaccccttttgaatggaaaggtgtatagatgattttgagtgaaatcggtttgaaacaaagagga

SEQ ID NO: 66193 - DNA, 618 bp, Cannabis sativa
aagtggcacgagaattccagcgagccaccacggggcttccacggtgtgcccacgtgaacaaataagccccgtctcccatgcccacgtgaacaaacagagccccgtccccccatctctgtggagctcctgcgcttgacaggagcttaactgttcagttgcgcctccgtatattactactctttataatttaatatatgtttttatttataaaattattgcacactaaatcaaattagttcacacattcaattactccgccccacttatttgtgtgatatatttatatgtatccatatttacgtaaacgtatattgttattttggtggctaataagcccacgctgatgttgtggttttaaattagttagcggtatcctaagttatttattaaataaaaatatgtaacacccgatattataataatacgacacttttttttatgatatttgtcacttgaagatcccttaacatttgtctatgtactacaatacaatgtgttacgttacaaatataaatattgtgtacgtacgtgtgtttaatattagttttgtttggcggtttactagacagaccatatattttgtatttttgtaggttagcgattgaagaatttggaaat

SEQ ID NO: 66194 - DNA, 1042 bp, Cannabis sativa
  modified_base (669)..(671): a, c, t, g, unknown or other
ctccaccacctctaccacctccaccacttcctaggcctcctatagtgtacaccaggtgtgcacctcctacacctcctccacctcccatttcatgtcatgtacctgcatcttcgtcatcagatccgaaaatcaaagatgatcttctcattgcactacataaaggtaaacgccgatgtacttttcctatttcttcttttgtttcttataatcatctctcctcttcttcttgcttttttattgcttctcttaattctatcactattcctaaaactattcgtgaagcaatgtctcatcctgtgtaatatctcggaaaatgtattgatattttaattggacatactttattaaatatgtaattaagtgggtattagagtaggattataatcctacttaaactaattacgagttgattaaggaaaatatgagtaaataaagcgtaatttattaattatggagattatattagaatatgtgggtatcatagataccataattcaaataaaatattttcgggcctggaactgtggaacttgacggggaggtcagaaaagccacgataataaaagatgaattgaattgaaattttaagttgtcggtttgacggattatttgtaatgactaaataccactagggtggattttcggcaatttagtcttttcttagaattnnnattcttgtctttagtgtgacttttatgggctgagaaagaaaaacaaataaatataattttatgttatatgcttaggttataatcatttttgaagggaaacctagaaattaagaaacggaaaaacaccatttcacttcttcttctccccttctaaccaatgactagcagctgcaagggagggaaattcttcaccaatactcaagcattcgaaaaatttaacctaatccaaggattctttaagctttaaggtaagttctcacttcttttccttgattttctagaagttgtaggttaggttttaatatagattatgggattttagagctgtgattttaaactaagagtatgagatgcttttaggtttgaattat

SEQ ID NO: 66195 - DNA, 906 bp, Cannabis sativa
gacaagcaaacgcaaacgacggaatgcactcggatttcccaaaccccgtgcattccaactaatgattttcatagcaaggcgcgggattgctgagcagtcaccgcggagttgtcatcagcttcagttgaatctaccccagcagcagaaaccgactgaattggatcaagttcttctgacaaggaagaaaccatggcagcttggttggctcgacatcatttaagagtttgtctcattgaattggtgtcataatgtcgcttataggtacggtttggtgaagcattctcttgtcctctgagatttgtcattgtagtgtgcaaaataggtggggacacagaggagattgtgggggcagtagcagtggtagactgggaaggaaatgtagtgctataaatttggtgtgtaggtggagggtatgtagcgaaaacatttgatgagcatttgttggagttggaaataccatcacctatcagatcaggggtataaacatctaacttgactgcagtgtttggacaattactagaagtgagaacctgttttcctttattctgatagtgaatgtctgaggcagaggaagtagcagtagttatggttgcaatgttggaacaaagtggtgttttactaaaggatttattattaagagtagatggtgtaaacattggctcacttagggataaagatggaggagagttggagacaaaaccacttgaaccaacagttatgtttgggataatgcttggtcggtagttggcttgtattgctgcagaagtcgacgattcacctaacaagaaaggaatcggttgtggtcgaggaatagcgaaaagtgtcgggagagttgcagtcaaagtagttcttgccaaccgagtaagtaatggccatgcattacctttggaaaaatctgtgcgataa

SEQ ID NO: 66196 - DNA, 838 bp, Cannabis sativa
ttcagaggagaaatcgcaacagagagagagacaacgagttgccctttggtgatggatgaggctgacgagaaattgcggcagaggacttcgacttggcctcattttctagttgtggagatagagagagacaacgagtttggattttttttttctatttattgaagaaaaatgattgatgcatttagatctcgagtatatttagatctatcatttttgagaggaactttatttgttgcatacagatatagaactaaattacattggttcttcttcaatattattaatatgtttttttgatctttaatgttccatttacagaatatttgattaatacttgccacttttattttcagaatacttagtttttactagatgtataattttaagttttttttgtctattgtgaaatatttttttagaaatttttgtatgtggaatgttaatgcaattgtatcgatatgggtatggaaattgtattgatattaattaaggaaattttcttagggttattttctgggtttgagggtgggggaaatattctgactttagaaaaaataatttggttttgagtaggaaactttttagtttagagatgtcgaaggtggagaaatattgaaatttagatttaattttttcttcaattatgttaattctgtagtttagtatttttgtaataaatcatatatttttttttaaaaaaaattttaaatgattttttttttaaaaaaataaaaaaattaaatgacatgtaccaactaggagttgctaattatttagggaaatttgattttctatacttattaaacttaaatagttttttttaaaccaatacatttta

SEQ ID NO: 66197 - DNA, 1637 bp, Cannabis sativa
  modified_base (1157)..(1176): a, c, t, g, unknown or other
tttcaaataacatagaaaaaaactagcataaaatttagtatacgtgcctcgcacgtagtttttgctagtatatatatatatatctatatggttttcatacctctcgctattttgcatattggtatatatatttcttattatcaattttttatttttctttttcaattttatgtgcatcgaaaaatggctttccacttctacattatttttttaaagttacttccgatagtgttgattttatattttgcttatacatattataaagaataagtatgaggtggtgacatgacactttaaaatcactcaaataactctatttattttctctttaaatatctcatttaaattattaaaacaacactttaaaatcacttaaaatagttttatctaattttttataaatattaattgattaattaactaagaaaatatttatatacaattcaaaaaaaattctaactaactaaaataacaatcagtagcaaccaaaaaaattattactattattactatattaataacaatcaaaaaaaaaataattaaaaagaataaataaatattctaaactaataaagaaaaaaaaaataggtagcaataaaaaaaaatattattttttattattatgaaaaataatatatatgtgtatagtaaaaaaaccgtatctaaaagtattagaaaaatagtggcaaaaaataaaattcaaatacgatctatggagcccgtttataaatggtggagtgagatacgatgatgataataatgattttgaatataatgacaagatatggcaataacaacgattttgaattaacgtagtcccgattacaagataatgatacaacaattgtgagatcatatatatggtcatttttctatagatttattaattatcttttttagacctcaattttgtgtaaaggttcttcaaattttctttttcactttaatgtttgaagatatatctttatttcttttatttattaaataagaaattgtatgataattttagtaaaaaagtctaatacggatgaaaactcagggggcatgattttgtacatgtcgaaattcgaggagcataatttgatagatattaaaatctagggagtatgatttagtacataaacaatcactaaaataataaaattgaatgaaattannnnnnnnnnnnnnnnnnnnacaatctcaatagttcaggaagcattatttagtaaatgtcaaagttcagaaggcaaaagtcctaattagcctaaaaaaaaatacatataaataaagaatatgtatttttttaatttgataaagtatatcaacataaacatatttaaatttattacaaaaataaataaataaaatactatcatttaagagtgaaaaatttaagtttttaagaaaataaaaatttgaagaccaatttatcaaaaaataaaatttgagaacgagcataccaaaacttatataatttagaaactaatttgccaaaaaataaaattgaaagactaaattaccaaaatatatatagattaagaatctacggcttctgaggtgtaatttcagattgtaagacgttgttggaaagtgttagtgatgtatctattttatttgttaaacgatctgctaatggtgttgctcatgctgttgct

SEQ ID NO: 66198 - DNA, 1029 bp, Cannabis sativa
  modified_base (575)..(575): a, c, t, g, unknown or other
actacccactgtcctcacgatcttccacccaataaagaccattatcaatgatagatccaacataattttgcttgcatctaaaaatggtcgaatcatgaaagaataatcattaagatcctcgtccttataccataactcaagggatttttgatgccaaatctcacattgtctgaaagagatttcctccacttccaattcgatatccacttcaatattgaggttttcttgggaatggattcttggatataattaattgagaagattactgagaagcaccagtttctccttgtagtacccaaagtgagccttgttccatcaagctaatcatcttctagtactattgagtttcccaactaattgaaagcattgtatcattatccatgagactatggagtcatttatgaagaagcaagtcttggaaggtttttctgggcttaaacttgatatgtccaaagcctatgattggttggagtggagttttttggagagcaatcttaaagccttaaacttctgtgatggttttataaagctcattatgaaatgtgtgactacggttccctcatttttgcacaatngtggcccacttaagcaattcttcccatccatagggattaggcaagcaaattcgctatctctctacaaattaattctttttagcgaagtactttctcaacttctttttgaggaaagagaggcttggtaatatttatggattcaagctcggctcaagaggtccttcgttgtcccaccttatatatgttgacaacgcctttcttatttgcaaggttaccaaagaagttgaggtttttttgtactgtattcactcctattgtaagtgttctagctaacaactcaatgttagcaaattagttgttgttttctgacagaacacaaatattttgatcaaatttttctctcttagagttgttaagattttatgaaatgacaaaacaagatagatttttgagaaattggaacctattttctaaaagcaatgctaaagattttgggttcctccaagacaagata

SEQ ID NO: 66199 - DNA, 1133 bp, Cannabis sativa
atccgtataaggcgggtcggatcagatccgatccgagtatctgatccagcggggcggggcggggcagatccgtatatgatctggatcagatccgacccgccccattgacattcgtagtccctagcagcaattatttatagagaattaaaaatgaggttacatatttcaagacaatagaatgtcttgttttttactttctaatatattgacttatgtatatttagtcttttatctaaatgtatgtgtatatagtatatactattataaatgacgattgttctttaattcattatttatataccttttttacatgtgttataatccttaatgacttggaaatattaagttaaagtacattctcacatggagaacaaaatattaaacgtaactcaagaccctttcaaaattctttcaagacccttatttggctaaacagtgaaagataactagtagtttttcattactgctttacgtgttcaggtaattcttggcttcttttttctcttcttattatttttttctttatgaaatgtgattcttggctgtttatgaaggatttataaagttttcaatttttctttcttctctttcttggttacttgaaaatacaataaaattcattgacacatttatgctaatatggaagataaaataaattatcaaactatgtgtttatttgttttggcatattatattcatgcatgctatctatacatacttaatttaaatcccaaaatgaaaagcaatatattatacttgatgatatagctgtttagaaatctatatgtagatctttagaactagattttatgtatccaataggtataattttatttatttgttgtgtagtttttatggtttgtttgttgttaccgctatatgtagcctaatttaatatagtctttttaattttcatacagaacaagtagttgaaccttttatttagtttttttttatttctcagtcagattgttatagaaacctcaaataaaaagaagtcacactagaatttaaatgtctttcctcatccattttatccttttcttgtacatttcacttcccccaaatcaatctcccactctctcttcttgagttcatcatcaactctaccagagggacgccatattgttgct

SEQ ID NO: 66200 - DNA, 1305 bp, Cannabis sativa
ctttaggaatactaggtatactcaatggtttacaactgtaggaaatacttattattcccaacagttataaaccgctggaaaaggttattttgagtatgttattttaaatcaaattttattttatattaataaataagtaatgaaataattaattaagggtaaatttaaataggataataataatcattaaaaaaaataggataataataaaataattaattagaggtaaaattaaaatagggtaaataataaaataaggtgagttttatttgaaccccatataatataagtacaccctattattaaaaaaaaaagaaacttaaaatattttttaaaaattactcttaatatttttatttttttttctcacattattttatattaatttcaaatacttattttaattttattttcatattttttttaaatcgtgtataatttttttttatgaaaatttcatataatatttttgtcgtaatattaaatatattatttatttttatttgacaggtatatttttttaagaatataaattggaagaaaaaattttaaaaaaatataatgaaatatatatattttaataaaataaaaattattaaaatgaagtatttttataaatttttaaggtgtaaattaaattttcttaaactaattaattggagataaaataaaatagggtataattaataatataatcacatttattgaccaaagttttcaacaaccaattaaatgagatagtgataagagcttttggatgatgagtgcagatgatttttacgtggttcgggcattaatgagcagtagtccacgagtctctgttattaatgagagtatatcttttacagagaatgctcttggtgtgtttttctctctccatttttccgatccccttcccatttttctcaggggtatttatagagattggtgggaatatttaaaaaggggtaacttgtctttgagtgctagctatggataagcacaagttttcaaaagatacaaaacagggcatgcattacctatatagtaggtgtcatagagattaggtgagattaacattgatccttccttgattgatgtgatttttcataatggagctgtcactagcccctttggttatcgtgtaattgccctaaataaggcttacgatgtctgacacgtcctcttatgggcgtttccatatgctttccccatactgcattaaatgcaaggtgactgttcaaataggctcttctcgtcccggagatgccttactatatctcaactctcggagaagagggcgtgccttttgcactggtccgggag

SEQ ID NO: 66201 - DNA, 1628 bp, Cannabis sativa
ctcgcttaagactttacagtcagtaagttgtaaatatactctatcagctccacatttaatgagttattccattttaatatctcctaatataatgatcattatatttgttgattcgtattctcccagcttgacacgcgtcctcctttgaagtacagccaaattttaggtataacaattgccccttaaaaagttctttttaatgaaaagtgctttttaaataattacatagggtatttttgtcataacctcttttgaaaaaatgcatgtcctctgattttggcgatcttgtggttttgaggtgtatcagcatttaatgaccatcttttccacttctttttcaagttctacctgttggatcaattgtttccctgatcccaacggagattgacccaatagtaataaaatgaaaaaaggaaccacctttgcactacttctgcagaaaaaccattcccatgtttgcccaaaaccttgcatgccatctctgtcattaacattctcgacttcaagcatttagagggatcttcacaccgtacattgcttcgtagattgcaaagccattcatcgtcccaaaaacaaactccaaatagtaagtgacttttcttctcattttcttacatgcttttgatgtggggtttctcggtttgatttctaatttcttagtccgcaccttagtaacttcattttgttcttaaaactttagggcagaattgattttgggtaaatattaaggtttgggcagaacgtaggtctttcaaaattctcaaatttaccaacttctggtttgataaatttcctccaggaattgggattgcttcctccttgcagcaatgtcccaatctggtttagaattttatcgtccagaagaattagaaatagagtgtcctactgagcttatcgtcccatgtaaacctagaactctaggacccaaatccaaattagaggtaaatgatgcaagaattagagaacacttggtgaaaattcaccaagaagacgttgctagtcgccacagacgctttcttgcaagaaattactaaaggtaggcgtcgtttcttccaagacgtagcttggctagaacccccccccccaatttgtcttctactcctttggcaacgcctttgtttttactgaaggtcacaagtgcttttgaaccaggtgacttggattttgaaatcatgtcttacaagccacgtaaatcaaggactccccaagactctaatgtcactttcgaggcagagttaatagagtcgaaggtgcgagccatcggaggttatgtaggtgatacattgaggacgtggtattgagtataagcgagattgtcgattagatcggtagtagcaggtgagtttagctattacccaccagtgcaacttacatgtgaaacctttgaggggaccaatggcgagaccagtataagtggctcgactgggattggagcttggagccttaaacacattagggctggagcaataatccccctgcgagattattgcaaggacttccttaatcacctcaggctttccccgttccaattgaatcctatttcatacaaaatccttgcaagtttaagggttttgtacaaaatcttgaattgggagtgcccactcccatggaaatagagtatctctact

SEQ ID NO: 66202 - DNA, 1040 bp, Cannabis sativa
gaagaaaacaacaccacatcctccgctctccgtcttttttgattccacactatatcatttcgagatttccaaatggcccaacaaagtatcacaactctctccagcttatcctcatttgccatgctcattaccgcacctagccagagaaagaataaaactcacggcctaccaaattcaacccaagtgcaacccaacaattccttgaaaacccacaagacactaaacaatgaaatgttatttcattgtatacacaataaaaggataagtggtgtcaataggaattttcttaccaccaagtagtcaaataatataaagttgcttgccaaataagatctttcacttttggagaaaccttgagttgtcataatttttttttttttattattttaaaatgtaatatttacaaccaatataaaaaagttattacatgatatataattatttagtttaagtcataaatttatttttagttatttaagtttattttagaattggggcactctttatttttttgcacaaattttagctaaaaaagataaaattttaaaatagagtatatttttttttcttaatcttacttaaatcatgttctacaccttagttaaaatttattatttcaataattctttttataattaatttgaattcgcagatgctctagtgtggcccaacaaagtatcacagctctctccagctaattactaactcttctttgttaccatttaaatttcaaaggaatttttattactttcattaaaattttaactaatttaaattattaaaactaaaattagcttttaattaagaaatccaaatattttacacggcatatagttatttaaacaaaataatatgattttgattttctttacggacagttaggaaacagcataataaaatattattttcaattattttctatcttaagccgatacatttctcctattaattattctgattccaattacagtttagtaaatgcgccataaataaacaaatgtaaaagaatgattccttttccgttgattctcattgcttat

SEQ ID NO: 66203 - DNA, 1218 bp, Cannabis sativa
  modified_base (395)..(396): a, c, t, g, unknown or other
  modified_base (991)..(991): a, c, t, g, unknown or other
aaataaataattactattttgtcaattcaaaataatttttttcgaacaacattatacaactctttatccctacccttgacaatgttttaaggtggtgattcaaggactatggaagtataattctaagctctaataaactagattatttattgagtctcaccaatcaaataatcatatttattaattccatgattactctactataaatatggaattgaactcttagtaattatagaattattactaagttctactgcagtgttcattactataatcaattctaatgattagcgctacttatgtcggttcgtaattagttttggttaaaatattatcttgcctttctaattacttctttatccttcagtatcgttaattcactagtgaaagtatannttagatccaatctaaatttgtgcacaattttttagttctagaattaacacttaaagggaaccaacattagatcagttaggaaagttaggattctataattttagatcatgttctagccatccacattatattagattcccaaaaaagaagttgaaagaatcatcttctttgaaaaattttaacgagtaaatcaaagaaactaataacttgaatagaagctcatgattactcaggatttaggtcgatctattgttgatcatcattatgatatgaattaggtctttatagtaaatgataggtttgataaggaccgctttattcatatcgttccttgtcatatataatctctattatatacaataccttcacttagatgtcatactacatcagtaatccaaactaagattacttgcaccgaagaacgggcatcaatgaaccatactagcaatatcaatgattctataacttttatatgttattgactcttttattcatagctaagtgatcttagttctttgtagagctatatacgtcacaacttcatatatgaataagaatttttttgatatttatataaattattcaataataaatnttaataatttaacattcatgcatatattaagatgttcaactctttattaataatcaaaaatgtctttgtaggcttttcagggcataaaccctaacaatctcccacttaccctaaaagtaaattggacatttcccttagtcccatattagttatatgactcataaaagattttgactcataaaagattttgctggtaacgtctttgtgaatggatctaccaggttatg

SEQ ID NO: 66204 - DNA, 611 bp, Cannabis sativa
  modified_base (346)..(349): a, c, t, g, unknown or other
aataagatgaccattaagaataagtatcccctgcctagaatcaacgatcattttgaccagctttaggggaagacatttttctccaagattgacctttcctcgggttattatcagttgaggattagaggggaaaacattccaaagactgcttttcacaccagatatggccattatgaattcttggttatgtttttcaggctagccaatgatcttgcaactttcatggatcttatgaatagggtgtttaaggattttcttgaaaagtgtattatagtgcttatcgatgatattcttgtatactctccgttaagtgaaaatttcacatttagaacattaaaaataaatnnnncacaatttcacctatgtcaaatttatagcatatgagtttattaatttaagttcgacccatttaagattatgagaataatttcttaattacaatccttttatttaaaggaaacaccttttgattccaattacggtgatattaaataatttgaaataattttgggcgaattagggtgaatttagaattacagctgaactcagtaattttagctaactgagttgcctacataccttctttgtgaaggatcaagccacttgtagtt

SEQ ID NO: 66205 - DNA, 835 bp, Cannabis sativa
ctagaaaatttagtagcataacggatgtattttcaataaaaccaaaaatcataacctgcataaatatttgtacacaaaaatatatttggcactcagtgccctagaatagtcaagaaaaatatgcagattaagtttttgatttttcaaacaatttgcaaatcataaaaatttagaatatgtctaatgttatacaacagatataaaaattaagtccaataatcaagttgagtctctacctctcccaagtcgttaaactttgtccaaaagacgatcttaagctctcaagtcccgagctccaattgtttagtccaattactctcccctataccatcaaatggttaaataattatcatcatcacattctacattcaaaatcgagtcaaacgacctataatatgactatattttaaaatttggggttttgaaacctcacctaagcggtgcacattaataattagtggtggtaaaaatcggtgtaccagaaatgttgccaaaaataagggtttatcaaaatgaccacctcgactagtagatgacaccaatgtcaaccgtttgtaaaaacggtacatgatatcaccagaaagtcgccgaaaaggggcggagctataaaaatacagcgaaaaaagtagcgacgtgggtgaaatggtttagtgaaggttgttctcctcgacgagttgagtttagtggtaaagacggctcgtcaaatggacaccaaatgtgaccaaaaatttcgttcaaagtttgaaccccaaaactttgacttgcaatcccgagctaacggcggcaaaaggagcagcgccgcctggtgggtaaggtggccggtacttggggtttt

SEQ ID NO: 66206 - DNA, 696 bp, Cannabis sativa
agcgctagttgcaataggaatttctatgtagaatttcgtaaaatgcaaaaaaaaaaactgttttaaagtgtaataatgacaaaacccctaatatttttgtgtcagtacttttataataccaatgttggagatttttccaagtttttaatttaatacacataagtctatactaaatcatatgtttcctcaaaaatcatggatatcaacggttagaataatgttcctattgtatacttactacagaaattttttttatatatatatgatttggtaagagtgtaatgtacataaaaattgttcattttttcaggaataagtgagctattactatggatgtggatgtaactttactttcttataatataagtcactttcactgttatattaaattttcgaatttcactgcttttacctttactgctttttatggtgcgccaaaccctcacaataagccgcattcatggcaactacttgatcgccttggaactaaccctcggttacaaccttggcttaccatgggtgactttaatgattacctttctctttctgacaaaatcgggggtgacatgtctcgtagtccgtctactcaattttaatcttttgttgatacccacgagcttcaccctctttatcctttgggtagtcccttcatttggaccagccgacaaaaacagtcgtctcacacccaagagagac

SEQ ID NO: 66207 - DNA, 599 bp, Cannabis sativa
taattttgttcaattttactatactaaattgtgctccccgagctttaatatctagcaaatcatgcccccgaattttgacatgtactgaatcatatttcttgaatttttatccacgtcctgaatccattagtaaaattagacaaaattccttaaatccaacaatcttaatagttttgagagaatttttaacaacctgaaaagttcaattcacatgattggatatacttcaaagttgggaagataaaattctaattagccataaacaaataaataaataagcctatttgctatattaagagcactcccaatagatgctttaaacttgatctttctctaaaatactttataatagagaagagaaaatacaaatttataaaaatatggcatacagtagatgttctattttacttaaatttttagaacaatgaatagtgctattttacatgtggagcaacatcattttttgctttaaacttattttattagttttttaaaattaacttattttttcatgtattggtatttatgtatatattaatattatatatttgaaatgaataaaatatattaaaaactaaaatataaagaaaggattaaca

SEQ ID NO: 66208 - DNA, 903 bp, Cannabis sativa
ctatcttaaagcctgggataaactgtgccttcccaagtctttggggggtctgggttttcggaaaacaaaggaaatgaatcttgcttttttgacaaagtggggatggaaattattaacggggagtcagtcattatgttgcaagatcctagaggctaagtacctaagagggagggagtttctcaattgcaattataaagattctgactcctggtttttgaaaaatgtggttaaagccagtacaatcctccgtaaaggggcttgtaaaagggtagctgatggaagagatactagtatttggagggatccttggatccctcacttgaaaggtttcgtcccgaaaccaaatgaaggtgtggtaatggataacaattgtgttgctgatctcttgtcaccgaggggttggtgggatattcataaactaaaaagtctttttgaccatgagactgtttctgctatcctcaagagtggaaaccctcctggtattggcaaggatagttgggtgtggactttggagagtgacgggcgtttctcttgtaaatcagcttatctggcccaaggtttggatagagcacctcactgtgacgtggctccaactctttggaataaacttcagaatagtaacattacggagcgtcataaggttctttggtagtgcatcctctctcaagctcttccggtgcgagcagtgattagaagaagatttcagattgaggatactagatgtcctttatgtggagtgggagaggaaactatggaacatctatttctgtcgtgtgaagtggcgatgcacttgtggcgttcgtcaccatggggaatattcccggtgtgtgagactggtattcgagtttgggattgggtgaagttcatttggagccttagcaataggggtgtcagggctgagga

SEQ ID NO: 66209 - DNA, 1172 bp, Cannabis sativa
ccacgaaccaggtaaaagttattgctaactgcgaaattgcaaaggaagcatgggagaagcgaaaaataaaaaatgagggaacagatgcagtaaataaattaaggctgcgtgcgttggccaaggcttttgaaaatctgaccatggaggaagacgagtcagtagctgaatttcatgcaaagttgtgtgatatctccaatgagtcctatgccctggggaaaacctattcaaattaaaaattggttcgaaaagttcttggagttctcccaagaagacttatgtctaaagtaacctcaattgaagacatgagaaacattgaggaacttgatcttgatgagctcatttggtccttgcaaaattatgagttgtcacgatggaagaaaaccaagaaacagaaggatgtggtcaaggataaatctgatgcgagtatagctctcattcatcaagaaaacaagaaaccggttttagaggaattgaatggcattactgacgagactgttgccttgttaatgagaaactatgcaaaattcttgaaaaagaactacaggagaaattttccagctgataaagaaaatgctctcaagaagaacaaaggtggaaacttcaaataaggacagccatctgctgatcaaaagaatcgaggaatcaagtgcagagagtgtgacagatatggccacgtccgggccgattgcacaaacacactcaaaaagaagaaggcccttgcagcaacttggagtgatagtgaagaagaaaagaactccactgccagtgaaagcacggatgaggataagcaggtactagctttcatggcccaaagctgtcactcaattgagtctgaagatgatgcaacctccacttcatcagaagctgacagcgtaggtagacaaaatgcatatgaggaaatatttgcccaaagggagtacatgactaaacagatcagaggtctaaaaagctccctagagcaagtggagactgaaaaaggcaagttagaggacatggtcaaaaacctcaacaaacgtcttgatgagaaggagaatgagatttataaactaactgatgatctgattataactaagcaagcactgcaattcattcccacaggcacagctgctatcaatcaaaccctacaacttcagaagccttatggtgaccgaacctccttaggttataagatg

SEQ ID NO: 66210 - DNA, 1077 bp, Cannabis sativa
tttttttgtattacttcaaagaattctcaagattacaaggtggttgccaagtaattttcttaataattctaaataaaaagcttacaattatttgacagtgtaagagctctctagagaatatgactttggctcccaaaataatggatgactccactatttataggagaagaatacatgaattaagttttccaaacaattaggattaaattgggaaactgagctagtttcttattatttctttacaatgcatgttaattccataaaaatagggatttaaatgagagatatttatgggaaacatccttagaaattttgatttagctgcatttaccctggacagagtattcgacttaatgtcacgctagatgctactcggatgataatatttaccttgttcaaatatttaaggatatcattcttggatataaattaccctaattggatacatagaaggaaatatcgtccgaccaagttcaaggaggttctccatgtgtcaccttactagatgccacatcaccttgtgtggaattcaagataacatttgccccctaattctacatgagaacaatctgttcacacgtgcacttactcggtgattaagtcagtcggatgggtgacacgtgttcaatcttcgtactctttcttgatcctatgagaagaatattcgactacttctttggtatttgggcatttaattccctgcttcgaaaaatgagcattgattcgcgtgctgacagttgtacttccctaatgagtaccgattacactttttttggcggggcaacccaaattttgaaaactgtattactaaattgtcattccaacctcctatataaaggggtttaaacttcatttgcaatcttttacacattttcaaacttaagagcagtagcaaagatttcatttttgctccaagttttctaaaatttccaccaaggtttagaagagcatcaaggcaatatctagagattaagtcaactcataatccaggatgttctaatagtgagtaagttttctagttcttgagtatttttttttttaaaatttctgcattttatctatggcttgaatttgttt

SEQ ID NO: 66211 - DNA, 1159 bp, Cannabis sativa
taatatcaaaattcgctaaacccatttctattaagtcagcactcaactccatatcctcaattctgatcagcatagacctaatccaccttttagagatgactaattctccaccatccattagggttccaaaccctatatcataactatcatgtggtctacccaacttactaaagattctggctgccacataagaatgaatggccccagagttgaataacacagagaagtaagagttgctgaccgaaagctgacctattaccactgagaggctagcttgtacatcagcctgacttaacgcgaaaacccttgctggagcaggtttcgttgcaaccttctgttcttccctcttgagttaggggcaatccctcttgtagtgttctggcacaccacactagaagcactgttgccctttacactctcccaaatgatgctttttacaatgtgggcattctgggtaagtgtatcgggtttcagagctaccctaacgattgcttctaccctggttcccccggaacctcttgttctaacttgagccactggatacaataggtgcctttcttttctgatcagtggtcgagccactagctcccctattgaatcctaatgtaggaggagtaggagccccaccaacaacctgagtccctcgagacttctgggtgcactctactacaccctcagcttgcagtgccttacccaccatatcaacataggtggtgttatcattagtagtgatcattaagtcatgtcttatttttcgaattcaactcgcctagatacttctcttttttgctaaaatcagttggtacgattcttgaggccaatcttgccaagcgatcaaactgagttgtgtattcagtaacaatcatattttctttttgaatcagctgagtgaattctttccttttcgcgcttctgaccgcctcattataatatttcgcgttgaacagttcctggaacttttcccaagtcattgtagcaacatcatgagtcagggacaccatgtcccacaacactagagcgtcttcttggaactagaatgtggcataggccactctatcattggtgacagacacccataaagttttgaatttctgtctggtaatcactgttagccattgttaggctttcataatattgggacctcccaggaaaactggag

SEQ ID NO: 66212 - DNA, 924 bp, Cannabis sativa
tattatgtctaatacacgtatactgattataattcttaatttttattttagttatatatttttagtagtataactataattttttttttttggaggttattcaataaccaacatcatattttattcaagattggaatagagtaatttcacatataggccatgaattttagtgggccagaggaaaaaaaaatatattttcaagccttatttagtaaaaacatatggtattttacaaaatcagtaaaaaatgtttatttttaaaaaggggaattttttttgggcctcttgactaggtgggccctaagtacaaacctagtccgcctatggtcgggtcgagccattttacaaaagatagtgggactagagcatgcaattttcccacttttttgagcgattacattggtgctctatgtgtcctacatatttcaaaaattagaatgtagtgccccccaacaatacaaggatcaagtgcttggaagacttcaagtaaataattaaaaaaattcatttgatttgtcctagagatgttaaatctagaggtactcatggagatcaccttaatgttataaatattgatttaaaaatgataactgtgatggaagtgatactgtagaagagaatccttagagaagttaaacataacatatatgatcataatttaacccttgaagtggttctatatatgtacctataaatgatatacctatttgacaaatatttaatttaaagagatctctataagttatatcaatatggaagaaaattatcatataataaaatttttgtcgacaatagatgttgaatgttcgtatatgtaataaactaacatgagatatcaatgatcattgtattagatttatcgagaattatcaatatatattttctttttggccgaaataatataatgcagtccaggcaagttta

SEQ ID NO: 66213 - DNA, 1022 bp, Cannabis sativa
accgaccatactgttattgacttaaatgatattgactaattccttcagaaaacaaatttatacagaatcgaaaagaaacgtacaaaagtgggaaaagagcacccaaattaatatgatttttgtaaaatataacaacattccatattcagtataagggccaattattaatacaagcacataacatgtgaaacttcacaatcctgcagtagtatcttggatttgaaactccccatctccatgctaaaatgccatttgacacctatgttcattgattctatcatccctagagtacatactgaactcaaagctactgtcattcatattcactattgattgcaagagattttagtagaagctagtaagtgtacataaataatcatacaaggatgaagaatcacaaattcttgattaacagtattgctaaaacgtaccacagacttcacatggaaagaaaagcttaatctataactaggaaaaaagaaaattcaatcttacaaaggattcagacaagaaacagaatgtccttttcttttgtttccaaaggtgatgcccaaaaaaaaaatgcatcaaataaagcagagtaaggttcttggcagccatcagctaattgacagcaaccatgccaattttatgctaaaatgcaacttttgatctttgataaaactttcatgtggcctttctctctagcaagattaataagttcttactataaattttctaaaagtcaatgttcattgaaatttatgcaccagttacatattctatataaacaaaggttgctagctaggtaatcagtgagtatcaagttttgagaatgatgactttagattctctccagatattctagaaagtaaattcatgagcattgagtagggatgtctgatagagtttacagaacttaggaaaatttagatgattcattactaaagtatgtacttagaggagaacttctcatcattaaaggcacagtaatcaatgtaaatatgatgcttttcaagttttaacctcaccaatgatataga

SEQ ID NO: 66214 - DNA, 1205 bp, Cannabis sativa
taaagaaacaattcaatgcaatttcagacatgttgaaacaagcaagtggtttcggttggaatgaggacctaaagtgtgtggttgctgaaaagagtgtcttcgatgatttgggtaaaagtaagtgttactttgttcaattttatttacaatttaatcatatcttaattcttttaatatgttttttattaattgcagagtcatccaaaatgcaaggggcttaaggagtaaaacatttcctcattatgatgactttgttgctatatttggaaaggatcgtgcaaatagacaaggtgctatgggattttctgaaacaatagatgagattgatagagaagcagaaaatgatcaacaatcttagtttgatccatttaccccaatagatgatcttgttggtaatccaactgatagtcacacaagtacgggaacaacttcagcactatcaagaaagagaagtagaaagaggtctaggaaattagttgaagtattgactaccacagtgaacaaatttagtgaaatacaagctgctggtggtgatagtattagaagaattgttgattgtttccagttcgagacagaaggtgcaagtagaagactgaaagtgtttgatgagttgaaaaaaatcgatggactgtcatttgaacaacgaattgaagctggaaaacttcttgtccaaaatcaagcttatacggatcttttattcactttggatgatgaatacaagttggcattcgttcttggtttgtttaagtaaggtaagatttaatagttgatggtatttcgaaaaatactattggggtgactttatgaaacttttggcccgttaatatcatcttttagatgaaactttttgtaatataataatatgccatattttggattataaactagatactatgcaaacttttagaatttaaaattttaatcaatatttggattatactattatgtgttaaagagcttttataattgtttaaattattaattcttgaaaaattattaacaaatttgcaattatttgttgtgacaagtatatatataggaatggtaaaagagatatcgtgtcaggtcgggtcaatgccgagttgagcttaacctaggccgattgactttcctatatatatatgtatattttactttttataattatttattgttgttaatttttttttataaaaaattatacaaaaaataataaataaaaatta

SEQ ID NO: 66215 - DNA, 970 bp, Cannabis sativa
tttttaaagaaaaataattttttatttttattttttaaataatttattttttatttttttttaaatatttattaacttggactaataatataatgtcatatgtacattttgatccacgtagacaatacagtgtggtatttaacatttaaaaataaattaaaagggctaagtgttaacagaacatgagtttaggaggttttaccactaaaattttagaattggagttagttgtaaaaatctgaccacttaagaagattatgccacaaataactcttaaaattattgtagtaaaagtaaaatattttatactaaattggtataactattagagataaatttaattacaatatattattggagatgatcttaggtacaatgtatcattataattggagatggtcctaattacaatatatactataaattaatactctagatatttttgctaaaataatatgttgacgatataatacacacagattgcaaaacaaatattaatatgcatatatatattcgacccgtgtgctagctgaggatttttttttttaaaaaaaataattaataaacataataatgctcatatatatgtcatatcatatgtgattaaatgtggatgcggctgggtgtttttcaatcagtgtgaatgcgactgtatcggtaacgaaaggaaggtgtggccgaggcgtggtgttacgggatgagaatgggcagtgtgtttttgctagagctgtgccacgggttggggcggtctctcctcttggggctgagcttgaagcgattttggatggtatttctgttggtgttcaacgaaggctggtgcggttcacggtggagtccgattgtcttcaagccattaacttgatccagggtgctccagataggtgtagggatgttgatggcttggtctttgcggtcaagcagttgcttagctcaacacctgctgctagtttgaggtttatttatagggagg

SEQ ID NO: 66216 - DNA, 856 bp, Cannabis sativa
gagaagcccatcaactgggagaggaaatgtacaaatgaatgacattcctattttattttatttttatttttatatatccaaattttagtgcccaaaatatatatttccaaaaataagattttcaaaaaaaaaaaaaaaaaatcaagattatatatctttgttatgacttacgactgtatagtagtaaagtcagaaaaatatataatttctaaacttaattgtaagataaaaaaaaatgaaaagaaagacatggaaatccgatacaaaatatcattaaaaatttaaacatgtacaaaaaaaaatcttaatttcacaattatatataactaaataaaatgtatttttaaatcataattttaatgtgatcatataaattagaatttctccatgcaaataaaaaatcttcatgggtaaaaccatcagtaatcgcagtcgtagcagttacaataatttcttgagattgaagaaagtgtaatatagattcgaacatgtgagtagagcatggtacagtgatcggttcatcatcaacactacatattgatattgcttctttaatttcattgaattgttcttcgaaaaattttgacgacaataatttgattggaacgacatatcgtttttgttcatcaccaatgaaaatcgagacaaattttcctcgagcgttattcttcttgttatgccctaactttccatgagcattgttcttcttgttgtgccctaattttaacttacacatcaattgttcaaaattctctttaaacactttggccattgttaggttcttgctttagaaaagatttttaaaattattaattaattatggtttgggtgtgttaaatattaataagattatttg

SEQ ID NO: 66217 - DNA, 822 bp, Cannabis sativa
attattcaaaactgtacatattatgcatttatatataatatgtgtatatatatttagtagctgataatttctgattgttaatttgttacaaaaagaaagaaaacagcaaccatcaaaagaaatcttaattttacacatgtatagctaggtatattttatattgaacaataatgtttgtcatttgatccatgacataactgtattgtttttcccttaaattattttcacacgatttctcacacatgcttcttttaatggtttaggtgtagttatagtactatactactactagtactagctagtacttttgtttttctccgtaaatacttgaaaatatatataaatataataataatttcgtttatatttattgattaacaattagggggatcttgatgatgattagatacgtacatttatcaactaagtactacaccaccaaatagataaaaaaaaaaagtagttctagctacttgttatagatgatgaggcaaaatttataccctaagatattccatatttataatcatatattttaatagatataattaatgtaagagagttatatatctatataggataataaaatcacaggtctaattatgaactaattgcaagctatctactatatatagacttgtgcaaaataattaaaccactcggcacaggtaatctaatttaatctaatatagtctacttttggtatcatatggtaatacacctgaacaacccttttattttcttttaaaaaaaccttttattttcgcatataaatattatatttatatgtatataaatttgacaaaaagattatataaatat

SEQ ID NO: 66218 - DNA, 1423 bp, Cannabis sativa
tgtatgggcacctagatacaagttagtattatattgtatgttatgtgcttttcttaccgagtttatcgactcacagatattatttctgagtgtaggtaaaggaaaggcgaaggctgaacaatagtgagttccgagcttgggggatgattgtacatatcgagacggcgcgacctacagtatttggtctcaagacgacttgggctatattttgtagtcgttgtgcgacatgtttttaaaagtattttgatatagattgtaaaagtttaaacacgggatcccgatttatgtaaatgtatgtatgtttataaagtttaatagtttaaatcaaaaatttaatttggcataattttcaaagaaaactctttgattagcaaaggtggtacgttaattagaaaattactatagcgagcccaagtatcggggtgttacaatgctactcgtagctacatgaattgtaagatgaagaagggtgtccctgttcgatctcatgtattatacatgattgagctaatgcatgaggcaaatacacatggggctatcattgacggcatgactcaagtgactatgatccttgagttgctagctccttgcttcaaggctttcatcataaactatgtgatgatcaagctagagtccaacatgactcaatttttgaacgagttgaccatgtctgaaaacctaaacaaggaaaagtccaaggaagttgagtcaaacattgttgaagcaaaatcagctctccttcttcttctaataagaaaaggaagtggaacagtaaggacaacagtggtggcaagcccaaaggcaaaaagtcacccaaggccaagaagaacaaagctagccccaagtccaaggacaagaaggctaaaggcaagtgttttcattgtggcttaatgggaaacttgaagagaaactataacaagtatctctctaagcttagaaatttaaatatgatttatttattcttgaagctaacttagtgggagatgataaatccatatggattgttgattctagagccactaatcatatttgttcttctatgcagatacttgaatcggtaagggagctctccaatggagaagtgactatgcgcgtggggcatagagcacaagtgtttgccaagagtattggcaaagtccgtctgaaatttaataataaatttttgttactaaacaatatttattttattgttgaatgtactatgaacattatttctttatctcttttgcatgatcaattttttaatattggttttattaataatgagattattattttcaagaatggtacgcctatttgttctgcaatacatagtaacagactttatgtgctcaagccaagtgagcaattaattttaaataatgaattgtttagagtagcattgcctcaatcaaataaaaggcaaaaggtttctgatgatgat

SEQ ID NO: 66219 - DNA, 775 bp, Cannabis sativa
cagagttaaaacataaattacaaaattaaaaacaaaataaagtttataaagcatttacttaatttgatattaaaaaaaaaaaaaaaaaagctctaatgaagactatatgtttggtgttgtaattgtcttcaaggagtttgggatcatcaccaaagaaagcatcaaataaaatacactgactgcatgatctactactaaaaaacttgaaattcctgattgttttaaaccgtcaggtaaagaattctcgacaatctataaaactgtcacctgcacaagcgttgcgaatacttcgtagaataggcgacgatcaaaaaaatgtcggtaaaaaagaatttccgacaatttaaaattgtcggctatagtcaatactataggccacagtttaaaactgtcgcctatagtatagaagacgattttaaaccgtcgctatagtggattgtccaaaaaaaattattgtcttcttcatcctcaaaaccacttgtcgcatatgtcgcagctgctccaaaacctttacaagtttcatcatcctccaccgtcgttgtgctcgtcttcatcctcctcgaaattttcttttacaagttttggaatgcttttcacttgacaatccttaaaactttcttcaattcgcaagcttcagatttattttgaacacacacaaatcaagatcaacaaaccaaatcacggctaatagaaatttaaacaacaaataagagaatgttgtgcttaccttgtgctgccacaagagagcgaaggagagcgacatagcgagagagag

SEQ ID NO: 66220 - DNA, 659 bp, Cannabis sativa
aaattgtgctctgaatatgtcacttaccaacaacctttgctgtaccatttgttattgtttctaccaaaatggagaaacaagagaaggacaattgttctcctaacagaaacccaaagagataaccagaaagaatttcacttagaggcactctcaaaagatgcaggggaactcatccagccatgtttgttttgatcttatcagttgaaggaaatccaatccgcgaagtttctattgctatggattcggctgatttctttgaaaatgcagcagaggctgatgttcagccccgcaatcaaccatgaaaattgtcagttggaatgcacgcagattggggaatccaagtgcattctgtcatctccattttcttgttagagagcaatccccatatgtactttttttaatggaaagtaaattaggtccgaatgttatttcttgctttcgtcaagttttaaatttcaatattggacttgaagtccctagattaggtttaggaaggggtttaatgttgctttgaaaagacgatgtagatttaactcttttaaattttaatgcaaatatctttgattgttatattgactttactaataacacaagatagcactttactactctttatggagcctccactgttcagaaaagaatccacacgtagactctat

SEQ ID NO: 66221 - DNA, 838 bp, Cannabis sativa
ttttttatattttttattttctccctattttcacctaattcgttcggatcttatatgaccgatcgagccaacgttgaatttaggaactagacgatgattttctttttatttatacaattaagaaacataattttactgctaaaaaatagttgaaatgaaataaaaaaaaaaaaaagaaattgttattttttaaagagtaatttaaagtaaaaactacttaattaaatattttgaaggtagaaataattgacaagtcagtgtttatgtagcaacatttaattggtccaaattatttttagttattaacatcaaatttctagagaatcatctaatataaaattactacccttttaaataagaattaatgttaaatataaaaattaaattactccatatttatcaagattttgatccgaaaagagcttgcatgtaaccctcgtcccttagctaatattagggtattcaatcaatttagtctacattattttacttataatatctgatctacactaaatatgaatttcgtattttaaatccaatataatatggacaatagctcaaatccaatccaatttaatccgtaaaagtgcggattagatcgattattttaaattagttatttttcaatattaaattatctaatatttattaatatttttttttatgaattaggtgatgttttattactccaaatctcaatttgtacaacctacaagcatcctcaattaaaatagaagaccttaagagactatattatttacaatgtgtcaaatcatactttatcattagtagaaacttttttttggctatatacataagattcgacttttagttatat

SEQ ID NO: 66222 - DNA, 1077 bp, Cannabis sativa
  modified_base (1008)..(1009): a, c, t, g, unknown or other
attgaataaaattagacaaaagttcttaaatctaacaatttcaatagttcaaatggtatttttaacgaccttaaaagtttaggggacatgatttgcgacatgtcaaagttcagggggtaaaaatcctaataagcctttttttaatgtctttagtttaaatcatatataaaatgatacttttcatcgaattgggccaacaaaattttcataataatcattgttatcctaaaaattaacaggaggatatggcgacaaaaatccttaaaggttcattaaattctccaaggctccttaaattcttagacctgggcattatccatatgaccagggcaacttccagtactaggtagggttgagtgtgtccagaaacttctatcttaataggtaacttttttttgataatttaacaaggatgaaaaaactttcggaagtaatttttcttgagcaggacattccatggggctcagtgatctgggcaagtaacaaagaatatgatctggggaggtaacaaagtccttgatcgcgtaaataagtctctggttgtagaaaagtggttcctggccgcagaaaagtacttgggaacaggaaaccctaaagaggacctttgtcactaggtgcacacaccttcagtgttttggtgtatgtcgctactcacaactttgattggtgtgaatctagatgttggaaagctttatcaatgcatgtttcacaataatgaccaaactcgaagtccttctatcccaaatctgagtcacaatagaaatacatgcccatggtatgtcaaagacgcaaaggtacataagagacccttatgcccgtgaaattgtccaaggagaagagcccttaggctcatgaaattgtccaagagacgagcccttgggcacacaaaattgtccacgagaagaatccttatgcaacaccctactagtttaggcgtgctacaatgtttttcataattattgtgcaacctttgctaatcaagggtttatcaaaagtaataaaatttannctttaataaataaacatatactgtattacatttataaaatcagggatcccatatctacatttttcaac

SEQ ID NO: 66223 - DNA, 572 bp, Cannabis sativa
ttgtcatatactttttctcatatcccattaaatgcgtatacattgttttaatcctcgagcaatgtgttatactttgccaatcttttattaccctcctctgggtcaattttttccgtgcgcggagaggaaaaggacaaggatatcatcatccagccaaaccttcctggagatgaataatctatcattagttctttggaacaacaaaccacgtatttttggagaaatcctaggcaacaagcagcataagtactacatgttcttaaaactataattttcattcaattcgatcaacacggactccattttaaatttattaaaagaagagttagaaagcaactcatactacatgtttttgtctagatcaaatgatttagaatatgtagcttactaagacactagtaataacagtctttagactctacttactaattaaactggacgaaaattacacttttataaatattaagtatttaagttgctaaaagtataattgtgtttatgctccatacaaactaaaaaaattaataagtatttataatatgtttatttaccctatttgttgtctatattgg

SEQ ID NO: 66224 - DNA, 1290 bp, Cannabis sativa
atatcggagcggttagacctggagcgttcgatctttaggacaacagactttattttaacagttgctaagcaacaacttttctaactgtatattttgtaaaatagttgtaacttttaaaatcaggatcccagattatgtaacatttaattattataagtttaaagttaaattatgaaaagttttaattaaacatgaattttaataaacccgttaattagcaactgttgcacagtcaatatttaaattacgataacacgcttaatctaatcgggtgttacaatttggtatcaaagtctccaacttatcttctaaagatcatcacgatatgtacaattatcattagagataagcttgactcacgattcagtaagtttttattgttttagtagtttttttattattatgttataagaaaagtctaatagaaagcatgttagtagcttgatagttaaatatgtgcatgttttattttctcaagtaagcgataattagaatttaattttgattgcgatctaactgggctagctcactatttcgcaagttgttctaatagaatggacgacagacagaacacgagaagcgggggtaattctgttcgatccagtggcaatcaaggagttcagcttcccctaaatatttgtggctgaggcaaaggcctaaggggtagggaatgcggtcggggtgatgctaacccaccgtaggctgcccaggattgggaaaataagtttgttgaaatacaagtcaggattaatgaacaagacgaagaaatatggcgtttaagatagtagggtgctcctgcaatgcctgctcttgaggtgcaggtggctcctgcccttgctattcaggtggggtcagttgttgttgttaaccgaatggaaccattgtataaaagattctgtaagcataaacctccagtttttctaggaggtctgaacgttatgaaagttgagcagtggctaactattattaatcggattctgaactttatgggagtcactagtaacaatagagtgacctgtgctacctttcaattccaaaaagattccctggtttggtgggacatggtatctctcacctggatgtcaccacgattacctgggaagaatttaaagagctatttaatgtaaaatactacaacaatgccgtccgtagtgcaaagaaaaaagagttcactcagttggcccagaaaaagaatatgtaggttatggaatatacgacatagtttaatagattggctaggttggcttcgagaattgtaccaactgattttatcaagaaagaaaagtattt

SEQ ID NO: 66225 - DNA, 710 bp, Cannabis sativa
  modified_base (291)..(297): a, c, t, g, unknown or other
tatatatatataagaaatgtagaaaaagaataaattgcacaatatattatataatacatatatataatataagaaggagaagagaaacactcacttactaacttgagtgtagattagtggggattgagaattaccatcacttgaatagggtataacacctttgtttaaaaacttatttttctctatctctaagcactgacgtttggttgggagtaatgaaaatataggaatatgaatgagaatggaaataagaaataggaataagaattgaatggaataaaatttaaaatnnnnnnnaaaattgataaaaaaattattaaatttttttctcatcatgcattggagttgtaatatcgcgaaaaataaaatgatatttaattagacatattttattaaatatgtaattattttagtaatgaagtaagattatgatcttacttggatcaattagtgaaaatcgattaaatgattatataaagcgtaatttattaattacaaagtttatattgagatatgtgggtatcgtggatactatttttgaaataaaaatattttcgggcccgacgactgtggaaacttgacgatgtggtcaaaaatatcacgacattaatggatggattattttgaaggtcttccggactagtttagaattttagaatgttggtttgatggattagtaaaattatcataatgcccctaggttattttaa

SEQ ID NO: 66226 - DNA, 587 bp, Cannabis sativa
cgtgttcgggcaagaagaagtggattgcatttaagtatgaggaattgccttttatgtgtttcaagtgtggaagaatcgaccacagcctcaaagattgtcaccaagaacctgtcatagtcactggggaagataatatcacagcttctgcatatgggatatggttgaaagtggagaatgacactagagatggatttcaagatagaaggttgggacaaggaaaccacattacacaaggaaagaaggtaaatcaggaggctctgggattggtaaaaggagtcaaaacatccaattcctttgcttcgttagatgagactacaacaagtgtggaaaccctcttaagagaaattgcttccaagaccgagtctttgacacaaaatgcagcagtgggacaaagtctaattgcacaagttaataacgagggtccaggaggtatgatggaaactgaagtggataaaaggctcggtgatgaaggagggagagggaagcgaagaatgatggaagactaaggcatttcatggcaaggcaagttacaaaaaagatcacccagtcatcctcagaagctcagacacacaacctccacaacattc

SEQ ID NO: 66227 - DNA, 1636 bp, Cannabis sativa
cagttttattgtcatttgtttgattgctacaatttaatgactttcaattcttttgtctctttttctttttcttctcagccactacattctctcccttttgaaagttcactttatttattgtcttaagtctcaacctcaatcaagagttttctacaaaaataccaaattcacaaaattttttattctggtgtagagttgtctccttcttgattggaggagtactttctcaaactaaaattcaaaattccaatataaatatgctatgaatatatgtttgagtcttggaaatctcaaagttaaatatagcattcgctgttgaatgtctatataaatctgcaacctcacaaaatgaaattaagaaaagtcaacaatatctgtgaaaaataataacacaaaatcttggaaaactctaagttaaatatagcattaactagtatattagagatagtagtatgtgtgtacacaaagttacaccaagatattgatatttagcatgttaggcagtattgaatagtataaattcatgctaccaatatcagtacgactagtgctggaattaggttgttattatagctaatcatactttaagtatacgaatgttgggatctcaatatacacattagatgcggttcatacacttatggtaattaagtgtatagacgcttagttataagtcaagtatacatgttaaattgatgtttatatttttcttaatgactctattgactcacaaacatgtttctatgtgtaagtaaaagcaaagttaaggttcagcatcaatgagtagagagtttgatgaatattgtacatatcagatcatgtaagcctggaaggttacaatctacgagccattactgaaatattttgatttatgcctttagacaacaccttttattattttatgctacaaatattttgttatgagatttcaaaactccaatatatatttttttttttttaaaaaaaaaaaagtatttatgtttaataaaattttaattatcacaaaaattttattaaattcattttttatgttaaaattctttgattaataaatttttttttttttttttttgaataacaaaacaccgtaacttgccttaacatttctattttcttttcctccttttctcccatactaaacaaccttcttttttttgcttctctccaaatttttctccaaaattgtctttcccccatttttctttccttacaaaggttagtgttggttgtatttcacgttattgtttaaaatgttactaatttaaaaagagcaaaaaataaaaaataaaaaataaaacatctgaagatctgaatttgtctaagcaaaatgaggttcatgtatgtacagatttaaatttgagaagaccatacgaatcccaataaattaacagaaataagtcccatgtgataggttataatatataagctcagctataaatttgagcccctttaaaaataataataaaaataattagaagataactataaatttgaacatgtggagtttaatgcattgccaagttgccatcaatggatggcttacccttttaaaattatcttgtattctggtcttgggcgtccttaatctttgtcccccaatgcactgtggaagctttatacaatattatctataata

SEQ ID NO: 66228 - DNA, 1045 bp, Cannabis sativa
  modified_base (205)..(205): a, c, t, g, unknown or other
agtaaattgatagttgagggggttttgccgcaaattactctatattttttaaatttgtataaaataatacttaagctaatttttttgttaaactaaaacttaataataactcgatctagagattttatgaaaaactggttacatattctataattgttcgtgctaaaaattatttttaagttgattatatataaaaaaaaaaaanaaaaaattgttaaaaattgagctcacgatactattttagaaaatataaagcttagggtgcgtttgataacagttttttaatcatttttttttttgtttttaaaataagaaaaatgaaaatattttttaaaattatgttttataaaattatttttactttttaattttttaactgagaatcaaaattttaaaattaaattttttttaacaatttttttttcttaagtaatattttagactctaaattcaatctagaccttggaacaccaattgcctttgaccccaaaattggacccggccctcgatcccaacttcggacttgaattcaatttaaataaaatcaataaataaaaataaaatttacaggatagatttttattaaaattttatttttttaattacttaaaatatttaaaataaaaaatattactaaaccaccctctaatttattatttaacaaaatagaaattatgattaaaaattgtacatgattatgatttaaaagtgtcggcaaatcttataaactttcacaatataattaaacaatacatattaaactatattattattgtatggacacaaagtgttaaactatacaatcaaatcaatcttaaatattgtgatcttgttggattgcttttatacgtggacttattattattattactattattattattattatttgcaaataattattagagttgttggcggttagactcctactacaagaaatattgcttttatcaacacagttcgttactgcgctagtaaaaattacttttaccagcgcatttcgcaaactgggcttgcaaataggtcaaagttttactagcataca

SEQ ID NO: 66229 - DNA, 503 bp, Cannabis sativa
taatcttagcccaaagcccaaaccttattatcaaaaataatacagtttttctaattttgccataatctgaatcttaaattggaaaatttatcaatttctgtgaaataatctcttttccacaacatacgtcattctaaatttagaactaaacatacataaaattaaaaaaaaaaaaaacttatctcttttgaatactttttttttgaaacggctaacttgaatacttcaatgaagacttattagaactagttaaactttcgttaactccataaaacgaaaatttggaataacaaattataaaacataaacattatagaacaaaagctcgtacaaaacaacataacaatacaaaatatcacaacactagactagagtgaagaatgttttgaaaaaataatctttatgaaattttttattagtaaaataattttataaaatttttttattagatataccgtgagaccataaataactgttataaaatatcataaatttacattatt

SEQ ID NO: 66230 - DNA, 1320 bp, Cannabis sativa
gattcaatatttttacatttgatcgtgggacaatattgtccaataatcatggattcaaatctaagacttctaaaatattagtaaattgtattaccattacgctatacaaaaataaataaataaaataattgaaatgaaatgaaatgtaaaggaaagttatttatacaactatatatgtccataacagagtaacaattggttacaatattgtaactaaattataatagacactaacatctgaattagctccctctaaccaactctaattaactagtctttaattactaaaacactttattcatcggtggtcgaaagtggcccgtatgtgtcggaaagaagatacaaaggaagagagagagagggcctggggtttttagggtaggcaattctcatggtggcctctgttttgtttgtcatggactgggttcctagagttttggggcgcgttgggaagcctatatatggtggtactggtttcgatattcgacaattggagggggctagattgggtaatgagccacacaagaaggaagagaaaaatcgggtgggaaggagaaaataccaagaaatgtttaaaactagggtttcaaattattttgtttatttttttttttcttttttcaaaataataataataataaaaactgcaacactaattaaaaatacaactagtttcaccactaactgtcattatcattatcatgataagatgaatgctcatttattgaaagggagcccaacaatttaattattgtccatactttatatatgaatatttatattaatttatagaacacttgcaggaaggtaaaaggtggtcatgtcctcccccaaataaaaaaacaaaaatgaactcatttttcatagtacgtatatagttttttcttatttgttaaaaatttgtactttggcctcctaatttaatttttctctttaaagtttaagtctagctcttcctccatgtttggaggtgtttaattaataatcgtgccatagaggaggtagctataggtgataaggatgatcaaatgtgtggagagagagccttgtacgtacgtagtacaataatgtaatttgaactatatatatagtcataataataatgtaaggatgatgaaatgtgtggagagagacagccttgtacgtagtaaaataatgcaataatttgtactatatataataatgttgattgattgatatctacctatgtgtacgtactgtgggttcttgtcactttgctaaccagaaagttaaattaagttggtaaaaattattttgctgatcctctatactacgtagatataatagggtaaatatata

SEQ ID NO: 66231 - DNA, 2825 bp, Cannabis sativa
ggcttcttaattatattgtatgtgttgaaatataactttttcttttaatgagtgtttttataggaaaatggtaattctagaagacaagaagagaaaaatcgtagatgtacaacagcaaaaacccaatcgtattttttttggatttaatagaatttattttatttattttattgtatataaataaaaagtgacccatgaatttctcataaaccattttaattttaataataaattattttattttttaatataaataaaaagtcactcatgaatttcttataaatcaaaaattctgttatacagacacactttatatagaatagatattactaaaatattaaatattttcatgattaaacagcttcatatttaacaaggaaaaatataataaaatgccactagctagagtagtgattatttaaatatataccaataatgtatagaaagcaaattaagcaccacaactttgaagctttgggttaatattaggaatcattgaaggctttataaccaatatattattttgtttgctaatagaatgtgatcatagagaatctaaccaatacaaaaccatcttcattcatagctagactccatattcattatttttttgtaaaagacaaagggccttgcttttaaaaacatgtctcaataaaataaaataaaaaactaataaagtgatgatatataatatatatatatagttagccagccataatcccaacaaaagggttttgtgatgaatcatcatctgtctttgtttttgtttgagtatggaaattaatcatatcatcatcatcgtcagaatcctaagctttagttatatagttatgtttttgtatacagaacacatcacaccttcaataataacgatagtgggtacatacataaaagataataattattatagtggtagggacacatttggtaataatattagatcgattattattaatgtgacaattaattaaatcaagatcaaacgagtattggtattagactattttcaatggttgcaccattttagtgtacattttcaccaatttgatttagaatttattaaatatacaataattctaatgattcaacaccaaatactatattaaataaaaatattttatttaaaaatttcatattttatattatttacattaataatcaatataactaatttacatatatttactttaataatcaatataactaatttattaatatacattttatcaacaaataatttattgttatatttaaaacatattataagaagggttaggataaaaaaaaaaaaaagagttatgcaccaatttggtatatagattctaaatctcacactattaatggtggaaaatttggtgcataatttgatgtatcattatagtaaaatagtatgaagatttcacaccaatttagtagaatcaatatttagcttttatcttatgtttttaagctagtttatcttcgattaaataaaatcttgctaccaaaaaaaattgaggagaagacttaaatctcgaaaacaccaaagatgtatggaagacttatgccttctgttatttcataataaccgaagacataggtatttatttttagaaaaaaaatggtatttataacctgaatcaaagtcgccattgaatatcattgcgaccgaaccccaaacacaaaaaatcctaaaatcaaaatcattgaacaacattacttttcaattaccaccgtttaacaccaccaaattttcgagttccgtgcatgactctccaaaaaccaccgtgcattttttgacaactactgcgatatccaaaccctatatcacacacagaaaaaatacaatataagataaaaaggtgtatattcaagtgatctttatgtcaatgcaagctaaaagacaacatagaaaccctcaaaattgttgtcattaggcgatcgcctccgttcttcgaaaaccctacaaaagcgtcagtctaaactctcacatctaccttcatattctaaaataaattaatttttatagtgtgtatgtgttttcggtgagaaaactagaagatttaaaagaaattagagaaaatgatgatgtatggaggcaatggaggatggtagcggcgtttttcgttaacagaaacttggagaagaaagaagaaaatgagagtttcagctctaaaattaaggttttatagatctacgtctttggttattttaaaatactcgaagacataggtcttcacgtgtatctaatatcatgttagtatagttgagacatatgtctttggttatttcaaaataatagaagacataggcttccatgtttattagggtaggagacttatgtattcggttatttagaaacagacatatgtctgtaattatttttctttctttttactttatttttaccttcggattatatatttaatttgtcctattaaaattttcgaagattaatttacactagatttctagtagcaaatggtgtaccgtttaagatgtgctaggcaatgtagtgtctgtcatcactgttaattagttgcatcttacaaataattaattaatttttaattattattaaaataaattaagtaagacttaatattacaaaaaataatatgacatattataaggatgctagctacaagtaccctttgctatttctcaaatcaaactacccatatgccatatctctaccttattaaaatcctttaagtaatgatcattcaataatcgactttcaccgactgttgtgacatttaatgatttaaacttgtcggatcagagttcaaattttaaaaagtataggccatgtaattaaaaatcttgatgtcattaacatgaaa

SEQ ID NO: 66232 - DNA, 765 bp, Cannabis sativa
  modified_base (35)..(41): a, c, t, g, unknown or other
aaccacttacagtacagtgagtcgagctcatctcnnnnnnntgaactttacatattagggctaaccacattcttcaggaccgtgttgctctgataccacattataacactccaattttccgagatatcacacaggatagtccatataaaactatttaataagataaaacaataaaatacttctttattgaagaatatctaagcatgagatctcactgtttaaaataaaaatatttttagtactgtaaacttatataagaactacttaaatcaaaataacggatccacaatgtttaacatttagaaacattaaaagtaaaatactgcaccagccccctaacatgcagttcgcgcctcgagctcttcaatctcacttcttagccttacccttacctgcacacaaagtacctgtgagttaacgaccaataagaagagctatgtaagacataaccctcctaactagatgcttaacataagttactctaaatattaatcaataataattcacattccatgaaatatattcataatgcatgttgttcttacatgcataaatcaagtctcataccgcacattatactcgcatacgatagttaactatacactcatgttgatcagacatggtcacctaccctgccttgtgttattctcatagttggcttccaacaggacaatcacttaccataagttgtactcactcatgataatattataacctgcaagtgctatgctcacacaagcggtaagaccctaacactattctcat

SEQ ID NO: 66233 - DNA, 736 bp, Cannabis sativa
ctatccatatataacacatgatgttcaggcggagtcatcaagggacatccgaccaagctcgatcgtgtgatcaacttgcatacgccggccaggaaatatgagttggaaattttagagatgaatatcgttatttccaagcttacatgtcacgaaaataatctctacatttgtgggataaattcaaagaatgaaggcaataagcttagatttcccaatctctgcattgtagttatagaaataaattagtttcctattttatttgttatagattaaagtaaaccattcttcatgtaatgagtccctataaatagtggtttaatctcactattcagggacacgaaattgatttagaaaaaacactcaatagagaaataacgatctaagagagaattactcagagatctattgtaagagctttagagagagaatactttgttatttgtctcataagtcaatacaactaaaagggcaataggctattaccattatcacggaaccgaacctctaaaaattctggtgctctctttatatactgtttttacttttcattatttattttatctaattattttatttagactcactgtcgttggctagaagtgaagttaacaatatcaatcatctccaaactcattcaatggaatacaaaactttttgaaaaacaacaacattgaagacatgatgaagaatttgcaaccttcggaggtaaaaaaaatcctcaataacatattatatt

SEQ ID NO: 66234 - DNA, 1445 bp, Cannabis sativa
catataaatgactgtaatttacttatatagtattagaatttaattttaacttatgaattgtatttttataactatatagctatagcaggaagatgagaatgagatcatcacacattattctctcttttttttttacatctttctaaacacaattcaacattaaaatgaaataatatatttacaattcaacagctctctccttttgaacttttctttgagtgtacttcttaatgacattagaaatttatattctaattttactattgtgtttttcacttatagtcctagaattgccaatggcgcaacgaatgctcttgctcattatgcttttagggctatttttagcactgtttggtggttatccttgattttagaagattattttggctgatgtgaatcatcaataaatcttttaatcttccccttggagttcttctcttttggtggtttttttctaaggctattctctccaaaaaaaatatataataatttaagggtttttctttttaatattaccacattaatcaatatttgataatgcttaacagttaaagtttctttttttttttttggtaaacttaattacattaaacataatattaatccaattatcaacatatatcctgtaaaaattaaaacttagttgctgctaagtaatataaactccacaaatcacttacacaacataaaattgttgatgtattttttttttttttgtcattttccaattatcattctcttctagttgaaatgaaaaaaagagagagagagagagagtttacaataatatacaaatttttgtaattaattttcaataatgatgttactactattattaacgtgtcacgttaggtaaatctaagatatatctgacgttttcttattaattactaatagtgttgatatataagaaactaattagttacttttacataaaaaaaaactttatttttatattatattatttgaaatacattttggttacctccaaaatttatttgtatacattttagtaattaattagttattttaaagttatattatgggagcttataatttaaaatacatttaggtaactttaaaaatgatttttgaaattaatgagttgtcatataatataacaagctaccatttttatatactaattattttatatttatttttattattttaaaaactaattaattattgtattaactgagatttaaaaaaatatatataaaaaatgtaattaattactatattagtaactaaatgactttttttctgaaaataaatatatgtttctcacattttgaaatgttcatataaaagagtagattacaatataatttatttgagggtcaaccgagtaacgatgtggttaaaaattatttttaaaattaatataaaaaaaaaaagagaaaaaagagaaaaaagataaagatagtaattaaaagttatta

SEQ ID NO: 66235 - DNA, 937 bp, Cannabis sativa
agaaaaaacatgtggtatataacgtatttaaaacatcaagtatttatgccgcaactgattccttgattgcagcctcagcctttgacaatgcacaattaccatttggttgggagacctttcctctgttttgtgatttcttgaatttatgtaagtcttttgataaggtctatgtgtgttatgtgaaaagagagaacaatgtgttggctgatatgcttgctcgatgggcgcgagtgcataaggccgaggccattggcctcttacgggatgtagccccctcttgtggttactagttttccttgctttcaataaaaaaattttacccataaaaaaaaaaaaagtatttatgccgcaaatactctatgtttgaatatgacttaatagaaaagtagtgacagaagtaacggaaatataatttaaggtattgaatccgtcgaaaaaaaacatgtggtatttaagtgtataaaactgaaaatgtaaagtatttatgccgcaaatatccttatattttatactattatatatgttttattgttcaaaatagagaaaaagagttcctaaagaatcgttctcttaatttttttaatgctcccataattttattttgattcaaaatattcatttagtttctttttccttttgttcttataagttttcttttatgcaaatgttcgtacaagttttatttattcaacgagttacaataaaacatagaaataaatttttttggaacttgtagaattatataatttaaatacttttacataattgtgtaaattatagttataataggtattttataatttttttaattaattttaaatactttaaagtgtcaaattataactacacttttaaatgtggggttaagtgttttaaggataaaatacattgagggtgttacggtaatctaattcatttacagtgtagatcattcata

SEQ ID NO: 66236 - DNA, 718 bp, Cannabis sativa
caggagaggcctacttggtcaatgcatataatcagtatatgtgcaaccaacattaactcctcttggtcctgcttattcttttgactatgtcgggcacaatatgcgactagaccttgtctcggtcgcatcttctcacaagtttacatcaagcgaggttagctctactggagctattttattaacacgtcatccttttccatcgggaactgggtccacgtgttagctatttacgagtctgtacttgtatgtctaggtaataaatttgcactataacacatgcccctagttttgcggtgacaactgtttgtcaagtgaaactattcacgaggaaaaggcgagttgttctgtcacatgacaataatttttggttgtcttgtcgagggtcttaaaagacaatcatatttatttccttattttcgtaagatgccacatgtcatcgaacccttcgaggtttgtgcaagcatggcttgagataaccattggattaagtgacctttggtttttgaatgacacatgtcgagatcctaacagatgaggttgattcgcatttaaacccgtgggatatgaattgatctcacttcattttccctcttattttcaattttcactgagatttttctctttgaaacttcaaaagaaattttttccaaaatttcaatttccttttctgaagattctctcaaagttcgaaggtttttttttttcgaagtgattatca

SEQ ID NO: 66237 - DNA, 601 bp, Cannabis sativa
cccccccccctaaaatgtcgtttcagtacacccccttatctgttttgacatccaaaaaagctttttagttcaattctttttcatcatcgcgtatgttgtagcttttacagtagttgcttagcaatcgcaatgttttaactttattttcaacacggtaaattatccgaaattttctgaaaatatataggtgctcaagtatgtgatcatgaaaaagaaaatgtgagttaaaaagctcttgaaatcccaaaaatgatatttgatcatctcaggattcaaatagagagtaaaatccaacagccacagctcctaataggccaaattcatctaaaaaataacattcatttaaaaccctaaaactcatcataagcccttcatttcacctcaaagtcaaaaacacaaaaaaagtgtgaagctttccatcatttaaaaccctaaaactcaaatcagagataacgaataaaataagcaagtgcataaatcgatctgcataattatataaatatatagatatatgagtaaaagtaccaggaacggtctgatatccatggttatagtgagtatgagggtatcgaggatggctggtggaggcggtggcggcggg

SEQ ID NO: 66238 - DNA, 2530 bp, Cannabis sativa
  modified_base (1631)..(1638): a, c, t, g, unknown or other
  modified_base (1966)..(1973): a, c, t, g, unknown or other
aataataataataataataaaccccccaccatcaaattaattattacattactactaaagtaatattattattatttgtaattgttactaccaaatatactttggaaactatttggttttgttttatatattgttttctggtttgtctttattttgtgattgtttattaattccttttgtttggtttttaatgaaatggggtgttgagtttctaggccatccaaaagatgtttggattctcaaaattatgtaatatgttattcaccttaaataatgtattttactactatagtactattaagctccaagtaattaaaaggcttctttggttaagaagatatcatgttacttttaaatttaatcacattgttaattatttaagccagtatgttaaaaatgcgaatgaatactagcttctaattaagtatttagtactaaggcttttagtgatttcgaggaagctaaaagcttttggaactgcctggagcacttttgctcttgctctgagcaactaaaaacctctattttctttagtaaaaacattaataaggggatgaaagtgggtatgaagaatgcacttggagtctcgggtccaaccatagacattaagtatctaaggcttcctttgttccatagaaggcataaggatgctaatttttactccatatcttggataatctcacttcaaaattacaagggtagaaatgaagacgttgtcataagttgctacagcgtctcattaaattggtgtgagaagagtaacaacggcctcaatcttaaagcttgggataatatctatctccctaaattttgtggtggccttagtttccaaaaaataatgaaaatgaataatgctttcttagcaagtgaggttggcatctcattaatgaaagtaataattctttttgttgtagggctctcaagggtggctcctttttatgatgcaagtccaagagcttgaattcgtgattttagaagaatgatgtggaaataaaaaaaaaaaaaaaaaaataaaaactttaagcaagggtgcttgtaaatttacagttaatgggaaagatatcaacatttcggaagactcgtgggtggcccatgggattttgttatgtccaaaaccgaatggcgagcctcaggttagcctgagtactgtgcactactaaaaaattaggtttctccaacaacttaaacagtcgactaatgtattgccatcagactctataattgtcgactattcgaccgtctcaaaactagataggcggtggtggaaaatcatcgacgaaaaaacttactaacaaattaaaactgtcgacaatagtgaaaactatagcttacagttttaaaccgtaaactatagtattttagcattttcctcatcttctgcctcttaagcctcccatactcctcatagttggacattaagaacacgacaaagaatcttcgaaagaagattaagcagcgaaatcctttgattcaactcttgatttgtagatgcttctaactacaaacaaaaaaactcaacaatataccaaaaataaataattactttttttgtaatcttctttataattttttagttaattttggttgtcttttggtaggttaatttggatttttgccccctgaactttgannnnnnnnaaatcatgtcccctgaacttttcaagtcgttaaaaattctccccgaactattgagattgttagatttacggacttttgtccaattttactaaacaaagtctgatgtggatgaaaatttagggggcacaattttgtacttttgaaagatcgggcggcatgatttaatagatatcaaagttcaaggggcaggatttagtatatagacaatcgtcatattagtaaaattgaatgaaattggacagaagtccttaaatctaaccaatttaatagtttggcgggatttttttaacggcctaaaaaattcaggggatataatttggtacatgtnnnnnnnnagggggcaaaaatcctaattagttgttaatttttttttattttttattttttgctttctcttctctctctatttttcatttttatttttcccccaattctctctctctcttttttctcaaactatttttttatttttgtatatatataataagtgcactaaatactcttttatatctcattcttttaatactctttctctctcttaaaaaaaaaaaataagagcactcttattttatatatgattaataaaaatagtatatttttttttttttttgatgttttgtaatttattcagaatcaatttatgaaggggtttttacaaaaatattgagttttgggcaaaagtttaccattttactgtcacatgaatatttttacaaaaatactatctttttataaaacaatcataagacagcaaaacaggtaaaataatagtagaacaactaaaaattccaccccgcagtaaaaaagtaaaaaaattgaaaacttggtgtaaaaatgtcatttatgaatgactacgaaggcccaattgtaatattttgggcttggaatattg

SEQ ID NO: 66239 - DNA, 975 bp, Cannabis sativa
tggctttgaacctcacaggttcattctcattgattccctctgtcaccttgagaatccatttccactccacaattttcttgttctccggtctcagcacaactacccaagtcttgttcttacgtagagaatccatctcctcatccatggtttagatccatttagacttgtttacacttgaaattacctcttcatagcttctgggctcttcaattttagtttgttaaactgctgccaatgcaaatgctattatgtcaactttcgggaaccttcccggaggttgaatctctcttcaagttcttcacgagccaatataaccttccaaacctgtctgtctgaaacccttttggcacctttatttggtctttgttatcttgttcttttgactcaacaatagcttccaactgtgcattgtcttccggttccccaacaacttctggttgcgcattgtctttcggttccacactatctttcgcctgtgaactttctttcgagagcttcgtttcgtactccattacacacttgcagtgtctttgtttcctattttttctacatcacacggagacacactacctttcttggaggtcaagtaaggatattctaactgattcaaaacaacatttctagcaatcacaacctttagtttacccttcctagaaatgtaaattctataccctttggttcctaaggcataacttagaaaaattcccttcacggacctaggttctagcttgtcaatggattggtgtacatatgcagtacacctaaatgttcttaaatgcgtttggttgggggttttattgtaccacatctcataaggtgtcttaaggtaaggtgtcttaaggtttgggctcctgataacaaggtaggttgcggttgctaaggcttccccccaaaatggtttttctaacccaaaactaaacagtaaacatcttactttgttcaacatggtttggttcatcctttcagcaacaccat

SEQ ID NO: 66240 - DNA, 862 bp, Cannabis sativa
  modified_base (406)..(409): a, c, t, g, unknown or other
attgcgtcaatgatgttattaaaaagatcgtgaaaaaatatattaaattggtcgtaaaaattacaatttattataattaaatatatttttacttattatgactaaaattaaattagtgacaacttctatttagataccatgttttattcacaagtaattgtgactaaaaattaattttagtcacaaaaaaattatattataactaaaaagttatcactaaaagtagcagttttttgtaatacatgatcgtgttcattattgttatttaagaaatcccgtaaatttttgagaaatttaaaaaaatttagcatgccgaacatagagtttaatgtggcattcatgactattttattttatatgtgtgtaaaataaacagtttaaatattactttttatattgtaaattnnnntaaattttttaaaattttaaaaaatatcttaaaaaaatataaagttcataactataaaaaaaaaattaaaattttcttcaagatatcaaattctgaatatcaaaacaaataagagtaaatcaattatatagccaataattaatgctctcataacaattacaatattcttacatttaatcaaatttgccaatatataagtttccatatttggttgtgtagtatcttctttctctcattaatcttttaggtaatgattataaattagacaaacaaaataataattagtatatagccaaaacaaatgtgtcaccattaaattaatatccctattaggaatgtggatatattatatatttatatattctggaaagttaaggaaagaaaaagtaattagggaattaattaattatacttggtccataaataataaatagactaaatatgttgtcccta

SEQ ID NO: 66241 - DNA, 941 bp, Cannabis sativa
  modified_base (35)..(66): a, c, t, g, unknown or other
tttcatcgttttaaaagttcatatttagggtgttnnnnnnnnnnnnnnnnnnnnnnnnnnnnnnnntggtaaaataatttccaataaaaactccatgggcttcgaacacgtcctcaccccagtcggggtcgcttcttgtttggatcagccaccaccgaaattaccgaaaaagaactaacaaaggaagtgaagaaggggatagtctaatttacgtaaaaagaactttaatatttataaaaatgataaaattttattgtaaataatataattaactgttaaataattatagtaggaatttatacattaaaatagtattattatttataaatattaattgttaaaaagagttttattaaatatttatattaaaaaataatcaattataattaataaattttaaaaaataaaattttatttattaataataatctactattacagattaaaaaaatataactatcagtatcatagttataattaatataaaaatataactattgaaataacattatgatataaccattattcattataatcattttcaaacattgaatttgaataagatatataatatatatagagggagtgagtatataaatctttgtcaagagcatatatatatatactagaaaaaagttacgtgcaaggcacgtatatttagttttatgttaagtctttttactttatttaaaataatacaatagataattgaaaaaaatatttttggttattgtttgaaattatttttacatagattccattaattaataaaaataacgatatgttgcaaattaaaagttaatactcttagtggtcaagttttaatcttcttttgattgacaaagaagacagtgtaatgttgatttaatatcaccatatatttggggaatagaatgattctctaaaggttcacccccaaagagtagctttgaacttggtat

SEQ ID NO: 66242 - DNA, 3507 bp, Cannabis sativa
tttcttttctatccaaaattttctcggtagccaaaccccaactctaaatataaacaaacatcccaaaatttctaattataattaccgaaatcaaaacagaaacaaaccaaaactttcagaattattagaaagaatacttcagaagcctaaaatctgcattacattgaaaaatatcaatccaatacaagtcaataagttaaactaaaaccccatcacttaaggtttatttgaataaatgatcaaattttaaataaactctaaaataattcaaaacaaaaacagttaccccaacaggcgaaacgcataatgaaattattaagaaacgaagaaatgaaattgataccaatccgggtaataaatacatgaaaaattaacgtcagtggtcaaatataccagcaaattatctataaatgaagggggaaaaaaacacaaatcagattagatcagatagagaagaagagaaagtacccattttgaacgagagattaagattgggaatcagagaaaatgagatgaggtttgaaatgcgggaaacgcagatcgatcgtgagaaaggagagaaacaaaaagtgaagatctcagattgaatgaaattatggaatcgatcttttattcttttaatttattttttattaatatatgaaagaagaaaaaaaaagtgtgcttgactatctttgtcctttgatcaaagcgcctctctttttaaataaaataaatataaatatttttccttttgccttaaatattttgtcacatttttttctttttatataaatctctttttctccttaaaaaaattctcactctttttaccataccattttttatagtaatatttttaaataagtctaaacatgctatttatttaggtatataaaagagttttttagtcttattttttttaatgatatgttatagttatttatgatcatttataaatttttaaaatattctaaacagtactaaatcaaaaatataatttatatattttgttgtacacctaaatatgtttttcttataagatggtatttaatttggtataatggaatagtaatagtaataagaattaattacaacgcgtaattagaataaccaaagtaatgatatgaatgtaatagaaataaaaatgtgtatagactaaaataattttattatttttattttataatcataaaatattaaaaaaaataatgtagacccttgatttttttttactatatattttttattaaagtgttattttacttttataatagattgtaattgtaattggaataaggattatattttggcatcaaattattattacaagactaatgtaattatcatttaaatggaaaaataaataatataattcattaccatctgacctgattttttcgcagtgttcaaaatatatttaataacttaaaaaaactctccatctaactttctcttttgcatttatattgtcaagtgagcccttaaagtccttttttttttctttttttgtggaaaagaaaagatcaaagggtcacctttttcttaagctgatcaaagggtcagattagatgatcaaaattggtgaattccaccatcaatcatgactttcagttttttacctttttcacccagaaaaataatcatgtatttttatcaagcacttcaaaaaaaaaaatccttctcaacaataataataataattaaaattctggtgttttttgtgcgaacatgtaataagaattttattagtaaagaatcatttgatgttttctttaaaattatatatttttttttgaacatatttaaaattatatttcatgtgcacaaactaatatatttttcataaaatttattgaaattttaagtgatgtgatggtggtgacaaaggaaaaaagacaaaaacaataacgaaaagcatgtgtgcccacagacaccttggctacaagaatacttaaagggtaaagttatgatagtttttttcgaaaaaaaaaaaataattaagaaattagagggtaaatttgaaaaggtatgtgtttgtaacaaatataattgagtacatcactttcacaaaaataccaataatttatatttatttacatttatattccttaacacctggtgggtttgtttaaaaaaaaaacacctgatgagaaaattaaaaataaagaatgcatcataagtaaagctgggtttaattattgtggatcttgaaatgttcctggttataattactataacaaatgttccactattggccccatattccttttgtttaataaaaaccttaaattgtaagttatatttataaaaaaaaaattgtaagtagattttttgtactttatatctatttataaaaaaaaaatttaaacaatagaatgttattattattattttaaaaaaatcaataataaaatgttattagcttattagttgataaattatgaaagattaatatttataagaagaaaaaaaatagttttagtcataaataatggatgaagacaaatggatatgcatttggtgatacaccataacagatatggaggcaagtgtactagatctttctcactttttaacttttttattgttgagttggcagtatatgattggatgagttgcatcgcactgaatatgtttttaataaacaactgaaatgagattttaattaagtaaaatgagattgtacagttaggcaggggaactgttaagtaatgggacccacctgatttcaccgaccgagatgagtagtgggacccatcagccgcccatttggttagaaaaagggttggacggtccgatcattacgaactttggaggtttgtggggtcgcttccacgtagccgccgtcaatagtttactttggccttttggtacccaactcagtgccgacggctaaactcatgctctttctcaatgtaacaattaacagaacacttaatttaaaaaaaacaaacaaattaacacaattttaaatttttgttggttaaatttgccaaaactacttttggtaaaatttatcttatgcacaagtgacatgtttatgttagtctaaacaatttaaaattaaaaaataataatttattttaaaaataaaaatatatatataaaatttaatccttttgttttctttctatgcaaaaataaaataaaaataaaaatgaaagcctttaagttagaataaaaaggaagaagcatcaaaggaaaaatgaaatccaaataaatatactcccaaactgtgataatgtaatgaagagtgagaaagaacggaatgaaaaagaagctcaaccactgaaggaaaggctcgaggctttatatgatatctgttaggggtcgtttggtacgaggtgttcaaaataatttaattataggaaatattatgaaggaaaatatgattatagggaaatatatagagtgtgtttcgctgtgtagagtaatatgtaattatattctgttaattaaattatactgtttggtcgagtacaagaatcttatatattattttgaaaaattaaaataatttttttt

SEQ ID NO: 66243 - DNA, 1582 bp, Cannabis sativa
tatattaatcatctcttgtttttatcaactaaattatgtgttaatattcttcaaaaaatttacttatgaaaattatgtagaagtaattatgaaattctagaatagtatcatttaagctagttgattatgtgttatgttttattatgatgttgtttgttatagaatattatattgaataaaagtatcaagtgattgttgtaattaaatatcgatttctgcacgtacgttgtattaaataatttaactaattatttcatacaaaattttaggaagtaggatggggaaaagtgagtatgatcgaagccgagcggcgtctactagcgaatgccctactcgacatatcgaaccaacgatttgtgctcctctctgaggcttgtatcccgctcttcgacttcaaaacagtctacaattacctaataaacgccaagaaaaaccatgtcatggcctacgatgagcccggggcggtaggaagaggccgatacaattaccacatgtaccccgaaatctccctaaagcaatggagaaaagggtctcaatggttcgaaatggggcgagaattggccattgaagttgtttctgaccaaatctactttcccattttccaaaagtattgtcatggctcttgttatgctgatgagcattaccttccaacatttgtgagtatcaagttttgggagggcaattccaacaggagtttgacttgggttgactggtcaaagggtggtccacacccagctaggttttggagaacagatgtaacggttgagcttttgaggggtttaaggaataataataatactaattgtgagtataatgataatggtactaatctttgcttcttatttgctaggaagttcttgcctagtgctgtggataggcttgtcaagtttggccccaaaattatgcacttccattaagtttagggatacacaaatgagagtgatgtgatgaccattcttgtactcaatattggtgcttcattttgtttaattgatttttttgtatgtcactccattacattgttaatacattaaagagcttttcttgctctttcatatcttaagatcttcatattataggtatacatagttttttataattagttaacaaatttttatattatttaattatttaattaaaatgtgtgagaactgatattaagatatcgagtattgcaattagatatctaatactatttagaagtgacactatataaaagattgtaacttaatacttaattatatataataatttaatattttatttgtttaatttatatgaaatgggaaacaattcttagtgggatttaactgttatgaacttataatacaaaccctttttctttccaaattcatataattcatacttgcacggtgctcaagggaaactatgacttggtttttgactgctttactagtttttgatacttttgcttgaaattatcgaagccctttatgaactttcctttgtgttatatttttcacaaaacatgaatgtttgggaaaaaagaacaacactaatcaccattcacaaaactctactcatcaaagtgagtggtaataaaatatgccaataatatata

SEQ ID NO: 66244 - DNA, 802 bp, Cannabis sativa
aaatccacgtccttttattttgatctgaacagaggcagacccaaatacttaatgacaccctcggagagccaatacccaaggcctccttaatgcctcttctcattccactggttgtgtttttgctaaagaatattgacgttttgagcttgttcacttgttgaccagaccaggagcaaaacttctctaggaaattccaataacctttggcttcattcacagtggcctgacctagcaggattaaatcatcagcaaagaataagtgtgttaggaccggacctcccctacttaacttaatgcccttaaagactcccttcgcaagatcctcttccaagagtctcgacaaaacttcagcagcacaaataaagaggtagggagaaagaggatccccttgcctaagaccacaggagggtataatcttacccaccatccctccattaaggaacaccttgagcgaggtggtggagatgcactgggtgacccaattatgaactttctgggggaaaccaaaacaatcaagagcatgatcaatggattcccagtttagcctatcataagctttaacaagatcaatctttatagcaaagtatccctccttgccttttttcctgttaggacgagcacattgttatcctgaatatttctacctgggacaaaagtcgcatgagtagggcaaattagagaaggaaggagaggcttcaatgtatttgtaactattttagaaatgaccttgtacaacacattacacaaagatataggcctgaaatggttaggtatttttggttttgaatttttgggatgagaa

SEQ ID NO: 66245 - DNA, 1386 bp, Cannabis sativa
gtactgtcttacaataataatgaagttcgggttttttttggtgtactgtctatgcttttcctttttgttaccacagttttcctctgccacaggtgaggcttttgaataagttcgagtgagggtcaatctgtctaagacaagtggcctatttctctctcttttttttaaacaataatgataataataataatataatttgtaactaatttattgtgaaacaaaaaaaatattttttaatattttgaagaatttttaatataattattaaagtcatcataaattatgttaaaaatacattttaaaaaataaagttcaactcagtaataaaattgattattatattaaaaaaaataaaaaataaatgcatatgtctaaactttgggtggctacagtgctagccgttatgtgggtgacttggagtgagagaaaaactagaatatttgagggtaaagaatctttagtagagtagaggaattgtgggagatgataaaattctgggtagcaacttggacttttaaatcaaaatattttgaggatttttcttttctagatctgtgtagaggatggggaatttattgtattaggtctgttttgttttcaggtaacaaccaggttttgagttttctataatcacttagtaattgtagaactcttcgtttgtttttcgtttcttcttgggagtcccaaattttatgtaaacatggtgttcctctaccatatgtgagggcttctaataaacttgaagacatttgacctttgtctctatttacttggaaactttccttggaccatcttagtgcaaaatggtcaaaacttgcattgggacatcaactagacataccacgaatatatttgaggcatcagaataagaatcagagcaagttgatttttgagcctccggagccccgagcacccatcgccctggttgacaatttgtcaatctgggtgccttccaagtgtccgatcggagatccgacttttgcatcttcttcgtcttcatcaaaaatgggaaattatgttctttcaaaggaaaaacaacaaatccatgttagtacaaataagagggcctagcgcccaggttgacacctggggctaggtctgcgaatgtcaacttgggccacttaacatggagttttttcaagaatttttttgagcatcttccctgttttcaaaaaatattgagattcaactattttcgaggaccaaacggaatttctggaggggcaaaactgggacccagtgcccaggttgacacctggggctgcgctcagtgcctaggttgacatattgtcaacctgggttgttttcgatcaagttcagcataaagtattccgagcattttttccgtcattagaattaacgaaaattcaagtaaactcggggaga

SEQ ID NO: 66246 - DNA, 1093 bp, Cannabis sativa
ggaatcttttaaaattagaggaatcaatttgtacaaattataaaagggtataaattttgatataggttatattattaagggcaaataatgaaattttccttttaaaatatgagttatgtctgtgttataaaaaaaatataaatatgttgtgttgtgctattaaaaaaatatgggtcgtgtcgtgtcaatgtagactcatatgtttatgttgtatttggatttgtgtcgtattttacttttgttggcccatttttttctctttttgtattcaagtttgaattcgtactttactttttcacatctattttataattaatgaaccaattattaaaagagaattgctaaaagtcattattagtgtctatcactttctttagtgtcatatcgttattggtttaattaagtagcagatctcatataacttaagaaaataacttttaggaaaatattgctaaccaatggtgtcacttataaaaggtattagacaccattggtatctgatagcaatactctatatatttctcataacttcaattatatttatataattttttaataatattttacaaataattatatcaaataactattaaaattattataatttaaatatttactcataaatacttaaatttttatgtcatactttataaataaattaatgtatagttttaattttatttttttaaataattttaattataaaattataatattcactgttatatttaaattttattattattttaatttatttataattgataaatacataattatttatgggtaaatactttttggaccctgtgttttgtaaaaattatcgattagactttagaccttctgttttgttaaataacaaaatggatcctatattttctaaaatggtaaaaatatgaccctaagcttaattttcgacaatttttttttaataaaaccaacttgaagacaattctttacacaaatagatataaaaaaaatgtaaatacatttgtcataacacttttagatcggattattattaaattttaatttgattaaaaatcagttcagggtcctatttgtacttttttaaaaaatacagcgtccattt

SEQ ID NO: 66247 - DNA, 843 bp, Cannabis sativa
atattttttgctctaatcaattctaaatatctcatataatcatatttatttgatgacgcatcatctatttattacctgacatacattaaatcaatactaacagaatgttaacaatgatattctttatctctcctcaattaatattaatactctctctactaactaatactaattataatacttatattacttcgtattgttaattaatattttttattgttagattagtttgagataatgaatcatgatcttattgaaattgttcaaatcaaggtattgaatgtaatcatgactatatatatgtatttattacattaatagtagtactcatatatgatcattaattagtttattcatggtattactattttacttagttttcaaggggaaaaaaaaagctatctcatttatagttattaattgtatataaaggatgattcccaatcacagaacatatacatattattttttttatttattttttaaaaataaaattcatttccaatgagaaaaaattattcaaggaaatgtaagtccagagcggcaaggcctcattccataattaaaatgatgacgagagagactatgatctctaaagtccaaaaagaaaatttctatgtatcaaaatatgataatgatgaatataaaaatgaagaaaaagtatcactagttgtgtaaattaactcagttctaagtaccataagggtttgaaaattatatatatagtatcgattgggataatatacatatatatatatatatatatttgagtgggtgggtattagggtgactaagtggaatgtctcacagatatgggaaacacaagatttgggggtccctact

SEQ ID NO: 66248 - DNA, 1176 bp, Cannabis sativa
actcacatatttataattgagcattctaatttatatctgaatactcgtattatttggtattttctaaattcctccgacaacacttccatttcttttatttttggtatgttttaattattattttattattttactttgatgatttgtttttatttttctaaaaatcaatctcatgttattttctagctcactatcatagtgttctcatttcatgtatataaaattaattttattatattattttttttattttaattataaaattattttaattttaggttaattttcatatttggacaaatgataaattttgaagtgattaagaaaatgtgagaagcccaaaccgaacgagatttctaccttaccatactatttatctgatcaacttaatttctcatctccttatttttactctttttaagctatttacatttctattattttataattactaatctaatctttacttttaatttatctctctatagatacgacatagtccgtttattaacgcgaacgcagtgtagtttattgggcaatattaattttgggcgccgttgccgagaaaattatgcgctacaagaagttagtatggtttgtctattttttttattattgtaaaaaaaaaaaatcatacaagtaagaaaatttataacattgtcaattaaattaacttcattatagtttatttatttattattttctttatttagatttatcatagtcttattttagctataggtatgttagtttttcttttcctttattatttctttaataaacttttagatctaagattagactcttattctttttagattggcatttacctttttaaataaatatagtgtcaagaataattgtgcaatggtgaaagctgtaaaaattaagattattctatctaagaaagattgactttaaaaagtttgtggtacagtaccctttacactttctagcaatctccgaaagttctagtaaaatgtaagacgaagcggtaccttgacaaccttcccaatcgacctaagaatagctcatgtatataacctttaattattagatagttgaattatatactaaataaaaaaatgatgaagaagatcatcgccgatttgaatattgttttcattatatcttgcttcattaaacaatcaaatcctattgctactgaaggtacta

SEQ ID NO: 66249 - DNA, 1092 bp, Cannabis sativa
tcttgctcttctcttccattcacatattttgaaatatcatataccatggaattcaaattctaactctcaaatattttttcaaaaggtgttttgagtatcaattcacacaatttgaggtgatactcatgcctttgtggaagactatgatgaacacaatcgaaggaggagaagatttaaattcaattcttggtaatactttgcgacagaaaggataaagtgtgagagtactaaaaggaaggagacaatatattccgttgtaaccgctattaagatttattaatccctttatgtgtttattttaattattttaggaatccatgttaggatgttagattagtcttaatctaacatatttaagtagtaaataagatcctggtaaaaatagtttccaacactcacaataccaaagccatcaagcacactaatagaaattagatttctagatagattaggcacataccttatagttgatagggttctgactattccattatgcatgttgaattttatagatccaaagcctttgatttcaaaggtctgattattcactatgatcactttacctcatttagattctctgtaatcaaacatgtaagctttatcattagtcatatgaaaagtacattctgaatctaagatcaatcatcttttagagatgatgcaaaaatataaactttaccactatctgtactatcataaccatcttcatagttggcttgattatccttaaatgaattagatttagggttagaattatctctctgtcctttgtatttcttaggtttgcctttgttcagaaaataacaatccttttttgaaatgtcctagtttgccacagttgtagcagccagtaggatcaattgggcctttagagtttgatcttcccttattatgattgttttctttgtgataatctctattgtggtttctgcttttaaagtgtccaggattcctattattaggtctcccttactgaaattcactttttcattagaacctccacgtttctcacttttgatctccaagtccttagacttcaaggatgagatcacctcttccagtgtgatctctatcttgcgatacttaatggca

SEQ ID NO: 66250 - DNA, 1633 bp, Cannabis sativa
cttgaaaaagtaaaccccttagaacctcatcaatgaaatcccactcaacaatatcgtaggctttttgtagatcaagcttgatcatgcaattaaccttagatgatttcctaccataatgcctgaccaagtcttgaagatcattatgttgtgagctatgaaccttcctttgacaaattccccttggttttgagccactatatccagaagaatattctttagtctagagcaaatgacctttgtagctgtgttatagatcacattgcaacatgcaattggtctaaaatcacctggagtattgggacatcttacttttggaatgatatttagataagtagagttgaattctttaataatcttcccagtttgaagaaaggatctcactgcatcacaagtatcacccctaattaggtcccaattgtcttgaaaaaaaatagcttgaatagccatcttgacctggtgctttagctctaggaatagcaaacaaagcgtttttaatctccttatctgaaataggtgtcaagagagtagcaccttgctgccttgaaatagtggggccattgctaagaacatttgagattactctccttgtatctgtcatttttgtgccaaggagctgcttatagtagtcaagaaatatctcagtattctcggcagggtcatcaactctattcccttgtgagtccagaatagagaggattctattttggttatttctagttttgatactagaatgaaagattgtagtattgtcatcaccatctctagtccaactagttttcgctttctggtggaggaacaattgataattcatggacgcctatgtaaatgtgctcgcggcctcaagtttgtcttgctacaaaatctgattaaaaggctcaaggaacaatttattttgacaggcctctagaactccccttgcttgaatagttgctgattgtaagtcagagtatccttctttattgatctatttaaaagtagcctttagatctttgagtttggcaattatttgatacatctttgtgctatgataatgctgctgccatatgctttgaactttccttgcataatctggatgtgatccacattttgaagtatcgaaatggatttttctaattgtgtgttagctgatgaaaagttacaagggctggaaaatgatcgaacactccttcattcaaaaatatggcttgagctcctggaaagctatccacccattttgcatttgctaggactctatccaatttcgagtaaatgtgatcacctccttattgtttattacaccatctgaagaatttgccactacattctatgtcctccagctggcagaaggagacacaatccttaaaagcatgagaattgtggtcttttacccttctaccaactctttcttcttgttctagtatgtcattaaaatctcccattactacccaagcatcttgagtagcaatggagtttaagtcttgccataactcccttctaccatcctcatcactaaaagcataaacaaatgtaacaagaaaattcttaccatctgttatcccaattttcacactctgatgtggcatctcatgctggtgacacgcggacttggttctccataccttcccaaaatagatgttccgagcagaacacaaca

SEQ ID NO: 66251 - DNA, 747 bp, Cannabis sativa
gaagtttgagttctttattgatcaactaagaacctccttcactccaagagcctcgacaaaacccgaatctactaatagtaaaatattacatcgaagagaatgctagacaccaataatactttttaacaattctctaaatattatctctaaattaaaattaactttggttgaggctagagctagctgaaaataattacgtcacgtgtcaattcaatccataatttgttgtacttgtatagctttgtatatgcttaatatatttatattttgctcgaatttgtattatactttgttcagtttttttttttcaaatacatgcttctcattttcatacttttattttataacgattattgagctaactaataaattatatgtgtttttattaactttaattatttttatataattttacataatcatataaaaaataattataatttttaaaattaaaatatttactatcattttcattaatttataatattatgaaattatgaaattatcaagctttttaacgtgtcgtactttcaagtttcatgccatcagattaattagtcaattcatgcttacgtatcgtgctttttgattatttattatgtcgtattgtgccaatttacaacatcatacatgttatatctatgtcatattttttcatattgggccgtactcatgctttttaaactcacctattgtcaaaaaatctaacctgtatttacaaaattagttagaagtaataaaatgaaa

SEQ ID NO: 66252 - DNA, 816 bp, Cannabis sativa
caattgatgtacctgaattccatagctacggccagttaaacaaaaaaaaaattccattatgagtggtggaagtagtttttccacatacatttcaatggatagctaagttttgtaccaaatttcacccactgtttttacttaataactttagagtatattttctgtgtctattttgttttttcttttcataaaccgtatgcagaaaattgtagattgattgaactcgttgtatgaactctctaattcactagttaagcacgtgttctctgttatcattttcttcattttttttccttttatgatcaatttaattcttgtatccaactcaataatcttgcaatgcagaacttgagattcatttgcatatctgcatattcttaattgaaattattttgttatccctattatctcctttaaaaaggttgtggttttatatattgaattggtcttggcttggcctaatcatgcaagatattttctcaccttcaaatttcatgccggataaaatgcgcaaaaagagggatgggagaaaaaaaaaactatgttctgcattgcaagattattaagaatatgcagatacattgataaaaacattaatcttgatggagatgcggggtatcgatccccgtacctctcgcatgctaagcgagcgctctaccatctgagctacatccccgttattgactaatgaagtataactttactaagtataataaagtaaaacagaaaaactgtaatagattgataaaatgaagtctaactttagttactatattgctaaaaaaaaaaaaatttagttactataataaagtgaaa

SEQ ID NO: 66253 - DNA, 778 bp, Cannabis sativa
aacatgccagttgaagccaaaccagactagcaaaaggacaatcccaaaaaaggtaaaaggagtattcaatcgcagaacaacacaaatgacaacttgtatcaattagtgaaagaataggcctcagttttcctttagttaataggtcatctgagagaattttccaccagagcattttaagcctatcatgtatcttagcaccccaaatagttctccatttactatctccgtcattagatgagttcaagttctttatcaccctgtaggccgacttgatagagaaacaaccattggattctggcatccaaagccaagagtcaatgacaggcctatccggtagggtaatattgatgattctcctagcatctactgcatgaaaccaatgattgatgagatcctcatcccattggttattgttgataaagttgctaaccaaactaacaccacccgcatcctccacccgagaagtaggtagggggttcactcccagaacccaagggtcaaaccaaatggaggtagcactcccatctccaatccttggcaaagacccctggagagatgaactcgggccttaagaattgccttccataaaagagagtccaaggatttagcctcaacatccaagaattgttgattagagatatacttagactccatgatgttgcgccagagacagtcactattagtcagaatcttccatgcccactttataaggaaggctttgttagtagcctcagaagttctaaagcctaaacctcctgatacttttggtttgcaaaga

SEQ ID NO: 66254 - DNA, 1221 bp, Cannabis sativa
aggcctgtgcctagggctcacccaacccaggagcctaaaattttttttctcttttaaaattatacaatttttttactgattttgaaaaatactacatttttattaatataagggccccaaattttttttttcctgtggcctactttgtttcagggccggccctgataatagtgtcaaatatttataatacaatcacacgaaaaggcttgaactcgtcatcctgagtcgggtaatgactagttttgttgagccacgtaactcgaaatgatcggtcctctaataaatgacaagtaatcgggttctaatataagataatggggacacttattaaatcatgatcttcttcaattgtcacattggttacccaaataagatctaattatccattttatttttttttttataaatgatataattaaatttacattttcagattgattgattactatttctttttggtaatctagagtaaaaggaagcagattatttcccaatggagattaattagttgtacatttttggagtaggtaaccaatactccatgggtgaaaaagtgagatttattctcaacccaaaatctgattccatggcaaaaccattgcatgtcagtcccttatggtaccttaattttactagtaaattttatcttatatatcaacatatatatatgttaatgttacatatctttctcactttctgttgatagatatttctgttattatcactactacttctagttgatcccacacaaagttgcaatgcatttcaaaaaaaaaaaaagtaagcaatatactagtaaaattcaaaactagttacaagttaccaaaattattgatattttgataacaaattctgctgttcttataaactaggcagtgaagctgttgtgaaaaaatgtatcattttttcaacatccaaagcattccaatcctagatacgtacagagaagaagtggcttttcgcgattgaaaaattcaatgttgtcgagtttctggagctcatctgaagcttgccgtttcacatggatgaaggtgaagcaggtgcatcattgagtcgagctcatctgaagcttgcttgccgtttcacatggagggatgctaagtagaaaatgggccatcacatccacttccacacagaaagccacaacaagacgagatcattcgcaaaaagggatatgttctaaaacaaaatttgtagcaatatctttcatagcttgttgcg

SEQ ID NO: 66255 - DNA, 807 bp, Cannabis sativa
aaagtttctacagtatatatatatttatagggtaatactatggtaggacctaacaaaagtttcttaccgatagggaacttctttttttaccattgattttagatcttgtggttatataatataaggtgtatactcttactataagattgcttgtatataattaaagctttatacatattataataatatttaattatatatttatttaaaaaaaataaaataatattaataattaaaaactttattaatttttatttttaattattattataattttctaaaattaatttaaattatttttatgtaggtatttattttcaaaaaaaataatttttcttataaattttgttatcaatcaattttttttatgttaatagttaactgtaacaaaattgcttacttaagtactttgacctagggctttataaaaaaaatttgtgaaccgcccaacctgaataactcccccataccaaactagaaaaactaataaaaatacaagtcgaaataacccaaaaaaattttaaaccgcccaatcagttaattggacgggttaaaaatagacccaacccgcccaattaaaccgaccaaaccgatttaccccgacttttagttttttttgttttaagtttaatttttaactttaattcttttattatcataacataaacataataatataatatatatactgtttcaaaaaaaaaactatatataaattgaaaaaaataaaagaaatgacccctgacagtcatcgagacccctcgtctcattctatttgtctctcaccctttctctctccatctctct

SEQ ID NO: 66256 - DNA, 2802 bp, Cannabis sativa
aacactggagatggagtaagacagacagattttgctagcattatcggtagcctccgatatgttactaactgttaggggtgtacatcggccggtttagtcgggttatagtgtatttttaccaatccaatataaatgtcaggttacaaatatctaattgtaacccgtccaatgaaaaaataaaaagaagtgtaactagcccaataatttttgtcgatttggtcgtgttaacccgtttaaaccaatctttattttttttattttatttcattgattattaataatttttgatttaattttatttaaaaagattgtgtcaaattcgtgttaagtggatcgaatcgtgtttgacctgtttttatgtcgtgcaagttgtgttgacttattttcaactcgcatctaattttctcgaccttaacctgtaaaattcgtatcgtgtgctatgtgaaaacctattttactactcctaattatacttatttataataattcttttaattaagtgtctttccatcattgttctcgcttagtcaaatgggttgctcacttttagcaaagtttgtactttgtgtggtgattagggtcgatcttgagcttaagaaaaaaattaattattggaccgtattcaaagaatatgtaatatttttaaaaattactaaagtattttgtatatattttttaaaatttttagattgagtaggccctagatacaggcccaatccgtcctagtcaagagtcgggctgggcttgtcttgaatatttggggactgatattatccattaatggcttctccttggaacttagtctctttattattgatgtcttcaatcaaaccaagattcttttgaaaaaaaaaaaatagctcatttatttatcatgtttatagaagattacattgcaatcataaagctcccttaacttgattacataacacacaaaaatattttattctcttatattcttgcttaattataacataaattaacataattatcatatatattattagggcaaaaaccctaattaggtggagcccaacattgagacttacaacttccttcacaatattcagctgtgtcaccacaaaattgaaatacactacaacaccttcctggattacatggaatgtctccaaaatctggcccacatctatgatctattctttctgagttttcataatttgatacttttgggcctgggccttgaggagtacttgttagggttattggaggttggaatggcccacgagtacctgcacttgaagcagagactataatctcatcaaaccaaataaaaacacagaatagtgaaaagataagtataagaatattgttttaacttcataattattattattaagagtttaattgtatgtgaaatgggttgggaatgtgctttaatggaagattactaacaaggatatttatagtgtagttgtgggtattattaaatatatatatttgtgtgtatacattactatgcgtcaatagccgttttcttgtgtcattatgtagtaaaaagacaacaatgatatgttttttaaaattagctcacaagagaaaaagccttttgtttcattctatgctgtatttatctataatattgtttattatttttctttggctttgattgtatttttgtataagctttattgtttttggcataattagaggcttctatctaaaatagaaatgcaaaggacacagggttaccaataccattatttatttggtcaagaatatgtattaaaattatactagaactgagttataaataggagaagtttgaaagctcattatctaatcaaaggtatatatattaagtcaatctataagttacaattgtgattaatataaaaaaaaaataaaaaaaaaataacaacaacactttaatatgaaaaatataactcctaactcattatagtacataaaggttgttcaatactaaaaccagagaatgaattcaaaaataaacttgatcatggagtctaaaaataattcaatctcattcaaagacttaaaatttttgctataaatttaaaagatcacttgtactacaaaaaactaacttaaattagtgtccctttcaataaattaaatacattataatttagaataagttttatttaaccgtctaaacaaccagttataaaaaaaattattaggtcttacatatattaattttataattatttttaaaaaattattaatcattttggaaacttttaaaataaaacaatttagtggttttatttgaaaacaaaatttaaaataatgttttcagtatttaacaatttacaaataaattttgaacaataatagtaaaaataactggtaattaaacttaatatatattacaaatttgttcgttgatatttaatgttataaaaacaaattatcacgtggatatattattataaaaagtttattaaaacattggtgctacgcaaaacaatgaaacttgagtacttgaatgcaactttaagaaatgtaaaagactacttataattggtaaattaaaaaaaaaattagtcttattatcaacctcttattataatgttttagtcaattttagtacttaaaaatatattttgaattttttttttcacgatagtgttcgttatagttacaacattattttagtaaatttttgaagaattttgaatagattacaatattgaaaatagattaaatttttttttgaacaagtgtggtaacttggaatacaatgaactctattttcgatactgtaatctgttcgaagtttttaaaactttacatggatgatattgcaactataacaaa

SEQ ID NO: 66257 - DNA, 714 bp, Cannabis sativa
  modified_base (40)..(47): a, c, t, g, unknown or other
aatatgatatataatctaattcaatataatacaatacaannnnnnnnaatacggcgttccaaacaagcccagaatattttatacatatatttaaatcttttatgtatatatatttaaattcctttatatatacatataccaataagttaaattctttttcgtcatcactcatgaatatattttttatatatgcttaatgatatatatatatacataattgtcatttttttatatgaataataatattcacatatataagtatatatatagtcactaatcgcatattcttcttttttttttttttttttgcagagagaatttttaccattaattatcatatcaacaaagtgaatttggtttagaatataatcgattgaacctatattatttttggagtgtttagtaagtaatcaatcaactttcttatattgctctcatttctttggtatgagaatctacattttatgataattttggtggcataataatttctttaaatcttatattcttctctttggttatgtatcatattgtcgacttattttcagaagtctagtgaaccaaaagaaaatcataggaatttacaatgaattagacagaataacaccataaaatttatattattctcttcgattatatatcacatattgacttattttctgaagtctagtgaatcgaagagaaatataaaataacaccataaaatttatatta

SEQ ID NO: 66258 - DNA, 751 bp, Cannabis sativa
aatcactgaaacagtaaaattgaatgaaattagacaaaagtcattaaatctagcaatctcaatagtttaggggaatttttaacggctaaaagagttcagggtatgatttgatacatgtcgaagttcggagagaaaaaaaaatttaattagctattttttaatgacgaaaacttgatatactagaagcatcttcaattttgaaaaaaaaaaatataaatgtcaaagctttcttattttgtcctcttgtggcttaatttttttttttttagcttttttttttaactcaatttttttagcttgatagactaaaactttcttctattttgaaaataattataaatgtcaaagcttttttacttcatatttccatagtacaaaagagtatcaattttattgttaatatatttatttacttcatagtaccatttctcaatagaaaaaaaatcaatttgacattatttcaacttttaataaaagaatatgtatagttttagttattttagaaaaatttgtttcaattttaaatttaatatttgttttttgaaataaaaataatttaatatttttttaatatatttttttccaacaataaaaactcatttaaaatttaaatgaagacatccttcttgtattaataatctcattattagtgagagatgaattaatttaaatggatttactccatatattttttttaactttttttttttaatttacggtttgggttactaaagtggttgcagcgctagtt

SEQ ID NO: 66259 - DNA, 1400 bp, Cannabis sativa
tcaaatattctagttctgctgtatcttaaagaaatgtatgtattatttaataaaaaacaaatctctattaatccaataattaatatttgaattcaatgtagtatctaattagtctaaaagtcatataaagtatgtaaacacattattaacattaatttttaatagtaatagaaaaataataaaatttgtatgtaggttcttttttttagtatcttatgctccaatacatgttccattttcctccgttgttctactgttactttttagttattctggttcttttcattgttgatgtcttctcctgcatgttctcttgttgtgcccctgcttctcacatttgatgcatttgttaagttgtttctttttccagccagcttctaccctctttctttttttggtcttccaaatttcaccatttcaatgggaggcaagactattatgtctttcacattttgtggtacatcccactcactttggtgtcccattgtgtacattgttcttcataagttgctagccaattttttgtagtgtagtaatctgaacagagcttgtgtagtaacctgttgcatgtacatgttctctctttgaggtctaatttccatgattctttgatattgattacctgaaacaaatattcaatggttgatttaacatgtgcaatttgaaatcaacatttgttaattatacgaacaacagtgaaatatctcaaatacaacattaaaaaaaccatgataaccccagtacagtattgttatgtttaagaatttaaagtgctcaaacaacaggttaaaagaatttcgagatcaatatttgagcattattttttaatttcgtattaaaaagaatttgggtgtgtttaagtgtttaacatgtttgattcattgatttttggtcttgaaattgttgggtgttcatttgatgttgattttaatgtttcttcttcatctcgtcagaattagtggttgttttctagttgctctgatgttgctgttgtgtaactattcgtgagtgtgaaagattgaaacctcatatgtgattaacattgtgtacaatattaaaaaaaggcaggacaatatttttataaattttatcgtgtgacagtaaaaatgtaaaatttaccccaaaatctaatatttttataaaaactccacataacattatattgtcacacgcttatgactacgtaatcaagtgtgagcttgtgtaaggcctataggatttgttttaattatgttattatataaataattttaaataaataactatttaattaaatattttatcaatattttatatgattaaatatttattattaaatatgtaaatataaattgttgttcaattatttatttaaatttaaataaattatttatttgtatttattttattggaattaaata

SEQ ID NO: 66260 - DNA, 1046 bp, Cannabis sativa
  modified_base (720)..(724): a, c, t, g, unknown or other
ttatagaaaaggaaagttttgtttcggttttctcctcaagaaacctgatcaaacaaaatagaaaactcacacaagatcagaatatcacagctggatagatagaaaagaatagagtaactaaacttatcatttttaccttattttccataaatagaaaatctagacaactttccttccaaaaataaattgattaatataaaatttaaatacacaaaatatggaaaccaatttaaatactcaagccgaaattaaataataaataataaaatgtttttgtcacattaaagtgccaaagtggaattaacaatcttcccctttggcactttgattgacaaaacattttatccggagaaaacctacatcaagtgttagaaacaaaaataatagagtatagaaaatacttcccctgcatgaaagcacattaacacataaaataaaagaaactttttaaacggaaaagttcacaaaccacaaacaaaataattccccctaaaacaagggtccaaagttgtaacaaacattccaaaaataaatactactccccatttttgtctatcaaggagccaaagacaacaaaaaaacttggacaaagacataatagttcaaaacacatagataaaaacaaaaagattaaaaatgaaccacttattcatcatcattggatcggaaaaatttcatgatgctatccatcctcatgagaagtaaggcttgacttgtctnnnnntcttcccaaacgcaagttaaattcatccatttctgtaagagcaaatgtggaagcagatgcagcagcaatgtaacgtcataatgctaaggcacgctacagtgatttttcaattacagtgctatatttgctaatcaaagaattttctcgaaaaacgtatcaaattaaaattttatattaaatattaaactttaaaatttgtataatcatttacaagtaccgggatcccgtttctaaacttttatacaaaatattcaaaataaaatatccaggtcgcacatcgactacaaaataacaacctcatatgtcccgagaccgaacactc

SEQ ID NO: 66261 - DNA, 652 bp, Cannabis sativa
agtaactctcatccgaagataatcccgccatacaccaataaaattcttaggatcggactccaaatatttccccaaagtattcccaacttttctgattgttgattcagacataaaatcaggttccacatcatgtaattgaaccccaatatcaagagtattcagggctaacagtttcggatcaccaccaacttttaatctctcaataatcaattgcatacgatcataagtccaagggctaccattaatcatccgttggatatcaatttcatgataaaattgaaatagaaatcgattattatcaagttgcttaacaaatattcccatacctagttgccatagcgaagccaatatattctgcattttttcgaaatcgattactcggttggataagaatcttcctaccaggcaccaccgatcatcaataccttcatccctttcttccactgtgacagtgacatcttccaggtcttcttcatcaatatgaaacatcagagtttcatcctccagggctcctgtatggcgactagttgaagccatattgattgacgatgaagcaaagcaaaaaaccaattccactcttcccaggaaacgacgacagcaaagagacaagactcaaataacacactcgtactgaactatagaataaacagag

SEQ ID NO: 66262 - DNA, 1139 bp, Cannabis sativa
gtttattcggtggtttctatgtgggttattatacagattttgattgcaatttaggctgtttcattagttgtaataggggtttctatgtggaatttcgtaaaaatgcaaaaaaaaaaaaaaaaaattgaagtgtaaaaatgaaaaaaccctttttaattaatagatacaaaaaaaaaatattcctcaacttatccccttaaaaaatgataatttacatgtatgcacgtttttcagtatttaatatcagtattaacgtggcttttttaaatattaatattactgtatttttcttcccattttctattcttattattgattgtgtgttggacacaatgaactacttttgatgacgtcatattgacttctcacatcatgatatgggacagagtgagcatctaatgataagttttataattttgaatattgatttcttttttaaagtttgtttggacccaagatagaatatggtgaatttaatagtttatagtttgtaaacttaatagttttctttttcacttttttaggattttattgcaatttgttcaaatgtaacattgataatttataatttaaggtttatttttcattttttaggattttatagatgtatgtataaatgtatttttgatatgtatactttaggtttttttttttgtatatgatagggttgtatactgaatggtgtactataattttttgcatttaatttattttattgatcatatattttggtattaatataattttgtttgccactaatatacatatcatttttcatgatgtgatttttgtaaaaaaaacatttcacttatccaagtgtaagcaaactacatcactgattatcatgtcagtgtgaattcattgcactaataaattgtggggctaaatagtttgaagcatatagtcatgattattttctgctgtgttgacaatactataatcatgaataactatatgttcagtatttaataaaatttatatgttaaacatataatcatgaaagtaacatgtgaaccaagcaacatataatgagtaaataagattatattaaatgagtattatttaaggcataaaaccccaacaaatatagctctaaactttattttcttatgggttactattttagaccttgtattttg

SEQ ID NO: 66263 - DNA, 946 bp, Cannabis sativa
  modified_base (863)..(865): a, c, t, g, unknown or other
tcgtgaggctcaaattcgattaacgaaaatctgcgttaacattaccccatcgacaacatgtgctaaaataggctttgatccccatcctccttaaagttttatcttatccgaatttctctatttttgctaatcttgcctgaaatgaacatatttgtgttacaattaattatttattgttgactataatgtaaagtattactaaaataaataatttcattaagtaccttttatttttctgcattccagtaagcaatacaatcacccacacctcctaagttactttgtctggaggtaatatgtctgctttctcctgtccaaactccttaatattttcgatccattttttcttagaattggcccgccagtcacgcaaatcccacacattctgaaaaattccatcatcgttcgagaaatcccacacattctacgggatgtactcgttcacaatcagtcaatctttacagttctcaagatcagtgatgtaatatatcaatttttcttgagatgcaagtacgaacttttcgttttagtaccactcccagttgacgtaaatgctagtgaaaacaccatcaaatactaattgttgttatcacatcggtacgaatagagtactaagtataggtagatattatggtcaatagcactgtcgtacgaatgttataaacttagcatagcgtaggacgcggggatagggttgtgattgggtgtatgggcccctaattataatatgggttatatttatgattatgcttttcttattgagtctgtcgactcacagttattgtttgcatgtgtaggtaaggacaaggctaaagggtgaacagaagtgagttcgagtagataaagattgtacatgtcggggnnnttaggcttggagcgtacgatctttgggacaacaagctacattttaaatggttgctaagcgataacttttgtatcgaatgtt

SEQ ID NO: 66264 - DNA, 963 bp, Cannabis sativa
  modified_base (61)..(62): a, c, t, g, unknown or other
  modified_base (385)..(387): a, c, t, g, unknown or other
atatttttactaagtaattatacttaattaaaatataaaatttattttttatatataattnnaaatattttatatatccgccgcgaagcgcgggatggttactagttaataaaaaaaaacaataaatatacctaacacatatctccaatttttctaatatttttgttcaattattttaaataaatataataaattattaattagtcacataactatatgttattaatagtatatgtaggtactttacagtataagttatatacactataaaaaatcttatttttagtcacaacaaaatttatgactcaaagtaaaaatattgtgactaatatagattattattcctatgttgtgatgaaaaggtccgtgactaaaagtattagtnnnaaaaattacaatttgttatgactaaagtattagtcacaatacttgttgtgactaaaactaaattagtgacaacttgtgactaaatactatattttagtcacaattaacattgttttgactaaaagttactttagtgtcaaaaaatgtacgttgtaactaaaaagttatcattaaaagtagcagttttttgtagtgatattaatatattttatatattatttttttaaaaatattctcataactcaactgcgtaagtctagcatttatttttttttaaaaaaaaacatatatattatacgtacacatgtacataactatataatatttattttaaaaatatctatttgatttgcatataactctaacctataatatttataactcttttttcttaaccataaaccatacatactcagtctctttctcaagcatcaatgattctatttcccccaattctctcaatttttcttcaggcatatatgattattttattctattataatgattacaaatatataatatatgtagattatatattttttatgagaataatttactatttattcaaataattat

SEQ ID NO: 66265 - DNA, 1014 bp, Cannabis sativa
  modified_base (959)..(971): a, c, t, g, unknown or other
aatgcattttatatgtcatatagtgaaatttcataattttgcatttttggtgcccggcaacatggaacgcggtgtatggctcagtagaatcacaatattatattttagtatagcgtggtggtattgttagacattgggaatgttgggattagtagggaatttagagttttcccaaaatacccttttgtgctttttaatccttttagtgtgggaggggcaaaatggtaattttacctcataagattttgtcctttagtggacttactattatgtgattatttgatttattttgaattaagttggctgaaataagttgattagtatgatagttgttcattttattgaaaaattcaaagaaaggccaattctcattttctctctagctctctctctttcggccacccctagaacaagctagggttcttgattcttcttcctcaattcagtgttttgcatcaattcttactacaatccaagctaaggtaacccttgtgtaattttcttttagtttcttgaagtttaaggaagtaaatatttccatgctttatgatttttatgattgtagctggtgtgtatgtttgttgttgttttctgaagtttagatatgtttatttgagtggattcaagttggttttgttgttatttagttggattcaacctagtgtaaagctttgaactcaaaactttggtttttaatggtgaaatggtgatttagctgctgtggttgctatttgagtttgggtttgttttttgatgtaatattatgtttacttaaggtgatttaagcaggatttggtggcttgtttgtgggatgagaaagctttgacttttgaacttaagcttgactcgtcaatggtggtctttgtaagtatgcataagcaagttttggtggcttgtttgtgggatgagcaagctttgttttgttgctcgatcctgattttttcgaaaattcaaaaaannnnnnnnnnnnnaaattaaatcgaaattgagttttgtaaaaaagtaacttgctta

SEQ ID NO: 66266 - DNA, 992 bp, Cannabis sativa
  modified_base (99)..(105): a, c, t, g, unknown or other
  modified_base (268)..(269): a, c, t, g, unknown or other
  modified_base (345)..(380): a, c, t, g, unknown or other
tttatgatatcttatctaagatcaatatcagtcccttctaatgtatactttgtacatctgatactggtaacctttgtcaataccctggaaaggacatannnnnnntccaaggtgtaagtataccttataactgattatcatgccagtctaaatccagtgaactgaaaaatcatgggaattaaacttttgaacatatattcatgattatattcactgtgctaactacactataatcatgaacaaatatatatgttctagacttaatagnntttatacattaaacataatcatgaaataaaatcatgtgaaccatggaacataaaagcgatttctgatctttattannnnnnnnnnnnnnnnnnnnnnnnnnnnnnnnnnnntagggcacaaaacccaacacatctgactagctcgatcgtatgattaactttcatgcactggctaggaaatgtgagttggaaattttagcaatgatcaatgatatctccaaacttgcatgacacgaagtaatccctacttttgtgggattgattcgtacctttagaaaataaagacaatcagcctggacttgtctaatttctctattgtaattatagaatttcctattttatttcttatagattaagggaaatccctctttgtaattagtctctataaaataggggtttcgtctcactatttaggaacacgaatttaatcaaacactcaagagaaaaattgtgatccaaaattactcagagatctttggtaagagcttttgagagagaatactttgttctttgtctcataagtcaatacaactaaaaaaagagtaggttattaccactgtcatgggccgaacctctaaaaactccggtgttctccttatttattgttcttaactttttattgtttattttatctcatcttgttaattaagactcactatcattagctaaaaatgaggtcaacattatgaaagtgagtaattaactcattgtttaatttatttt

SEQ ID NO: 66267 - DNA, 882 bp, Cannabis sativa
ttgaacaagctcctcgaactcaatggcgccattaccattggcatcgatgttggcgagcatggcgtggagttgatccccggtgggctttaggcccaatgatcggagaagggccgccagctccaaatgggtaaggctgccgtcggcgtccatgtcgaaacgagcaaagatttgcttcagctgaaggagctggtccgattggagagacgccatgaccattttcggtggcttctaatccaaaacagagaaaagtttcgattttttatttttatgaaattgtttgttaaagacgaagggttgtgtttgttttttggaaaagttcaaacttgtatgaatagtcttttctgtttttttttttttggtctttaggttgtatataataaagtcttcttcttttatcacctaaaatagacttgggtttcttttgtttctactgagaattgtcaaatttataattgcttaggggcttagataaaacataagtttaaattatataatggttgtcaaagaatcttggtttttacttggagggattttagattatattacggtgatgagttataaattacagcaaaatatgatgacatggctgttataatctttgttttcttttgctaataatatatacgtgtagtacatgttttgtctttcttcatggtttttaataatattataactgtcttattaatgatcagttttaacaaaagtaactacaacagtatttaattcaacatatacttttggttctgaaaatgttatcttttttaagggatggactcaaagttattctggtaagtttttggtttaattaaactataaataaatatgtaccgaaactgccatattctaaaactagctcttatccttttctcaaaaaaaaaaaaa

SEQ ID NO: 66268 - DNA, 805 bp, Cannabis sativa
  modified_base (253)..(274): a, c, t, g, unknown or other
tcttgcacgcctggtgtgatcccacctagaggggaagtcactccatggctcacagtgggtggttgcgtattgacctactcggtgtttgtccctggtggtcatctcgtatttctaggagtctgcacattgggatttgtcaccatcgggtcgccttgattagcaaggcctctacaagtttgtacaaccatcttgtatgcctgttaaaacttaacacgaaaagaaaactttggtttttgctctcaatgaaagcacnnnnnnnnnnnnnnnnnnnnnngccaacgacagtgagtcaattaataaacgattaataatctaattaaaagagagaaaaaaaacgataaagtaaaaagaataccaggttttaaagaggtttagctccatgagtgtggtaatagcctactcccctcgtgttgtattaacttgagagaaataacaaagtgttttcctctttaaaagctcttacaatggatctctgagtaattctcttagatctctcttttcactctagaatctctctctgaaataattttttcgatcccttttatagtgaggctaagccactatttatagggacttaatgcatgagggatgattttgcttttgcttacaatgactaaactagaaaattgcaatgattacataattacgatacaagaaataggaaactggaacaagttgccatatttatctctcaatcccacgattgtagggattgtcttagtgtctgagcattacaagatcattctgaagtaattaactcccggtaagtagctcgccgtcgcagacctctatctggtcggatgtc

SEQ ID NO: 66269 - DNA, 915 bp, Cannabis sativa
ttcacaatttataacaatataaaaagaagccaaaactgaagcgaagcgaaatttaagaactcctctttagatccaccttcgtctctctcattcgagttgcagagatatatatatttacataattctttatatatataaatataaatatcaacatattatttatttttatctatctataaaaatatatatatgagaaaacaataaacacctctggtcaccttagattacggaactaatctcctaaaccataaaccaaaaaaagaaggccttaggcccaaaccgacggttccctctctttctctctcagtcaaaaatatctgaaacccttttctccattttctcttttcattttctgggtttctctcattttacactattctatatttttctgtttggacaatcatttcgggaattttctcattctttttttcaaagttctgggtatatacatatattgggtttttcatttctttccggcgatgacgacgtccggtggcggtggcccaaacgctgctgcctgtgcctcgtctaacggcactagcccgagactacccccgggaccaaccgcaacgcggcggcgcgtgactgacttaatagccgagggctgcgccgaccgtacctcgaacttgtcagacgcgccgtcggtggaagaagaagaccattacgatcctcccggaactactccctcctccgtcggaccttttcaccaccatcaccatctacaccaccattattgccaccatcaccaccccgtgacaaagtatctgctgcttcgcaggcgcatgttctcctgtgtacccgaaaagtggttaattcgtattgaggatggtttttattggatggctacgattattcagtcgcttagatcgggggagaatctgggccgtagggtcattctggctcttttattgatgg

SEQ ID NO: 66270 - DNA, 945 bp, Cannabis sativa
tatatattaaataataatatataattattttaataatttttaaaaacgtttactattaaattattttagaaagaaaagttgtaaaaatgatatgaaagaaagataaaataaaataatatatttttaagtgatgtggaaattttttatactcttaaagaatgctatattagtatctaattgtaacaccctcctctgtatcatactgctattggtgtaattaagtatcgagttctatataacttaagaaaatgatttttaaagaatatcgctaaccaatcataaagtgtcacctataaaaattacttgacactattaatgctcaataaaaataatgttcaatatttttttttggatacttaatagtatggtatataattggatagtaacatactacatacatattacaataccatatttactatccaacaacaattattatttttgaataacaagaaaaaattatgtattgtaacaaattaaaactacaaaagatattttagtataatcttaaaatgatcattttggtatactcgatatttagtatatctataatttttttttagattgcatcactaatttagagcaccattgaagttgctattaaatctactttagttctaggcaaaatcattataatccttatctaagcatctctttttttacgaatcatatgtaaagtttaattatattctctatatatatatatgtaaaaataaaaacctatggtgcaaatcatacctaagaaaaaaaaatagttaataaaggacaagagcattgaataaataaataaataataaattgcgtcataactacttaaagttttaagtttataaataaaataagctcaatgtttatttttagtgtgataagtatcctatatttataaaactgtaattttttttctaattttatcagtacaagttctgttattttcataaacaagtc

SEQ ID NO: 66271 - DNA, 1751 bp, Cannabis sativa
gttcatttcaataataaatattgagccggtgaccccaatactcaattataataatttgattatatataataaagttcaatctacttcagtcctcataaattttttattggagtatatatatattggcagccgattttgtacccagaaatacatttcacggaatgtattccgttgtacgacaggtatagaataatgtgtctcaaggtatataataatgtgtcccggagtatttcactctaattactcttagatcaactccatccttcagatcaaataactatcccatctaacggttgcggtacatcacgaaatacattccgtgaaatacattaatgggacaaaatcgtgtgcgtatatattatgacttttacatttgtttatttctacatacaaatccttgatatcgtatgagtcttcctatataaaattaaataatcatgaatatataccaaactattattcaaaaagtaatatatattatatacttatgtcaatatgattaaaaatgatggcattcatgtaatattctatagagtgtgttggcaagtacacgtgtcaatactatagccaaataggcatattggcatgtttctcagtgttgactgctttgaccaaattgtttttgtttttattttattaaattgtttctcattaccagctaagctactcattctggttttggggtcaaaatggtcgtttccaaaaccagcggattcaactgattctgaaaactctttttcaagaatctactaattaattaattaagtactattctataaagttaattacatgacactcatttctaataatttggtttgctttgctttcactagtaggatctataaaaagctacataataataataattaattaattttgtattagttggtgtgagtggtattagagtttggatcgtggtttaatatcaaaacgaggattgatcaccttaaaacgaactcaatgatgctgcaagtgaagaaattcaattttcatttgttaacaatgtaattaaccccataattattattctaataattaaataccttattttcttaatcaccaccaaaatatacatctctccacaatccacatttccattttttagccacatatatctaaatatatatatatatttttttttcacgtgaattatattttcttttttgaaagtcattaaattactatctaaattcttcttcttctttattattttttttcctaacaaaacttctatatagtaaatcatcacatgagttcaaaattaaaattatcataaaagattagcaaatttttatcaacaaaaatcctttataacaaaaatttgagggtaaatttaaaaagtgagatccatttagaaatacaaacttcaaggtcattaaaatttaatttgccaaatatggataggttcgacattcttattcatatttcttatttagtatctaatcctcatactaaaagttttataagtgtaatatataccccacaaatacaaaacaaaatatacacaattttttttaataaatttaatcacactaagtacaaaatttagtcaattaccaaaataaaaatgttaattcttacatcattatcatttttcaactctgttttaatcaagttgagactattaagtgaagaattaaatacttttcattaggaatattcccagtgcgaatggtgcgagttctattttttttttctttaaattaaactacatatatgtttttgtaattttttaaggaataattacataa

SEQ ID NO: 66272 - DNA, 788 bp, Cannabis sativa
tattattttatttttttaataaagtattatttttttttattatttgtattggactacttttaaaatgagcttgattagaatgcgagtagttaatgagttatgattaagatattgagtaagggcttttgtaaattgagctttaataaattgagtgaagtgaattaatatatgtataaatctacgtataaaaaaatttattgaatatatttgagtgagagctttaacttacgtatgggctaaagtctgatcactttgactactttctagaataataactcgcggagttgattatgagaatatatagaattcaaacccgcaccaatatacaatgtgtcgtactctccaatcaattaatttatataaatatttattatttataatatatttaattttaattaaataaaaacttaatatgtaaagtattttattttttattttgagcctccaaaagaatgtgggtctaacccacctatgtttaaggctagtctagacaattagaggtcacttatcttaaaattattctaatttaagaacgtatcaatttgaaattcttattgtttccttacgaatcacaagtaagggtgtttattcaatttaatcctcactaatttactcataatgcacgtagctaatccaggagcctaaaacatatttattttccttttaaaaatatattttttttactaattttaaaaaataccattttttttaaataaagaaaaaaaaaattagccggcctaattgtcattttgtcgatatgatcccaccaaactgagtaatattaataa

SEQ ID NO: 66273 - DNA, 1140 bp, Cannabis sativa
  modified_base (52)..(55): a, c, t, g, unknown or other
agaaaaacttacattggttgcagcagcatataatgactccttccgctcagannnntaacccttgttcctttctaccgtagagtattatcaaaatttgagcctggatctttttttgtccttcagatttggttaccaccgtcttactcactatgattgagtgcttgccttgctatgtgggggcatggcactctatcactcaaggttcggatatggtgaagaataatgaaggaggtgaaatcactattgtaatgaccgctttagtaatttagattagtaaaggcaattagcactaatttatgatatttttataattatttatgaaactaattatttgtgggtccctttgttagaaatgggcattagagttataatttctcaattctcgagatttgattaaactctaggggtattatttgacttatatgtgaattatgttatttttgaaattttcgctcggcgataatggaaaatgcgacggatggctactttgataacatgggtaagtttagaaccttatttcttagtgggatatatattggagaaaataaaatatcggggttaagcggggttatggaatttgactattttacccctactcttgagaaataccaaagttataacctaaagggtattttagtcatttaaaatggtggtttggtggctgcctaggtgagtgacacatggccatttaatttcagccaaggataaatgtagaaatccatttttcatttagagaaaattaaaggaaaataaggggaaaaaagaccaaaatcaaagaacctctcttccccttcactctctcttcgaaccagccataaactagggaattggtggctaatttctggtgttatcagcaaggaattaaaggagaactcaagttaaggtaaccctagaacctatggttgttgtattttgaagcttttacatggtttgagtttatggtgttaaaaagtaggagctataagggttagattgttgtataattcaaattttaagtttgatttgggttgattatagcttctagcagctgttttggttctgttgtgatgaaactatgcaagtttgaaccttggaactcaagtttaggtctttaatggtatttcttaatttagtgtgttttctgtgatttattggttggaa

SEQ ID NO: 66274 - DNA, 595 bp, Cannabis sativa
ttgagtttttaatttggtttggacaaattatttagattgagtagtttataaaaaattacgtacaatcctaatattttgtgtccccttatatatatttttttaatttttaaatttattttgattttctttaaataaataaaactcattctgagctaaagatttatacctaaagtctcattgttcatcttcataggcagagagggagacttcattataatcgagagaaaagcaaaaaataataaagaaagttagtgaaaatcacaaaataaaaatcaaaatcaaagcaatttagattatcagccaagagatttgtggcttgaaatctaaaaaaatatgatgtggtacatgtttgctgatagtgaaactcaaacaccatctctgaggcgagctcgacaagaacatagccttaatttagggtgaactttgagaaaatctctgtgttctttgaatctctatttgattttcttaaaccactattacaatatagacttttactgtcggtcaacacaacagtcaaagcacggaattaacagaaatgttaacgggaaatttatcgacagttatgcaccaatgcatgctagcgtcaggtgataac

SEQ ID NO: 66275 - DNA, 841 bp, Cannabis sativa
tttttattgtatttggatattaaacttgaagtttaaaatctataccatattattactttttttattattttattcaattattttatgtttactcaattatagttatcttatattaatgtttttaaaattaatttaaactataatattttttagcttgaaatatatttttattttttaaatctaattatttgaatagtaaaaactaacaataataattatataaaaaatgtgaagaacggtttggacgagttaacccgaccaaaccgacgaaatcattgggcgggttcaactttttcaaatttttaattggacgggttacgattaaatatttgcaacccgatatttatatagggttaataaaaatatgctataatccgaccaaaccgaccgatgtacacccctaattatcactctatctccattgtcattcaactaaaatagtaagtcaatttattctattttattaatatagcattctaaaatcttaaattttaactaaaccaaaaaagaaaattaaaattaatttcttttcattcaattcaaatcatcccagccaagcaacttagagaacctatgttggttggatttgctctttgagcactttccccttatatgtacagtccgagtgaacttcaatcaaaatttcattatcttttaagaaatgtaaacccttttccattaaatagttaataagtgaaataaacttattaactcatccttttacttttgtttcaaaaattaaaactgaagtgtaggatccacatcttatcaaacaaaataattttcattccaaaatataaaacaataatactactaccatttcattccattactatacgca

SEQ ID NO: 66276 - DNA, 934 bp, Cannabis sativa
aaattagcaatacgtggctcggcacgtatattattcacctagtatatatatatatatatataaagagaagtataagatagtaacatgttattttaaaattcttttaaagtcatctatttattttcttattttttctatttttttatttatacttttttaaaactattaattaataatgataaaaattttaaaaatttatactttgtaaaactaaaatacatccgtttaaggaaaatatctaaaacaacttaccaatctatctatattattgttatcttttttttatataagcaaaataataataatctaaacctaaaatatatttacatcttctttagtggctctttattatttttttttcctttctttttcctgattgttaatctttttcatgcactcataaatatattttttttgataataattctaattatgtatacaatgttattagaatgatattacaatgatattatttttttttattaactctcaacacaatatactaacatgcatactttcacatttgctcttaatttttgcagattttgctttattatatatgtaacatactattatgttatggataataaattagtctcttatttttattattctctaaggtcgtttggtacgctgtataagagtcgtattgtattaaataataaataatactatgtttagattaagtaatgtattatattaattattacgaccaaattttttaatacaatgtatgttgtattatttaattcataataaatggtctgtattagcttatattacaatattaatttacaatcgatcaacaccaatctctgacctggatcagaacccgcgcccggacccggatcccgaaccccgaaccccgatcccagacccggatcccgacccgaacctgactcggatccggacccgagacgtggacccggaccca

SEQ ID NO: 66277 - DNA, 1714 bp, Cannabis sativa
ttcagagtatggggttcttcaattttgattatcggtactcttttactttgtgagttagtcatgttcaattcaacattccatgttccatatctgttcttatatgtgattttttagcagcgacaatatgatgtgtagatggggagctggtggtgtagctgtatttcttaattatgtgtagcaggaaccaggaagtgtgaaatctctgaataagtttgattggggccttgtttgctaaactacattgcttagttagagccctttttaaatagatgaaatcatagagtcaatgagattgggtttcattgctggtggtaggaagattgaatattttaattggggccttgatcattgaccaccttgctagtgtcttttcctcagcttgacttgtttttagactgagattcctctatggaaatttagtcaaaattgcatctcccctcctatcctattactctcatccttatgtagtatggagtacatttgttttatatttgatttactttctcatcctttattcatgcttgtgataggcggccagatgaggacagtgacagtgattttagagattcaagtagtgatgggagcagtgattgcgaaactgaaagattaaaatatatgcgggagcaacatagtcaacataatttgtctagtgatgtttccaggaggatagacagattatctttgagagaccatcctagttcgcttcaagatgatttttctagtgatgatggtgaatctgctatttctcagtcttgcttaatatttgagtatcttgaacgggaccctccatatagtcgtgtgccattggctgataaggtgaggaaagctggaaatctttttgtatagatttagaaaattatgtatcactcctgcttgagctttaatttgttttattttcacagttagcagatcttgcatttcggcttcctgagctgaagtcgctaagaagttgtgatctcttaagatccagctggatttctgttgcctggtactgccagcactgttaaactctatacttgtgatgtttatatctggtcatctatctaattggtttgtgttgctggaattgatgtaggtatccaatatatagaattccaactgggccaactttaaaagatctggatgcttgctttctaacgtaccatcatcttcacacgcctatgggaggtaaactatgtttgaaattgatttgcttacacatttgaatgctcctttttttttgtagataccatgatatgtagaacaccattaactaggtcttttgcactagctgatttaattttgtaatttttttatagatggtactttttaaccatctaatgttgtctcattccacactagtgcaatgatatttgagctcctttttgtagtcattattgatttttgaggggatttaattgcctattcggctgttcccatctttactatttttggcataaaaatcagaactgtttagctgtatagaggattctaggaataaaataatgtgtgcgcacatgcatgatgtatgagcctaacgggtttggccccatgacgtccggtgtttgattcttcgtgggtccttagcaattgtatctaaagatgatagggttaagtgggaggacgggtgcccccattaaattataaatgagaaagaaattaatttattaaaggttttgttaacatttgtcttgggtggaaaaattgttagagggtggacagcttagagggtgcc

SEQ ID NO: 66278 - DNA, 813 bp, Cannabis sativa
taagttcatatggccattcgagatactcgagaaggtcacgctgatagcgtattagctagccttaccacctgcattgtcggctgtcgataatgtatttcatatttcaatattgagaaagtatgtttcagactcgactcatatcttgagttacgaagtcctagaactacagttataattatcctatgagaaacaaccagttcaaatccttgataagaaagagaaagttcttcgaaacgagaccataattttggtcaaggtactccggaataacaataaagtggagaaagccaactgggagctagagtctggcatgagggcacaatatctagagttattcaggttagatttttaggataaaatccttttaacgggggggataattgtaatgcccgtataattagattatggatttgtaaaggcaattagcattaattagtaacattttataattatacatgagtttatacttgttatgggcccaatttttagaaatgggcattagaattataatttctcaattccaaaaaatttattaaactctaagagtattatttggctaaatatgaaatatgtaatttcttccatttttactttttcttctggcttcttttttgccaataacttctcatctccaagaactttcaagactttctagtacactaggattcctttcagactttctctccatagcgcaaagtccccaattccatcaaacatctccaattcaaatctcgccattgatgatgttatcccaaatttggcactctgacatggcatcacgagaatggtgacacgtggactctacttggagca

SEQ ID NO: 66279 - DNA, 1300 bp, Cannabis sativa
  modified_base (135)..(142): a, c, t, g, unknown or other
accacctttgatttcttctttggatgagctcacccacgtttcgacgatggagaagcaaaatcaaagtcatcttcctcaactccattttagaatttttctttcgaacaggggaaggatgagttacaaccatatttnnnnnnnnattaagagaaaaataaaaagaggaaaaacagctatgggattcggtaatgagagttcaaaaaaattgaagaacaaaaagaagagggaaatcgagttgggatcgtggagggggaagtgttcagctatggaggttaatattttaaaaaaaaaaaaactgaaaagaaataaaaaataaaagggaaaaaaaagagggaaatgatgtatagaaagattgatgtaatacatcaatcactcacgtgtcaacaaagcatgtattgtgtgtgcatgtggtacaaatataaaaaactaaaggaaaagtgtataaatgtttgggtaaccgtatagtgatattttggtaataaagttaacattttgtattttttacgtaaagatatattatacatatatgtatacaaataaatatttagaggaattgataccactagcctttcccaaaaaaaaaaaaaattcaaactagaatatcaacttctccgttttttttttagaaattagaaaatcaactttaactcatgtgattgtctgagtgagtatgagagtgtacaattaatgacaagtttttttttattctaactaattgactctcatctgatttttacttttataaggacggtgacaatgatattataacaatactaatactaatttttagcaaaaaaacaacagtaatatataaataatagaagaagagaaatgaaaaatgcagatttttaaaagctgaaataaaataggaaaaacaaagatgatatgtcggtgattaaatagattgttttttttttttttttgaaggcaaaatagattggttttttaatttattattatcttaaaatagtaaaataaataaaaaataaaaagaagaagaagaagaaattgagagaattgaggagaaagttgctcttcttgtctgtgatgtgcaaaagtaaaaggaatggtcctcatcatttaactatagtcaactaatgacaaatagtaagtaatactaataactaaccgttttcttaattttgtaattactacgtacctttgtatctaaaatttagacctctccctaaaattatgctctttactttgacaagttatcataaaattggtacaaatcacacggttttacctttttttttttttttaataatcgcgaaaaaacttcattaattcaagtctt

SEQ ID NO: 66280 - DNA, 872 bp, Cannabis sativa
atttaactagctgaaactagtaaaatcgaatttattgtttctaatataacgaatgcagatagtagatactcatttctataatttgtcattaaactactatgtgtacaactgtgcatatattctctggagtcatattgtcccacattagtagtgttaaatcaaacaatatgcaacaaaagaaaatgattcgagaagaaattttgccacacaaaaacttttcaagaattatagttctgggaggaaaaataaagctatttttcgtccttatttaatatgaaaaacaatgtagataaatgtgggatgaacctgatgcaaacacggcaagctgcgaatgagctcccctctgctgacttgctccaagcaaatgctacatgtcaattcattttctgaagccttcaatttcccatcttcctttcgggtgtcctgctattcagtttacaagagcagtgtatgaagtagtaaaagaaaaaaggggaaagacacagtaatgagtatgtgtgatagtttcgctacaccatctactccaaacaaagaggccaaaggttcaaaatattaaagagtgctgaatcaaggtttcaactaaatatctcatgtagactgtattttatgttgtgtctgcaaaaggacaagtaggagggtgcacaagttgaatcaatcaattggtaggagattaggacaagtttaggttagtttatttagtcatgcaacagtctacaattattatgccaagccacatttgacaataagtatcatgtgttttgtacgagctagagctactgctggggtacatgttatatgtgggactcttcattttcgttttcttttttcttttcttttttttttttttttggttttttttgtttttttttttt

SEQ ID NO: 66281 - DNA, 1621 bp, Cannabis sativa
aaacacagaaactctataagctaaccaaaccatataggtactctcgtcatatatcgaaatttggttctatttcactatagcataatcgacactcacttctaagattttatatcaaaaacataaataattaattgatgcccaggcaattaaaataaattaagtacgaatgaaatagaatacatagaaattaaggggaaattaaatcatattaaaaccaaaaattaatgtcaaacaatctccatctagaccctaatgaactgtttagctactcatgttcatcgtagcaatttcacacatattaatttaagaatagagaagaaaagaatgttgaaaactttggtgagaaagccttcaatatcaatatcgctcttcgaaattcgtaccccttgatttcttgttgaaaactattaaagtccacttcttttatagccaagaaatgataaaaaaagataaaaagacactgaaacctatttttcttaggattagaaggggcaggccgcgacatggatatcttatgccgcggcataaaccccctttatttgggcagtgagctttctactgcattgactgatagtattttggttataactctcttgatattgcttgtaatcagacgattcaagatgttctgaaaagataaaagagagatctagaacttttatgttttgactttctctaaaatatgatcaatttaggcttgaagttttagttttattttcttgcacaattttttctattttatatatcatcctttttgtgatatttgaccaatttatacatcccaagtgtcgaaacttgaaattaacgaaaacaaacgtaattctattccaaaaggtgataataaaaaaaaattaactctaaaaataacataaataacaggctaaaaatatcataacaattagttatctcattaggtaacggcagtgacatatggatgtcaggataggtatttggattgtcttataagacaatgatatttatatttgaatgttggaatagagattagtgttgtcttattagacaacgacgaaattgattactttacaaagtacgtaatgtgtatgacttgttatattagacaagtatttgtgtattattgaatgtttatatatttgtaaatatctgattgtgattgtttgattgtgattatttgagtttaaattgatgttatttgtgtactaatttgggatattattttattgattttcttgctgagtctttgtgactcacaggtgttatgtggtgcaggtaggggttagaaaacatgtaggcatagggctggccctgagcataggcaggctaggcctgtgcctaaggcccacctagctcaggagcccaaaaaaaaaatgtgtcctcttttaaaattacatatttttttttatcaattttgaaaaatatcacattttttttttctaaatgagggcccaaaaatattttcttttcctgtggcccactaaatttcagggcgggccctttgtaggcagccatgagtgaggaatctgcttcagtgaatgtacatatcaactgatccggcaagtggagcagagttatcaaaattcatattttacgatgttatggactttaaagtgtattttgttaaaataatatagtggcatctctt

SEQ ID NO: 66282 - DNA, 843 bp, Cannabis sativa
agctttcaggctacccatagagaacaaagtctgcctaatttcctcggcgttcggcacgactaccagatccctttgctcctcgagagaaaggtggttcgggatcatgtagtttaagatttctaaaggaccataccgagtttttaaaaatgcttcccaaaaaatccgacaattctcttccaatgtcagatccgctactcaaccacaccccatctttgttcaagattgtctcaatcacattttttctatttatgattgtggtcgtagtgaagaagaacttcgagcacttatcaccatccttgatccaagaaacccaggatctttgttgccagtaaagggctttttgtcttaaagccttgttaagagactttctggtttccaactcctcggcccaaatccttgtcccagctggacaaccctgaataaggttcagatggcgttcaagctgagcaatgcgattgtctaatttcccaaattgattcctactccacttgctaagcgtcaggcgaatggtccccaccttcttgaaaatcctcgtcggggcccatctatgggacaatgagccccaagcactctccacaaccaagacactacgaggcctggtccaccaggcttcaaaccggaaagacttttaaggtttggaatcctagttcagagtactgatgaaaagggggtggtgatctgagttacacgtgtggatagattgaacaaccgccttcgggaagagacccagccactgaacattggtcaaatccttgttaagggccgatttgacatgcgcatcgccatcacgatggttatcctgggtgagacaattgcctttaactggcagatcaattaagccag

SEQ ID NO: 66283 - DNA, 1318 bp, Cannabis sativa
  modified_base (115)..(122): a, c, t, g, unknown or other
aatacttgtgactaaaactaaattagtgataacttgtatctaaatattatattttactcacaagtaattatttattgtgactaaaaagtaacatttagtcacaaaaaaaattatnnnnnnnntaaaaagttgtcactaaagatagttgttttttgtagtactcacatcaataacaaaccaaacattataattaattctcattacaatttctattccattacattgccattactatattacttattaagagtattgttattagacatattggtgtctagccacgtatccttgtgtaattagttagtgatattttttaaaaattattatattaaatatatatggaactcgatactaatttattgcaccaatagtactaatattgacatgtaaatgatattagatattagtatttatctttattaaaatgatagttacacttttggggatacaagacatttgcctttttaattaattttaagagatattaaaaaatttataatgtcattctaatgttcaccaatcatatacgtactatatagcttattccacctacattaatatgacagatagatattcttcttcatcatataatttttccatttcatcccatctcttttcagaatttatcttaaaaaaattatctgctcaaactgcactttttctttctgcatttaattaataataatctaacatcaaagtatgagcttaaataatatttgtagagatatatttggtgctttctataatagtgatcaaagtattagaataggatatgcgtaagatgtatgagattatatttcaaaattagttggcaataaaaaaagtaactaactcatgtatcttatatatgatattatctttccctaatgtaggattctttaacgcagagtaaatcattatttgtaatgattttttcgtaggctgttagatcagagatgtaaaataaaaccattccatgatgtactgaaagctttgtttgatttacgtttgttgaataagtagaaatactctaaatttatttgatttgttgtacttttattttaaattgtaaatcaacttttgatccaataattacaatgaccagagtgagtgactacgaaaccattgacaaaatccactccctatttttgtatacaggtcggtgactagttaggaacttgttgagtagtgattgtttggattataaaaataaagtaatacatccactattcccgttttttttttttaattccaataataaagagttttagaataatttgtggtataaattttcagttacaaataaatatctaagtttaattttttttggaattggtac

SEQ ID NO: 66284 - DNA, 1657 bp, Cannabis sativa
ctatacattatttaaatagcataatgtatcataatcataactttgtttaaataatgtgaatccatgtcccgtccattattcaaacagcataactagtttaagtaatgcgaatccatcataccgtccattgttcaaacaacataactagtttaaataatgcaaacccgttgtaccatctattattcaaacaacataactagtttaaataatacaaatctatattgtaccatctattattcaaacaacataatatgataatgaacatatgaaaataggatagaagtcttatacctcattcccgttctttttgaacattattttatatagaagatttaaaagtttctacttaatttccttacgtcgaatgtggagtccttgccttgattgcaataagagtgatccttgagaaataataattttcttattacaaacctaaattttacacttattaattagaaaatattataggagtataatatatatatatatttatatatatatatatataaatgaaaccttaactttgaatttataaatccaaaattattaaaattaccttagtttccaaataaaactagcagaatagtaaaatgatggtggtgatatcaatatgatgaagaatatatatatacgtgtgtgtgggtgtgtgtgggagagagatgatgattatggtgtttggtattgatttgatctagagacaatattggatgaagtaaaggagaatatatgagatcttgttaggaataatggtgttggctttgatgaaacaaatggaagatttagaaacaagggaagtagaaaaggtgacttcggcagaggactttgggcaagaagagaataaaatctagtttggctttttatgagaagaaatgtgagtgatagcttctatatataggcctctactaactttacccagctgtagtactcatagttaacacaaaataaaaatattcaaatactaaaagcaatgactttctcttattactcggtcaatagaattcataatgagaggctatcctagattatcatctttagttgttgttggttgagatatttactctccaagatttcccacgtgctcctcttctttagactaggtttggtttatttaaaatttgaatgtgctaactgatttttcatgcacacgttgcacactgctccataaacttcttttacctcacataatttatttctgaaatgcaaatgacatataacttacaagaaatggtctattagtaaccttgacttccacgtggtccactaactatctctatctattcaaaattactacacattgcatacaaagaaaaagttaataaatgaatttttcatgttacatgctctaggattttgagctactaattttattgtaatatgccaataccatgatcctaacaactctagacaaagttataaaggccaatactttaaataaatgtcacttatttatataaaatagagaaatatactacttttgattatcactagcaaagaattgacatgtaaaaaacaattactagtccacatcaagatatctaaaaataataacatatattttttttataaggagttaataacaatcactatttccacatcgagatttctagctaacataatagaaaataataacaaaaaaatattttggttattacaatct

SEQ ID NO: 66285 - DNA, 713 bp, Cannabis sativa
caagaaaaccactaccaataacagcagctaataaaaaatacatatttcataaaatagtttgaaaactaaaattaatgtaaagcttattaatccaaccaatggaattactattaataatgtagattttgaaactaaactgatgcacaagaaccaagtccaaacgaatggcaagtagcacgccaaattagctgagaaatcacctaataacacacctgataaccacgcgaaccaaaccacaccctcttcatcgatcccatatcactcccctcaatccaacagagcaaaggattaaggtttaatatattaatgtaacgaggatgatattgtgtttttgtttcaggtggtggaaacagttgggtctggttgagaaacttggttttgcaagagatcgacccttagaatgttttctatgggtagtgggaatattccctgggaaatgctattccaacgtccggattgagctggccaaaactgtttcaatcttactagtcattgatgatatctacgacacttacggatctttggatgaactccacttgttcaatcatgcaattctaaggttgcatatacaataaactaatacataaaaacatacataacagtttgagtatcagtactaattttgctttgttctctattatatattttttttattagatgggatcttggtgcaatggacaagcttcctgagtacatgaaaatatgttacatgg

SEQ ID NO: 66286 - DNA, 840 bp, Cannabis sativa
  modified_base (807)..(810): a, c, t, g, unknown or other
tgtcctttttacattttatttttgcatggcaattatatatgttttctagttatgataagtcgtaattaagttaataaagtattttccctcaaaaaaaaaaaaaaaaaagtcgtaattaagtttttattataatgttatttaatttcaattttcatacattataaaagtgtttaaattattatatttaggtcgaaaagaaaaatattacacaaaattattaatgaaaaaaaaaaacttcatcaaattttgatcaaacaaatgaaaagtaagtaaagtaattaagtaatgatagttagagtaataagatgttatgattaaagaggtaataatagtaataattaacttttcgacagaatctatcattctgtgtttagattccttttgtgttgtttaaagctatctctaatggcaaaacttaaatttggtgttaaattaacattaaaaagttactattttaacactaaattatttttcaattccaaacacaacactaaaaattacaccaaattttatattctttattattctattattttattaatataataagaatattttaatactaaatatttatcaaatccaataaattatattagtaaatattattgaattattaattttttttttttaaaaaaaaatatcgtgatatatgatgcccactattattagtgggacactgtagatctccataaaaataaggtgacaattgcagtctcattggagtaaaacaaaaaaatttcacattatatatagtaataggactgtccaaaaagtatctgatctaatccaatccgcacgatccaatcnnnnccaatccgcaaaatgcggatatccacactt

SEQ ID NO: 66287 - DNA, 903 bp, Cannabis sativa
gagggaggagaggttaagttgattgttgcagggtttggctcaagaatttgatttagggctgaacatctagacccacaaatctgaaaacccaaccacccgccctgactcactgccgaaaaaagtcaaaaaatttgaaacccgtgtagtcgggtcgggtctaacccaaaaaagctcaacacgggtgtcaggttcgggttttaaataatacatttgtttactcgggttttaactcaatacctgaatagtactattaagtttaaaatattttttttttattacaatgaaaaaatatattaaaatttaaaacttaaaattaaaagttaaattgttctcagacagagtcagccgataatgggttggatcattttcatgaaaaatagttgcccatttcttcggttctctttgaatgtttgtagaaccaatgatttccttttctctcaacagcagcaacaacaacaaaataaaataaaaagagtatattaccattcgtaaactgaatcgtaacccaagaaaatcggcggctgcttcttcttctccagcgggttctcatctcaatggtcagctcagttcggcgagctgtgcttcggtgcctcttcagctccttatccctcttctatttttctgagatctgacctctggtgcccctgctcgtgtccgcccatgcccacttgctcactgtcggtctgagatttcttcttgagttctcctcttatctctctatttcagttctttatattcataaattatatacattatcattatgtacaagataataaattataatttttattatatataatgtagttctttatttaaacttatatgctttatattatacatttttcagtcctttatgttatacattttttatttaagcccgctgaatagaaatagaaaaataga

SEQ ID NO: 66288 - DNA, 1522 bp, Cannabis sativa
  modified_base (1454)..(1479): a, c, t, g, unknown or other
taaaaatcataataatgtgaattttgaggagaggggagagtaatccagcctcctcttttagcataaattaacgcgatcgtcatctttggctaattctagtacttgatcttctcttgtgacagtagtcattttggttacgtgaattaatgtccatttttatttcttctatttggtgctatgtaccactcaaaacacacacacacttatctatagacatgacacgaaagtatgtagtgggtgaactaatgcagaaacacgcactatatatataaatttatattattttattaagcatgtattactacgaaaaatatcatttttactagcttaattcattattgtgttagtaaaaattacttttactagtgtatttcgcaaattgctctgacaaaaaagttaaaattttaccctcttgaaaaagttatttttgctatcgttttttattttatgctgacaaaaattttaataccaatgttgtttgctaacacatcagaaataaattttattttaccagcgtagtactaaatttttgcttttcttgtaatgtatttctctcagtactctagctagttaaataattatatgcatgagtattactatagtctttctctcactctagataattacatgactattactagtctactactatgattaatttattggcaatgagtggatagaggatatatacattgtttatatgttgcaatcagaggtggagtattaccaataatgcattaattattgattataaaacatcatgtactccgatgtatgacgagtcactacttgagtttaagatgatatatattgcttaaatttacagcatctcttctcatatagcaccatataagtaggagattacatttttaatagaagaaaagaaaatgtgtcatgactttcggactggaacatatatatccatatcaatgatgaagctgaaatagtgagtgtataacacgcctaaaatttgtcatgccatttatacatcataataatatacatagattgcgtaataagtttatatatgtttatgaaataaaattgaaactagtttgtataggaaaatttgagttctatgcttaagtgtgtcccaataacaagacactcccccacataattatccatttatatgttattttatagtttaggggtgtttactaaatattcgatctaatctaagctgtaaaatatacggatatctgcacttgcgcggattgaattggattaaaaaatctaaaatccccacttgtgtagattgaatattatttgacctcataaagtaacgatccaatccaatccacacttaattatatatatatttttaaaaaattataatatatatacataatatatattaatttgatagtaataataataaaaaaaggattatttcacaaaaatataaaaacaacaaagaaattacaagaaatacggtttcacggaattttaannnnnnnnnnnnnnnnnnnnnnnnnntttacagaaaatacggtcttttttgttgttgtaatcttgttaa

SEQ ID NO: 66289 - DNA, 1246 bp, Cannabis sativa
ttatagttaaatttgtttagtttttattaatagataatactcattgagaaataatctatatatatatatatatattgtagttatattcaacatattccttccgctttctaaatgtttagaataatttactctactaattgcacttctgtttttttaaatattgttattgtaggaataaaagtgacacttctactattgttgtactttttatatatgttattatttatttatttatttttctaaatattaattagaatttttctcttttaaacttcgacatgtattaaatcataccttctgaattttctaggttgttaaaaattacatctaaactattgaaattgttggatttaaagatttttgtctaatttcggtcaattttgcaattgtccatattctaatcatgtctcctaaactttaatatgtaccaaattatgctcctgaaattttcatccacgtcagactttctatagtaaaattggacaaaagttcttaaatccaataatctcaaacattcgagtagaatttttaacaacttaaaagttctgatttagtatatgttaaaattcagagagtaaaaattcaaattaaccttcatataaggtatgaaaggtgttgagaattttggataaaatataaagtaggtagttaggtttagaagatgtttgtaaaattgaaatgaattaattagtattattatatgtgtaattacctttccaaggacagtccaagtgacattttcatagcaaggaggagtggtgagagagccaacatatctgtaatattttcttgtgttctttttaagtaacttaagatctaaggttccaagtggtacatgagcctcctcatcccctgcaaatacctcctttgacagctccttcattttctccttaatctacattatacatatacatacatacatttttattattaaactacattttatattacttttattcttatttatttaatacatagatagatggatcaaccttcaagagaagtggatctggagtactgtaattgaacagaattgctataactgaaaggctgtgatcttctgcttggtgaactaaatgtagctccactgggtatctgtaattttcatttatttcaaaaaagaaaaaaattgattttaataattgtaatagtaattatatgaggaatttttacactatatactaatatttttaaattttaattttttttactgtggggggaatttttttttcaaaaatacagtgta

SEQ ID NO: 66290 - DNA, 524 bp, Cannabis sativa
taaaagtttacaattttactctcacacacatttttttataaaaatactgtctttttataaaacaaccgtaaaacaattaaaacaacagtgaaataaccatgaaacaactataaaaacttaatacagtacacagtattttttaaaaaaataccaccccacagttgaaaaagttaaatggttagaaatttcagtataacaccataaaaaatagctctaaatttgtaaattaaattagtaaatgtgtttttaagaaaaataatgaaatagctaaatataataaattagttaataaaaattataaaaatatatttactacattttaatttttttaaaaaaaaatatgtatgttatcccaatttttgtcctcatcacgtggcatgcttacgtagacagaactcgtgccacgtagtagtacaactcactaaaaggaatgtcaagtcagaatccgagcaaacgaagacctcggcactcaaatggggatcaagtgacagaccagctcactctcaggagctggccagccaccc

SEQ ID NO: 66291 - DNA, 1767 bp, Cannabis sativa
  modified_base (1586)..(1588): a, c, t, g, unknown or other
tgatagggaaagggagacacaggtgctccatatgaccatgtcaacattattcaacctgtttttagtttgtttcacattttcataagcttacgtcattgtgtagtgctgttaagtcaataatctcccatttcaaaacttttaagtatttaaggaatcactagtttaccataaaataaccttttaataaaattattaattattacttgagacttattttatttacttgtatttaaatgaaaatacttgaaagtgaaacaaaaaacaaatgaattccactacttttcgccatttttttgaaactgtacttttcaccatttttttttttttggaaatcgtacttttcaccaaaaaaatttgatggctctaactgatcgtgcaaagaactctattttttttatttgttgtttgttatgttaagcaattgaagatgaatttgtttgaaaaaaataatattagccatacaagtcggatgtcatatttatttcgttgcctaatatgtaatagaaattagaaattaattttttttgttttaaaaaaaaaaatagttaaaataattactaaaacttgctgaaatattgggatttcattaaaaaaaggaacaaaaaaggtaattagttgggaatgcctcacaaatcacgtacgttaactattaaattatgtgccaaacaaaacaagtcatcactattcacttatatatatttccgaaaattaaatggagccacaagtccaactcaatattgattatataatataatacaaaatatatataaaaatgatcattaattataatatctataaaacacgtagtaattggccactaattatataagtataattatataaaatactaatttttatataaaaaaaatatatttctatatttaaattttttttttgatatttttacggtattttataaaaatacaaaaataacctaaaagtaataaaaaataatataaaataaaataataaacaaataacaaaaagcaacaacaaataagtgtaaacacaaaaatatactaaaaaaatatattttatgtaaataaaatctgaaaaattataaaaatattaaaaattcagtatatactgtatttttataatttttatattgttttcgttttttttttttaaattctcttagttataattatcatttaattagtctttggaagattgttatcaaatgatcgattatattattgtttgacatgtggtgagaattgtgagtttgattgaatcatatcatatgtcaaggtcctcatgaatatgatatgtatgtaaatgtgtataatcctaatttaattcttgccgacacatatcaatatatctagaaatttctatgcattgctgcccctaaaatgaaaacgaaagaagagtttatagtgcactgccctggtcagtctcactgatcggtttctatctaatatatatatatataatctattattatatagctagatagttagtcttcagtctttgctttgagttggattacttcaaatttatttagtttctctcgctggtcccacaaacccataacctttaataaaggattgtaaagttgatacaaatatatatatatatannnatatatttatatatatatctattctatataacgtggctatataatagaagtctttgtctacgaaaaattattaggtgatttttttttaaaataaaaaaaataataaattattagatgtatttatcacgtaaaggtcagctcatgtagttagttaaacttaaatataattaatccacgtt

SEQ ID NO: 66292 - DNA, 798 bp, Cannabis sativa
ggagcaaaggaagcattcgacatttcgtaatacaccatcctaaaaaagattagtcaatcttttcatggtcaagatgggtggcgtagaaatcaatcaatctcccttcagatctttcttctcagaggatgagcttcggtgtactcctcctcgacgtagtcccgactaacttccaagaaatcacttgcttcagacacaagttctccttccccattataattgccaaacggtagcacccgagctacctcatcttcttcattacctttggcttcagatggagtagcgggacagagcttgccctggtcctccactttctggacttcaacatcccaagcagtttcttcctcctcaatggtaggacgagcatgttccaccctggccagagtagctaaacaagcaatatgagggttggtacctgaaggtttcctaacagtctatttggttcttgccatcatcctacgtttggatggagttttatcaaaagtgtgcctggcaatggtcacaacaaattaggcagtaggtttccctttagtagttgggattgggctgccctcaggcaaggtgtcaaccacgctcgaatggaccctcaccacaaattttgtcggtatagtaatgatgttgcaccccaggattcggggaaggtgtatgatcactacttacttcccaatcttcaaagctagaatttaaaagatcatcactagatgaggatgggctagcacggagatgggggtgatcttcatatagaagttaaagaaaatctttgtcaatatgatacttgccttcccaaaacacacaagggtt

SEQ ID NO: 66293 - DNA, 1909 bp, Cannabis sativa
  modified_base (346)..(348): a, c, t, g, unknown or other
gggggggagccagaaggtggtgatgaggtttctcccgccaccaaaaatcgagtctcgggtcttaaatctgagccgttggttaaatttatcgggaccgttcgatctcaccggttcggttctgttttccatcgacggcttcgtacccaggtacttcctctctttctttatttttaatttgatataatttagtatttaattatgtttttttcaagaaaaaatatttaattgaagatagagtaaatttttttgttttcttgtagtaatattatttaagttcgattatttttactgtgataatacttgatttatctggccgttaatgcattaaatttttattttttatttnnnttttttaaaaaaaatataaaaaaaaaaaaaaatcataaaactaaaaataaataaaagtaaacatcataatcaatcctctttccttaactcattcctataattaaaaaagaaattattaatttggacgaatgacatgtaaaaatatttacgtaacacaaaacggttgagtgcaaaaatataatttaaattattactgttaaaaattaaatttatttaaacaaatatttacatgcaaagtctcggtaagaaataagataataagatggttcgatttcggtttaaaccacgcacataacacttattaacaaaatgacgagtgaaacgttgtcgttttatttttattaacgaatagaatggaggaatgtatatttgtagtcaggtctaaaaaaaagtataatgatttttttaaaataaaatattaaattttgtatttaaaaaaataaattagataatattttaaaagaaaatagttatattttttataaaaaatatgatatttaatatattcacttcatatgttttaatttttatattctttaagatatatttattttcatttttatagataatctttctattagattttaaaagttaacataaaaaattggtcaatccacttgaaaaattagataaaaatatgatattttttattattggataaaaaaagaattatcccgtatatttttttttaatttttttttttaaatttatgttttaagtttctaaagtagtggcaataattatttttatacgattttctgttgcaatttaagttgtagcgctaattataataaaaaaatactaaaaaaaattattttaaagtgtaaaaataaaaaaacacttaaaaacaaaatatttaataaatgtcgagtttgcgtggtgggcctagggcgtgagcccactcttgaacaagccctatttgtagcgaatgatacgattttcaataatccacgtggaatgtatgcttattttatttatttatttatttatttttttatttctctaatatttgcagaataactcatattatcaacccaatattaaataagattaatttataagagtttttagtttttttttttttatagaaattcacataacaactaatataacagttttaatggcaattaaaattttcataacaactcacctaaaaaattttagaataacgaacagaacaactcaaaccgtaaattaaaataaaattaaaaaattataaattaaataattcccgtaacttatatcttttttaaaattttttctaataattaatttttaaattcttggtatatattaagtattaatttaattataataaacaacttaaaacatgtgtggttattattatttatttcgctgctcaataaattcttgcctaataaccgttgtgtatggttttggtttggttcctactccacgatgtaaaattacaatcttgcccctcttgtataattatgatttctaataattgggacaggaatctcaaaggtacaaagacatgatacggcaacacattgacctgagaacgattgaagccagacttgataaaggggtttacttg

SEQ ID NO: 66294 - DNA, 2801 bp, Cannabis sativa
tatatttatttaataactaaatttaatttttataaattatatatatattaaaaataattccccaaaatattaggggggccatggccaccccataccataatatagttccgccactggattttatgttatactcttgaatttatctactttgtttatgttatatttgaacaattttaaaatataaaaataaaaaaatttcttaatattaataattaattaattatgatatatttgcattatttattattattattattttggtaaaactcctgtttgtttgaaatttttatttacttgatcttttctttgacaacacccaatcttttatttataaattttagacatcaattaaattcatcgttaaatattaaatgagattactactaagtctactatgtatatctatatacaatacacttgacattaaaattttaaaaccaataaaaatatactatgtatatgtatgtgtatatacaatgataataacaaaaatctaattaatatttaagagcattatttaactaacacatgaaattaaatataaaaagtattgccaaagaattcaaaaaattatgtacaaaaattaaaacataaatttgtttactgtataaaattaaaacataactaaacttcacgttaattatcttaatttttttttttttttgaaagaatcttaattttttttatacgctatatttttgcatttttttttatcttaatatttttgcattattgggtacacagtgataattcccaattagttttgtgcgccaaaagtagcctaaatttcaacacatcgttagctcaaaagaaaattttgaaaacgaaaaaagaaaaaaagaaaaagaaaaatagaaagaaatagaagagtaagacgagagggatttggcgtcagatggagggagctacagttacaggttgccaacacagtagagtttagacgaagacaaagacgaagaacaacgctcaccacaactccatacctctcagctcctcctaactctgccctagtagtccctcctctgttttcttctccaccgaaacctacgacgtttttactgacctgacgttcttcgaattcaaggtcgaattttgtttgcataagatttggagggttttcattaacaattttgattcagatgtgccgacaagagtcgcgggcgcgtatgtcggcggaagaggaagttgctgcggaagaaagcctttccatttactgtaagcctgtcgaattttacaacattattcaacgccgcgctatcagaaatgtaagcttgcttcttctctaacatttgtgttttgcgtattctcgttttcttcttctgatttttgtgtcgtttttctgtttgtagccgtcgtttcttcaaagatgtttgagttacaagatggaggcgaagcacaaaaggaggtagttttatgtttatttggaaattcgtgcttaatggacaaactgtagagggtagacccatttggtgtttgagtttattaggatatttcatagtccagtatataggaaggttgttccagtggtcaggtacatgctttgctccccattcttcatgaaagttcagtgggagaatatgtatgtatgtatctcaggtttcgacccttcttctcgcctcacacaggcacacacacaaacaaagtatcatatatatgcatctttatctacattgttttcattcttattactttctagacttgtttattctgttaatattctcacacccacttctaatttagtagatgttgtggatttttctttcaatgtgaagtgcaacatatgctgaaaatcatggagaagttggactttattgttaacatttttagggactaatttaatttttgtatttgaattgtagaatacaaatgacagttaccctttcaaggattgagaatgctgtacatactccgaatttgtttcctatgtacgttttcttggcaagattagttccggatgttgcagctgcagaggtaaagcatgtgcatttacatgtagtgaaaattagtcttattgttttgaattacaatcgagtaaagtaaattgattggtcaatgcatatagttatcctcattttacttttccaaatattgtctggtctgttggaagatctttatggtcgactgttcttgttgtctaattgtagttttgtttggaaaaaaaatagaactcagctgtatatcgattcaaccgagcatgcatgttgaccagttctactggggttgaggggagaaatcaagctcaagcaaattttgtactgcctgatattaataagcttgcagtggaggctagatctggcacagtttctattttgcttgtcagctttggtaagcgtgaacaatttaatttgttgaaatggatttatttatagctgtacaaggatctattcacggagtttgtctcttgttatattgttgcagtgggagttcaaaattctcttggtgaatttaatctgccaaaaggtccaattaatgtgtcttcatttccttgtaagttgtgaataccttaattgttcttgtacatgctatccttaagtgtgtttttttatgaatccagatttaatattttggggacaaattttttgttgttgttctttgttttgcgttatatggaacacagaaaatttgcaaaaagaaaaatgatagaaaagccttatattgctgtctaatttgccaaatgtaatggaagatattcatgaatagtaacgtactcatattttgttatcaactaaagaatgtaatttggtttctataatgttttaacattatcctaaataataactgtttctctctctctctctctc

SEQ ID NO: 66295 - DNA, 580 bp, Cannabis sativa
ttttttgttctctagtttcaaattactcttgttctaaatatgtcatgctttctatcaatataagtttataacttgtttttttttttctagaatatgaagattttgtaatcttggaatgattcaaaggaatttcctattataacagttagtaatattattatagaattaaagctatcaaagctgcaaaagtaactaacaaagcttttaaagcttcattgtaaaaataataataaccaaaaataacagatcaaattttgtagtggagagtaactctaagatagttatcaatgcgcttaatgagaaagagatttattgggcgcttgaaaactatgtctctttttgtatagactctcgtttgtttgttagttgtattttctctactattagtatatcttgtaattttgtagcccataatatggcaaaatgagtgtttactcactagcagtttagttgtatctcgttttcttccattccgacaaaccttttctgtaatgaccatgaggtctattaatttttatatatgcacgcttttattcaaaagaaaaaaaaaatctctttctcaaaactttataccgaaaat

SEQ ID NO: 66296 - DNA, 795 bp, Cannabis sativa
  modified_base (287)..(310): a, c, t, g, unknown or other
ttgaaattataaatatgaaaaaaaaaaaaattaagtttcaataatacaataattagtgggctttggggtggattgacattcacatattggacctaaatttgaaccgcatattaacaatttaaaatcgcaaaccgcaccggtcacgcagtttaagaaaaatttaaaccgcgaccgcaccacaaataatttcaaaccgcattttttttgtgatgcaggaaatttaagcggtttgatgaacacccgcaagtgtaaaatgatatttacgcttattattattattattattnnnnnnnnnnnnnnnnnnnnnnnnattattattattattatagttttgaaatattctgcagtagattcttttaaggttgttctactagattattatcaagaaaagttttttgcttaattttctttatgatcgtgtatgttataattatttaggattactcgagctttataaaattttgaataatttacagtgctgaaaataaagtttaaacaattacttaccacgcgtaaacaaaaatagtcgcaagtgcaacaaattgtgtaaattttattttcagcattgtaaactactcaaaatttttggaaattttacaaattatcacaaataactataacatatatgatcatgaaaaaaaaattaaactgaaaagctctcttatatgtcgaaatagataagagtataccaaaacactcttttagagtgtatacattcagtgactttatgacagtcagtagtcccgtgatctgtaaggaaaaatactgggtaagctgtgcaatcccacaccgcct

SEQ ID NO: 66297 - DNA, 765 bp, Cannabis sativa
  modified_base (535)..(535): a, c, t, g, unknown or other
agatctctagcccttgattcctgtctgtagcaaagcattattaagatctgacctagatcttcgccttcaattgacagtttgaactaaacaatcgtcatcactatgctaggtattggtttgacatgtgtgggcatattctcaatcactataggcttcaaaattattgagaagaagaagaagggattcaaaaaggtaaaataggctttatttaaaggagtatttacataaatatagaaaaaaaaaaactagtttagatatatgtggtaaggaaacttaataggaaaaaatatggtatttaaaataaaaacttaacatatatgggattgaattaccataaaatgaatgaaaccacagtaatcggcggagttgtcaccagagtagctatcggcaccgagaaagttgccaaagtttctgtcggcaccggaaaagttatcgaaattggcattgttggcggaaaaatcaccaagaaactggtttcttcatcaagaaatttcttgataaagaaaccaatttcttggtgattttttcggcgacnatgccaattctgatgacttttttaaagttttcagtcggtgtcggaaagtctccggagtagctgtcggtgtcggaaaagtcgccggaattggattgtttttcttggtgatttttccgataatttcccgacaacaatgccaattccgacgacttttttagcgtcgacagcaactccgacaaattttctggcaccagaagctactacgatgattttgcggtgccggcagcaaa

SEQ ID NO: 66298 - DNA, 946 bp, Cannabis sativa
aatttggtaagatcaatcctttaaattgaaataattagggttcaactctataatttacactatcgttttgttctatactcattccgtctactttagtctattaaatgtcgaaatagactgccactatatacacacatgtgtatatatattaaaattttattaatccacctaatattaataattaaaaaataatttaaaattttaaaaaatttcaaaataaaaaatgtttttattttttattatttttttctttttccttttttttattattttttctttttccttttttttttattatacgtgtaattagttgctttaactatcataagaattaggtatttgaagtaacaaaaagacatacattattcagaagtcatgactgatgtaaaatatcaactttcatacacgaacttattgcccaacaaaccgcaaacttaagaaagctcgtgcgattcaaagacactctttcacacaaaacttgagctatttctaagggatgctaaaagaaaattacccctggaaaaatgacgagccttatataataaatctactcaccaaagagtttgtttttgtcagtaaacacccccttgttttcccaaacattgccaaaattaaaatcgcgaagttaattacgaaagcccatttcactatagttatctttttccaaactcatctaatgaataccaccaccatgaagaatttgaatgccactaaaacttactcataattctctccaaatctttagacacatcaattgggaacaagaaaacactcatagcatgcgtaggcaatgattgggcaatcgtttaattagatcctctttctaagcatgagaaagaagcttcccattccaatcttgaactcttttcgaattctatccttcaagaagctcagaatcatggacttagactgactcaaggtattaggtaaccaaaataagtactct

SEQ ID NO: 66299 - DNA, 789 bp, Cannabis sativa
aaaacatactcgggttagggggtgctgtggcattgaggcgtgggatggttgaagttagtgtggttcgagccagacgagttaataaaggctaggcattgcctttggaaaaatcggtccgatacttatcatagcccgtagaaggaagcttggcacctttcatccaaggaccatatgggagatcatcatcattaccattatccattcgttccataaacttgatgcatttttcaaaaggatgtccgaggaatccacactcaaaacaaaattctgaaagacgctcatactgaaaatcaatccaaaactcatcacgaactttagggaggttgatcatttgtccacgagggagaggcttattaactggcagtttaacacgaatctgaaggaaaggaccccacccctcatcaactgaatcctcataaacatccaaaaactcaccaatgagatttcctaaagctcttgcaagggtcttggacgtgcttaagaaaggcaatctctatatttgcacccaaaagggggtgaatagcaaatcattggttgagacattttgtagagcagttggtgagtggatcacgataaggtgattttggaaatgccatggctctttattcatcactctaaacttgtccccagcacaaccaaaagaaactttaaataactcctccccataagcagaaacaacagcaggataacagccctcccagtgaccagacatttgttcaataaaatttggcttatggacatagttatcagtgagtacacgggcaaaaatcagatgagcagaagtcggga

SEQ ID NO: 66300 - DNA, 1837 bp, Cannabis sativa
tttcatgacaagtacccctgccagtacagtctgtgttgcccccctgaaattatgcctccatttcccacttataatgcccctgacaaagccatcacccacggccaaacccaaccagttggtctttacaaatctggacctttaccccctatccaagaccatggacaatggaacccagttgacttgcaaacccgtgccccagtcccacaccaacccgacaccataactccctcttacacagctcttctcaatgctaccatgagcaacactagtgccctcaaagctccccaagcctccaccccgacccagactaacacatcccaaaactcaagcagttccaaatccaccagctcgaagtattgtcaagttccatttcctgaacacatccctctccttgacactagcaaacggcttgaagtgatgaaccttacgtaccaatcgagcgtcgcatttcctgcggactcaaaagcttcaaggaagagaaacaaacccgattcaaaggacaaattcaaacggcaagccgaaatggtgaatggaaagctccgtcaacaaatcaaacgctcccgctcggacaatccacaagtcacgggaaactcctctggaagcgcaggcctagcccctgagcaggcctgcctgccgccatgaagattgtgagctggaatgcgcgtggacttgggagtgaacgtgcattccgtaacctctcccgcttagtgactgtttgtaaaccagatattttgtttattatggaatctaggcttgctaaacatgctgtcgataatcttagacttaaacttcattttgattcgggtctggaggtccctaggattggtagaagtgggggcctcattttgttatggacaaatgatgtaatcgttaacttactttcgcaatctataagtcattttgattgttacgtctcttgttccttacaaagcaactttttccactttacctatttttatggctccccaatagagtcgaatagacctcaaacgtggaaaattcttgataggattggcagaggcaacccaattgacccgtggcttatcatcggggattttaatgcctttttgttctcaaacgacaaacaagggggtaaccctgataaaggaccttcaaccgacttcaggcattttcttgattttttcaatctcactccccttcatcctaaaggcccccctctcacgtggaacaataatgtggctgccccgagaaacatctaggagcgaatagactgggggatcgtaaataatgcttggatcaacaacttccctgatgccctctcccatcttggttttttcagctcgaaccatcgtgctttagagttgactacctcaaacccccacatcacctcaccgagtgttactaacaagcggtttctctttgaaaacatttggctctcggacccgaattggactcaagttttttcagaaatcctgggttaaccctggaaacctccaggcggccattcccaatttaattgccatccaaaaggagtgtgccaatactcttagttcttggaaccacaagaaagattttcagttcaaaaagcacattctgaggctggaaaaggatcttgagaaagcgggtgagagtcaagtgtgggacgcccaaacaattgcaaaaatcaaagatgtccaatcccggttagacacccttctgtacaaagaagaaacctattggaagcaacgtgctcgaactcagtggttggcccagggcgataaaaatacaaaattcttccatcgttttgcgtcgcatcggaaaaaaattaataaaatccaaaatctcatattgtctaatgggaccactgtttccgatgaggaagctatcattcgcgaaa

SEQ ID NO: 66301 - DNA, 1759 bp, Cannabis sativa
gagagagagagagagagttgaaagagagagagcttccttcttttctaatttttgttttttataaaataaatgagtaaataaaattagttttattaatttaagatcaatctaaatatcagcatactaatccccaataaagtctactaaaggacaaaaagctaatgaggcaaaatgaccattttgccttccccataactaaaaggtcataaaatcagttaggggtattttggtcacttctagaatcccgactattcccgatattcccaatgtctaactatatttccccgttatactaaaaataataagatatgattctaatagccaaacaccacattccaatgttgccgggcacaaaacatgcaaaattataaaattccatatatgatatataaaatgtattctgaattcaaataaatctccgtaaaatgataattcataactaacatgcaagcttcataattaaatcctaattatctgctaatttccaaattaaagttaagcgatctttacaattatccccccttaaaaggattttgtactcgaaatctaacttgaacaactctggatatcgagccctcatgtcgtactctaactcccaggtggcttcctcgaccttgctgtttctccagagtaccttgaccaaagctatggtcttgttctgaaggaccttatcctttttgtctaggatctgaactggctgttcttcatatgacaagtctggttgcagctcaagattttcataactcattacatgagcagggtctgaaacgtatttccatagcatggaaacatggaatacattgtgaactgctgaaagagctggaggcaaagctaaacgatatgccacttgtccaaccttctcgagaatcttaaaaggtcttgtaaatctagggcataatttgcctatgttctcgaaatgcttgatccccttcattggagacacccgtagaaacacatgatcccctacttgaaactctacatttctgtgtttcggatctgcataactcttctgcctactttgaaaggcaagcattctggctttaatcttttatattgcttcattagtccattgtacagattccagacccagatattttttctctgccgtttcatctcagtgaatgggagatctacactttctgtcatacaacaattcatagggagtcatccctattgtactttaataattgttattatacgagaagtctatcagtggtaggtatttactccaagagcactcaaaatccataacacgggctcgtaacatatcttctagtatctgaattgtcctttcggactgtccatcagtttgaggatggaaagttgtactgaatttcagtttggtacccatagcccgttgaagactttgccagaatttagaagtgaacttcggatccctatatgaaattatagactttggaataccatgtaatcttatcatctccttgacatataaatctgcatgttgatccactgtaaaggttgtttttactggtagaaaatgagcagacttcgtgaatcgatctaccacaactcaaattgaatcaaataaacccgtggttctaggtaatccacccacaaagtccatggtgatatcctcccacttccactcaggaggtgtcaaaggctgcaacaaacctgccagtctctagtactcagccttgatctgctgacaggttaggcatcgtgatacgaattctgccacattcttcttcatcccgctccaccaaaagtagggtttaagatcttggtacatctt

SEQ ID NO: 66302 - DNA, 864 bp, Cannabis sativa
cccgctattactaaaatactaaattatgcgaaaatgtgattctattggtctaacgtcgccttctaatgttgttgggcataaaatatgaaaaacataaaatttcatatataacataaatagcacatgtagaatttaaatatatcaccattaattaataaatcaaaattagaaatctaatttttgaattaaactctaattatctgctaatttctatattaaaattaagtagtctttacaattatccccccgttaaaaggattttgttcacaaaatctaacttgaacaactctggatattgagccctcatgttggactccaactcccaggtggcttcctccaccttactgtttctccaaagcactttaaccaaagttatggtcttgtttcgaaggactttatcttttctgtctaaaatcttaacgggtagctcttcgtaagataaatctggctgaagttctagattttcataactcaatacatgaatggatctaaaacgtattttcgtaacatagagacatgaaatacattgtggactgcagaaagtgcttgaggcaaagctagatggtatgccaccaatccaaccttctcaagaatctcgaaaggccctgtaaacctagggcataacttgccctttatcccgaaacgtttagttcccttcatcagagatactagtaggaatacatgatctcctacctaaaattctacatttctacgtttcgaatctgcataactctttttcctactctgagaggcaagcattctggccttgatctgttatattgcctcgttggcctgttgtactgactcaggacctaaatattttctttctccagtttcatcccaatgaattagagatctacattt

SEQ ID NO: 66303 - DNA, 772 bp, Cannabis sativa
ttcatatttaggttgttaaatcaacattcttgtgagtagatctaagttcctggtaaaataacttccaacagttatttcctattttgattgcgaaatgtagtcccgagcttgtcgaaatttattattttcatgcgtaggatttaggtttgaaaattagggttgctatacgtgaaattggttcgcatgaactttcgggtattacctctatagctaattagtgatttgcgactcagtacatttttcttcaagtagatccaaggacaattttaagagttcttggttttcttctttattatagaaatctcgtctatgggtcgcaatattgacttctactggcagcatcatctatgctgagaatggagtatgtcctgttgctgtcttctcatttgttctaggagcccaaagtacttgaggtagttcatcaacccatctacctttggcagcgtctagcttctttttgataatatccttcaaggttttattaacaacttctacttgcccattcacctgaggccttgacaccgaagagaagctcttaataattttgttcctctcgcaaaactcagtgaataactcatcatcgaactgagttttgttatcagatactatcttaatgggtatcccaaacatacaaattatgttcttgacgacaaagtcgagaacttttttgcaggttctgaaaaccagaggttcaacctctggccactttataaagaagtcggcagccaccactgcgtacttttctcctcctcgccctgtggagagttcccca

SEQ ID NO: 66304 - DNA, 2685 bp, Cannabis sativa
acaaaaatgctacatctactttttgtacaatgatatattagagttaattattgtatattagtttgtcttgggtatattcattttttactaggatatatctgttttgtgtatattagtatactatttggaagaaagaaaaaaaaaatagattgtgtatattaattttactgtatgatattagtttaatattgtagtatatcagttttatttactaaagtatatcatctagggaaaaaaacttaagttattggatggtatattaattttttaccagggaatatatattttgtttaccttgttataccatttttttttaaaaaataaaaaacttagattgtaatttaatttttatttatggtatatttatttaagatgacgatatatcaattatatgtaccaaaatatattatgaacgaaataaaaaaataaatagaagaaatgtcatatcaaatgtaatgatatatcttattttatgaaatgtgaaatatcactatatgtcataataatatcaaaaacaacacaaataattatcatataccagagcttaaataatatatatacgttgaagttaaatttatatagcatatacacagtagtagaaaataaaaatagaacaacaatgaaaaaaattatcaattaaaatacaaataatttagaaaataattttaccaaataaaatgatatgctacaacaaataaatttgaaaaagtgtaagagagtagaacaaaactttcatattctttggagcatatgtattttttatttgaagaaaccaattatgttgcttttgtttagttcgaatcaatttcgtttggaagaaatggctattgttgccttagtttggaagaaattaggaggaaatggttgaagaaattcgataaattaattaaaaaaatttgatgagagggtagaagctttaataattttttgggaggaatcacaataatttagaggaaagttaaaaaaatatggaaatccttcattcctcgtgtagtgtggaggctttggtttggtttgtgataattgagttttttagtataaatatcatgtaaaaataatgatacacttattgtaattaaggatattttagttattaaaatttaaaaaggacatttaccttaaaaaaatttaaaagggacatttactatcattagtattaaatttagggtcatttattgcaatttctctttctttaaattatcattttcaattacatgatcctccttttttataatctccggctttgttgcaaatgataagctaataggctccggttccgatccctctcattaacttggtagtaacacttttgataagctttttgatacataatcccttctccaatatattattacttagctttgtcctacccattacacaatgaggcacaatatgcatataaattaggtgattaagacttcactaacccccttggtgcaacgcttttggatcaccaactttatattctcaatatccttacttttatttttataaataataataatactaataattttaccttttatttgtttagaacacttattgaagaatggttggcccactatccaattagttatttcatgcaaatagtgttgaaatctatataaataggaaacctactactatcaactaggttccctcaatattggttttgaagtagtggtgatgttgttcatgctaataatatttaaaaagttggggatgtgggagtttgtatatcataaggctgaatgattgaacatacaattatatttaatattttattttattttatttaacttttcttttcttttgcttgtgttgtggctaaagtcaattggattaggtcttaaaataatattcctttgtaaggaaccatccactaagaataggacacaaggaatttaatatgtaaaatagataagattggtaacatggggtttgattgtaagggcagtttttggaaaatgaatcttaaagaataaggcttgttttggttgcattttaagagtagcctttgcaagtaagtaagatttgggtattttgcctgtttgggtgaattaaaaaggctaattttatttttatgaatttaatattattgggacatcacttgagactttaattttcacttcaatcaatgaaaaggaagtgtgaactatgaaatattcattctagtcctttctacatttgtattaatttatgtagaagtagaatattcccttgtttttttaaccaatggtaattttcttctcgtctcgaacatgaaagcactacctgacaaaattttatgttggttgacctgcatattcttttgtcaacaattttgccaactttattaataattgaaacatataattttgatccaaataagccattagctgcgtagctcaaagccgggatagccatattaatgaatactggcttaagtttacccattcaaaacctatatgatactcccctaaataaataaaatatatatttcttctctctctctctctcttcacaaaacattttaagagttgaaactgattaataaatgaagataaaagtcattccttttcataaaatttactccaaaatcaataagcaaaagagtccaaactcggaatgacttttgctgacacttcggtattagaatggctttagtgctattagaacaagatatggagttcaacatttgctgacacttcggtattgaaattgctt

SEQ ID NO: 66305 - DNA, 656 bp, Cannabis sativa
tatttatatatacccgctttaattgtaatagctgcagcttcttctggtgtcttagtataatgttggctatcatacaagacaccaactgaatcacaatctgagacaatgtacctgtttacgtccaacaaaatcaataccaattggcgtaatttaatatcgagtcctatttacaaagggttggggacaacttacccattaagatgccattggcctcttattaagtcttttaggagattaggatcagcacaagtgggtattccattgacttgattatatgagcacataacacttgcaacatttccttccaacacacaagatttgaatggtacattataagtttcttcaagatcctgtttgctaacttttgcattataatggtaacgatccacaccattccaattgtcaagatcataagctgtaaagtgcttgcaacaagcagcaaccttaaggcgattcccttctccattaccttggagtcctttcacataatttgctgcatactttccagacaagatgggatcttctccaggagtttcttggcatcgtccccaacgagggtctctcaatatgttcacatttgggctccaatatgtcagccctgcttgtcctccattgtacattgctcttgcttcatcagacacaacctacaataatat

SEQ ID NO: 66306 - DNA, 886 bp, Cannabis sativa
aagtgtacatttagcagccattgtttaagtattttgaaagaatggcttggttggaaggtgagtgataaaatgctccctgctatgctgcggtggatatcttgagcaagcatgtctaagttcaaaaaatatgtactaagtgcaacggttgctgctttagtataccagatttggaaaaatagaaatgatagtttttggaatcaaaaaatacaaagaatagagatttgtgtacaaattgtgaagttcaatattacaaataggattacaaaagtctattgtaaacggattacaaaggaggatagaaaatggtttgatgctctttagcatcttgtaattatatagttttggttttgagttggaacaattgtaaaatgttgattgagatgagtgaaaactatactgagctgattaataaaaataaaaaaaaaaataggcggtctttacaaatacaatacttggtgggaaattgatgattttttttttcacaaatgggaatagttgtaatgtagcgctcattcagtgattttactgtggtaactggttggattaataagttttacattaattttacttttaagtgtgttttataatatacttattctgtattagttgttgttggttgtagttcttgtagtatcattccgcgattagcgaatggtgttgctcatacactggagattgtgtttcgacatatgcttgtcctcgatttttaaattcttctgtaatagcaggtttatctgaataaattttgcatttcttaaaaaaaaaatgtagcgcttacccatataattttgtttgctttgaaataatgttttgctggaagtttgctttgaaataattgagaaacgtagaaaaagagagagcccatccaaaaaaaaaaaaaaaaggg

SEQ ID NO: 66307 - DNA, 997 bp, Cannabis sativa
aatggtgtctactctttttagaaatcttctttttgtgatgatttaggatcagtattggatgatatttatagtttactatttaatttttctggagcgtccctaattcatgttcgtcgctcggtcaatatgactgcatatgaattggttgtgcatgcactcaaagtggatggtaagcttaaaaaaactatcagtcctctctattctccttccatcctaccaaacatatcgtaaatacataatcaaacatatattttgataataattatggtagattatgtactaaattagtaaattgtagctatattgtgcatatagaattataaaagtgtcccacattataaaatttgacattgttattggtgtatttaattatcgttcatcatatattttgatttaataacataataaaaaaaccatattagtgtacgtagtagtgagcatctaatatgattattctaaaattgtaaaataacaaagcagaacaattaaaacaacaatggaacaactaaaaaataatcgtagaacaaccgtgaaaacttaacacagtacacagtatttttgaaaaaaaattctaccctaaagttaaaattaaaaaagttgaaaatgtcagtatgtaatgaaaaattccatttttttaatccttttctataattaactattattagtttttgggtttgagttggataaatgggcctaactagtataccaacatatttgacacaaaattattacttttctacctctattatatttttttattaagtctaccattattactaagagtactcacatcaatttcttcaacataaacataattttatatgtaaaaattcagctaaaaattgtcaattggcttatacatcaaatgagctactctaaaattattttaaataattgtttctttaaatataaatatagctacaactattcattgagctatatttattttattattatttctctctcactcctctctcataccatctctttatttatt

SEQ ID NO: 66308 - DNA, 1033 bp, Cannabis sativa
tacttagttattttcaactcactacctttcaatattttacaccatgaagacatgaagaatccaaatccaaggtctggaagctgaaaacacacaaaacaacaactcggtcgtcaactcgggtgcccaatgcccaagttgacgaacctactatggttttagttttcggacccgtcttagtgcaaatgagcccaactttgtactgggataagaattagacctgtcaaaatatattgaggtaacgaaatcagaatatgagcacttattgctttgagtaccttgagcattaggtgcctcgggcacccaacgaccagggtgacatattgttaaccttgggcatttccaagcacaatactaaagaactatcccgatcattttcttcatcttcgtccaaaacaaggaaataagtgctttcagaggagaaaagaattgacctgaaagccaaaatgaggacccactacccatgttgacactttgtcatcttgggccacttccatcaatagttcagatgaagtattccaggcatattctctattttcataaacaattaagatttgagctcttttgggaaatcaacagagctatttgggggtcaaaattgggacccaaatcttaggttgaccaagtggttgtggctctagctgcagcttttggtgcaaaaatcattgattcttaacatccattaaagtataaatctaatttctaataattttagtaatttacattgctttgtttttgaatttgtaaattttttttggggggttttcttaatttttaagattgtgttatggtagtggtgcgtggtggctagattttggtcagtaatggtggtcggatttcgataataaggtaaaaatctaaactttaatagtatatatgtatgtattttatatttcattgaatatgtattgtatgtgtatattttgtaatcgtattgtatatgtatttgttgttcgaattttcataagcttgacacgtggaccctaatatagaaaggctaaagatagtcagctgttcaacccttttgaccacggtt

SEQ ID NO: 66309 - DNA, 1152 bp, Cannabis sativa
  modified_base (344)..(344): a, c, t, g, unknown or other
  modified_base (1121)..(1122): a, c, t, g, unknown or other
tgttagtcgataagagtggtattttaatactcttagactacaccaaatcaggtttgtagacttgtgttagtactagaaagtctactgatgggatgatgattactttgggggtagattagtgattttggagaagtgtaaaaacctatctggagtctttacctctatcagtgagactaaatgttaaagttgcaggaaagatactgttaacgcagatttttgctaaccaaaatttgagcctaaatgataaacttgcaaagaaaaataaaaacgataaagaaaaggaaaatatgaacacaaaggattttttacatggttttgcggttaaaattctgcatagtccacgngtcaatcttattagatttctgatggtttttcagggccttttgctcttatgattttttcgtcccttttttaatctaacttgactctatttataatcacatactaggcagttaattacagaattgaccgtaatctttacaacctttatcccctgaaatcgtggggtttgattacatatcacgaagtataaatacagttataatttgaaaatcacacagctgtgactaatatgcttttacaggatcaaaatgatcgtgtatttgtacacgttttaaatcatagcgttctgggatgtctcgacaggaacttagtactaatgaccttgatagcgagctggaatttttccccttatttttttgaggttgatgatatacgcctcgttgtttctttgcttgaaggcgtaacacttcattttgacaatcataactcttaatgataaaaagagtacttcagtagtcattattcgaatgttagcttctgactcgtcaagactataaatctcagtgaaagacgtcttgaagttgattggtaaaaataattggaataggccttcctacatcgagataggaacctcgcttattagatcttgagtccaccaaactgttatacttagtttgtatattatccgctaagtgttttcacagtcaatatgcatcgcttttgtcttcccaggtgtgacaaagttgatgcctcgccttaggcatccaatgccgtatggtttctcgttaatgcacgaggcaacaatatgtttatctttatcttgcataagaccttatagnnagcgagttgcaagtatactctgttaattct

SEQ ID NO: 66310 - DNA, 853 bp, Cannabis sativa
acccgcggcggcgaactcccgacccacacgcatgctggggccgggctcccacgtgtggaagcggcagtcaaggacccacacgtgggaggtggggacgtcgttgattgagccgccgaggacgtagatcttgggacccaatgtggcgtaggcggagccgaccgatggggaggggattgggggaacaggaacgatgagggtctggaaatgggtgtggtctgggagtgaattgtgctgtggtttgtaaaaagtgagccatgagaaaggattttggagggtgtgagagcgaagggtgaggtagaggaagtgttgggtggagttgaggagagagcgagcgttgaagaggagtggggaagagaggagggaacgaaaggttttggagacaagggagagggttgggtggtggcaccttgggattcgagccagacagttcaaggcgacgtcgtctgagagagaggggatgagcaccgccgattcaggagccgactgcgatgatgattcggtggtggacatggaagaaggtaggtgagatcaatgatcatcgttgcatctgagttacggggttatatgtattgctatgaaagtaacaagtaatgacgttttggtttgttgtaatgtattggaatcatgattagaattgtaatgtttattctcattacaattacaacaacaaactaaaccattaattcctattacaattatcattttattccaccaaactaaatactatctaactaatttgagctccgaggaaggccgggtgagacaccataaaatgactaaacctacacgagagttagctagtttgagttttctttaaaaaaaaagtgggttatgttcgagtttactcgcctaa

SEQ ID NO: 66311 - DNA, 936 bp, Cannabis sativa
  modified_base (73)..(73): a, c, t, g, unknown or other
tattttctgtaaataaaaccaaaataatcttaaaaatgtttaaaatttctgtgaaatcgtatttttgtaattnttttgttatttttgtgtatttgcgaaataattcctaggaaaagaaggaaaatagatagtgtgtggaggtggtataatgacatcatggatgtttaagaggtatgagtgtaaataaaataaaaacaatgctaaaatatagaaatagccttgtattttttattttttattttttaaaataaggcattttataaataaaaattaagttagacctcatcgtcgttacaaaagatagaatctggtatagaagatagctctaccatacctataacattgttggtaaaatccacttgcccatgttacgagccacaaatttataagttctaaaaataaaaataaaaaaattacaacttaacataaaagtagagagatgtttacaattacacacatagttatcaatgctccaatagttgtcagtacccttcagagccttgataactaacacaaaaggatgatactgtgaaatggtgcctccatggctagcagataagccgcaacttctccaataagagaatcacaaaagttgaacatgcttgtaagaataaccttataaggataatggggttatatttttgggtttttatatttttcatataaattttccaattaaaaataatcgatagaagaccacgtaaattctaatatagggtatcatatattttaacttactattattattagtgtaatatatctaattcatattaaaatatttgaaaagcatattaatttaaaaaagttcccaacaactaatctctactctattatttaaaatgcatcacaaaagtttaattttctatattttaccgcacacaccatataggaccggccttaggttaaagcggactagacttgcacctaaggcctact

SEQ ID NO: 66312 - DNA, 698 bp, Cannabis sativa
tacatggataaggtgtcgagtaagaacgataagaccaagaagaaacacaagaaggagaaaaaggttactcaaccagaagcgaagtacaatgtgtacggatatgcacgtgccctgtaatattgtgcatttgaggccatgcaagttttggggaagaagtatggccaatgcaaaaggactcgattccctcgaatgttgaactggagcacccccgactcagtcacggaacacgatgtgaagcaacctgatgtggctgcactatttgagaaaagggtatgtgaatctttctctatttttgttgtttatctttgctataagtgtaatctgtgtttatgtgcgatattgatgcgacattgtgcgatatttgtgcaatttacttaacagtacattataaatgttcagttgtttagtgtatttttctggtgactttctgcgattgttgtgcgatttttgtgcgatttgcttggcggtctcttataaatcttcacttgtattgttgtatatttttggcgatattatgggattactatgcgatctttgtgaaattcttaatgacagtagcttataaactttttttgctgatgcataatagatttttggcgatatagtgcgtgtactatgcgatctttgtgcaatttttaatgacagtagcttataaagtttattagatttttggcgatgtagtgcgatttatgtgcgat

SEQ ID NO: 66313 - DNA, 1476 bp, Cannabis sativa
aaattgaatttttaatatctaaattaatttttaataaaaaataaataatttattgtcgctttgtcagttttaaaatttaatttcttttttaatttttttaatcattcaaaatgttttttttaagatctaaattaattttttaagatttactaaagaaaatggttaatctttctcatttttattttgagggagtacgatttgataatattgtcaaagtttagaaggcaaagttgctaatttacaaagacacgtcagcatttaaacagaatgatgggaaagaacctaacagaaagactaaatttctataaatgtaaaagttcagggggaattcttaacaaaccgtatattttaggggacaagattagtattgtcgaaagttcaggagaaaaggttgctaattattctaaaaaacataatgtgttgacatcaattttagcaaccgacgcttaatcttttattaatgtgattatgaacaaataataattaagtaataagaacacaaaattttttataaaggttcaacctgtgatagtggtaatggcttactcctatttttgttatattactagagtattcctaagatcacaatgagctagccaggtgaatttcttaacaatctcgtgaaagcttacaaatattttagcagcaatagagctctctaaaaagtagaatttcggatcctcaaataatgaaatgacttcacttttttttatagagaaaatacatgaaatatgttactcaaaataaatggaaaagaaacaggaaactaagcattaattttctcaaatctctcggatgacctcaatcaatcacataaatataaggatttaattatgctacaattgtagagatatttgaagaaaatgtcttagagaatctataattattgcatctttctacgcaggggataatgcttcgctggatatatgtgttttgctcagaacattatgagattcagaacctgttcggatgttgcatgttgcagacttaaacaaccattttgagcttgattccttctggacgaaacatcgagcacgtataggtcgtctcggtcttcatacgcttttgacatgtcaccctattgaatgccatgtcaccctgtgcaaaaattgggataacatttgccttaagtctgcgtgggaatagtttttcgtgcgtggacttcttgtctttaggttgctcggatgggtgacacgtacctaatcccacgtgccctcccaagactctttgaagatcaacttagactccaagcaaagtcaccatcgtcttcaagtgaaaattcatcttcttttagcttttttaagtgagaggtttccagtggatctccaaaatctaccgtacaacatcaccactacctcatccagatcaatagagaggggtacattagatttatttgggagctaaataaagactagaggcagaatcttctagcctcgtggacatacaaggtctgcacagacgtccctaatactcttt

SEQ ID NO: 66314 - DNA, 686 bp, Cannabis sativa
aggtttggttttcaagatgccaaacctgttagcacaccattagctcaacatttcaagctatccaacatgcaagctatccaagtttgtgtatggagaaggtgccatacacaaacttggtagggagtatcatgtatgccatgatttgcacaaggccagatctatgccatgcaatgagtatggttagtagatttattcaaaatttaggaattgagcgttggaaggctgtcaagtggatgatgaggtatttaaagggaacatccactctagggctgaggtatcattcagagtttgaaacactagagattacatggtatgttgactctgattatgctggtgactcatagaccagaagatcacaaacatgctatgttttttgcttaaacagctgcacaatgagttggaaagctaacttgcaaactatagtggctctttcgaaaacagagattgagtacatagcttgtactgaagctgtaaaagaagctttgtggctaaagggaataaccactgattttggtttaagtcagagataattacatgttcacagtgacagacaaagtgctttacacttaagcagaaattagatgtttcatgagcgtaccaaacacattgatgtgcgactaacttttattagagaggtaattacagataggaagatcaagctagacaagatttcaactacagaaaac

SEQ ID NO: 66315 - DNA, 711 bp, Cannabis sativa
  modified_base (289)..(292): a, c, t, g, unknown or other
  modified_base (587)..(590): a, c, t, g, unknown or other
atgcctgccaccaccacaatcttttcaacctggtgagcgcaggtcagtgtggagtggagctcagccgcctcccatccgttggcacgggacttgtagttctcctaggccacagaaccctacatgacctgctccagggtggccagttgaaattctcctttcttggaagatttagaaccagatgcagaagcagacattttggttctaaaaaatcaaaaaaatccagcagttaggccccaaacaaaccctaatattccaaaaagggaatggggtcccctaaccgctggaaagnnnncccctccggacacttgccaaataagaaacccccaagaggctttccttggcaagagtcaggtgcaagaatcccaaaggtagtgacattgcaaacgaaaaaaaaaaagggaaaaaggcaagatctactttaagccctaaagttgtcattacgtgggatgaggatgattcctcaacgaaagcgtagtgtaaagaagtaatctaaacgcaaaaaggaggaatttaacacatcattcagaaactcgagcaaacccattcctaagagtttgacatccaacccagaaaacataaaacatgcnnnntaaacgaacagtaagcaagtatactatgacaaagaacttacatgaagtttgaaggctgggggttggtgttgatcgccggtagaacgaagactgggaacgtcgaaggaataggagcaagaaa

SEQ ID NO: 66316 - DNA, 1172 bp, Cannabis sativa
  modified_base (1102)..(1112): a, c, t, g, unknown or other
cgcgtgctcagagacagccaagtacagaaacaagtcttctccgagaacgggttttgattaatttaattagtgttgggaagaaaaggaataaatagggtaaatgtaagagtattgaaaaaaataaatatttgtttggatggaaaaatagtgaaaagatagggtaaaaaaaataaattaggaatgtttatttaggtgaaataaattgggaagataaaataggtatttgtgtgtaaaatgtgcgagagtaaataagaattttggctttttttgtctcagtagaacacttggcgcggcttgattcgaggagaagctaacgggtgcttgcgtggcttgtgttggttcgttgggcgctgacgggctggggaccacgcaggccagctggcggaaggaagagtcggggacaatatgttgaatgtgggtcccatgtagcagttggctggagcttcacttgctccttggttgggtgattctcacgcgtggatctaggccatgcgatctgttaaagaacggctccgattggagcaagcagttgaccgagagttcgtcttttcttgggcaaatctgattttctttacacaatttgtattttgggccccatttcttcaaatttttttcaatttaatcccaatctttttgtcacaaacacacctaaaaatacataaaattaattagaaaactaaataaaacttcaaataaataacacataacatattataacaaaataattattaaagcacacaataaactataaaataaacataaagctaataaattcaaaaataattaaaaacttcacaaattaattaaaaacttaagaactaaaccaattttaatttaaaaaaaatatgaaaataactctaatttctagagttatcatataagctgcctagcagtcgtatttcaagttagcatccgaaaggctaactcttggaaggcttttcccttagagttccatgcacaattctcttcttctccccaactcccgttccatttagatgacctggtcgaagtaaagcaaaagccaggagaacctctctgagcttacatcagcagatttatgacgggggcaacgaaggttgcacgtgttggaaattattttacnnnnnnnnnnnatctactcacaagtatgtcgattaacaccctaaatatgaattttctaaaatgatgaaata

SEQ ID NO: 66317 - DNA, 757 bp, Cannabis sativa
  modified_base (43)..(45): a, c, t, g, unknown or other
  modified_base (78)..(79): a, c, t, g, unknown or other
catgttttgtgtccggcgacattggaacgcggtgtttggctannngaatcacatcttagtattttttgtatagcgggnnaatagtttagacattgggaatatcaggattgatcgggattttagaattgcccaaaatacccctaagtacccctattatgttgttttagtgtgggaggggcaacattattttgtcctttagtggacttagttttatttaataaattaatttttatgagttatatgctgttattaatgtgttaataaagcatcatttatccatttcatttacaaaatagaaaatttggaaaaaatcaagagaaaagcttttctctctcaaactcactctctctttttcggctccctagagcagctagggtttaggtgtgattttttgcatttcaagcaagtttcttcaaggattaagttttcttaagttctacgtaaattcttgactttatcctcttaagtttcttgagttttaaggaattgaatttatgcatgttttgagttgttcgttgctgtagtttctgctggtgttttgtatgcatttttgtagttaaattatggttagaaatgttgagtttggcttgttttaatggctggtttattgtttgagcaagctttgagttttagaactcaagcttggctctttaatggtgaaattcacttctgagctttgattgctgttttgttgcttagaaatagtttattgggatataatatgcatgtctacaaagttaggttgagtttggaaacg

SEQ ID NO: 66318 - DNA, 1080 bp, Cannabis sativa
tcattttctcatatttttgtaaatagcccttttttttttggttatttttgcatttttactctcattcattattttatattttttatatgccaagttttcgaaaaattgtattatagtttcaaaattataaaaataccgtgtttcactaataaaaaaaacttaaaaataattctaaaacaacttaacaaacaacatgaatacaactataaaacaacaaaaaaaaactacaaaataataaaaaaataacaaaacaatgacctaattctaatatgaaaaataatatatactattcaatatgtttttgtattacgattttcttttttacttagtttttacaacttgatttatctttttgtactactacattatttttgtcataaaatttattattacttcatatttttaactttttttttttctattttaatttttgagttagtagtagttaaaatgataatttattttttaaaaattaaataaataattacattaataatagaaataataaaattttatgattcaaaaatagggtatataatataatgagtaatatgtaattaatatgtcaatatctactactgcacattgtgtcaattaaaaataaataaaaaatcttattattgtattttaataaaatgtgtataaaaaataaattaaatatatgtatctaaactacaaagtaacaaaaatacaactaaaaataattgttaggaagaaaccgaaaatatacactataaaaaaatacacaaataaaaaaataactattgaacaaaaaaatattttgaaaaccactaaaaataacataaaaataacaaaacaaatgcacatatatacaaccaaaaaaaaagtgtgaaataaattaaaaatatacaccataaaaaatatatataaactaaacaacaactgtaaaaaaaaacacacacacacacaaataactataaaacacataaacaacaacataaaaacaactataaagtaacaagacattaaccttgttaaaatatacaaatcattcataaatcaactcccaaaaaaactacaaaacataataaaaaaaaaaaaaaaaaaaaaacttctttt

SEQ ID NO: 66319 - DNA, 1148 bp, Cannabis sativa
tatttttaccgctactttttttttaattagaattatatttataataattataaatattaataaaatttcaccgcaaataaccatattaaattttatttttatgaaaaactaattcatatgggaaatttacatgatatactaatttttgttattttcttacaaaaatactgctaggcggtagtcttttcatttttactgtgtttttttaaaggttttacactgctactgccttttattaattttttttttgtcatgttttggaaaagaaaaaagatttgatgttgatataaaatattttttaaaagtttttcaaataaaagttttaagttgacatgatttttatttaatttatatatataattttgatttaattgatgttgtctacaagtttatttattattgggcaaaattaggagcaacagatgttaatgaggatgataaagatgagatctaaattatacatgttctctctccatgttcatcacatttcctattctctctctctccatatcatctttttttttcttcataagtttctctgtttttttttttcaaaatccacacagtcattctttttaatttttaattttatctccatgttcttattttatttcttgttcagtttttattcttcatcttcttttcattttttttttaaattttttaaattttcagtcacattttttggaaagataagagtatttttttaatttattttttcaaaaccgggcttgcaaatatagcttttattgcatcaagtgttgagattgtgcaaaagattgttaatttttcttttattttttttattcttttatttttttgatttattttagtgttgttttacagttgtttttttataatttattttttttaacgtcttttactgttcttgctccatcttgctagaattaataattattttctggttgttctcgtagtgttgtagtagttctatccgtgggtgtggaagatagagcctatacaatatatttcttattccttctctatgtctattttgtggttttttttattctggttctcctaaaaatatatttgatgacctcactagaattttttttttgaggtgtgtggttcttttatgtttttctaagtggttatgtctgcttattgttttacttttgtttttg

SEQ ID NO: 66320 - DNA, 657 bp, Cannabis sativa
gaaataactttattaacaacaaaaagccaaacaaagcatcatcgtgaatgactatgtcctcctaattgatgcaatcttcagccacgtgcgacattccccttgtccttgcctagggtatgataactcataatcccaccaaaaaataacttaccatcgagtacgatgtagttgaggtcatcccacctggaatatacaagttagcacgttatggtgccaacgcaaagttagtactagagcctttccattcaaacgaagagcacctacaaaagtacgaccaatataagttgcttttcagtaatgacttaggctggttggtgtacccgcaaagtgtattcccatagctggtcgtcatgcctaccaacaaattttgataatgtaaaagcatgaattgcccacttttgatgtaaaaaggcatgtttgcccattttattgatcaaggaaaaattgcaacttatttttcatacaacaacgcagcttgtatgattgttattgaatcaaattgcaagccttactaaggtcaagagtgtatgaaattatagtggcaaacccatgacaataacagttcccatgtgaaagccctagttacttaacaagtgatcaagaggtgaacttgtttagtcacttgagggaaagcacgctcatacatggactagtaag

SEQ ID NO: 66321 - DNA, 1024 bp, Cannabis sativa
atttatataattcttttacccttaagtatcaacttaacaagattttactttgacatatgcctattacttcctataaagtgtctttacatattttgataagtgtcctttattttatcataggtgtctatattttatatttctcttattcataatgtgtaattttcttaactaggatatttaagtcattagtcttgtatatgttctctatcttgaatgtaagtgattcattttgggtataccttccatcttggatgtaagtcatcatttttgtttatgtttatgtcatcctgtctgaggtatgtcatcctatataaagtatgtcatcttgactgaccgactgaaatatgagtgtcaccccaaccgattgactgagatatgagtcatttgactgattgactgaccaagatacgagtcatctgatcgactgactgagatatgagttatctgactgactgaccgagatacgagtcatccgatcaactgaccgagatacgagtcatccgatcgtccaaccgagatacgagtcatcccgaccgatcgagatgcgagtcaccccaactgattgatcgagatacgagtcatccgactaactgactgagatatgagagtcaccccgacataccaaccgagatacaagtcgtctgaccgaccgaccgactgagatacgactagtcctgaccgacattgagatacgagtcaccctaatcgaccgattgagatacgagtcatctgatcgtccgactgagatatgagagtcaccctgacctactaaccaagatacaagtcatccgactaatcgaccaagatacgagtcatcccgactaaccaattgagatacaagtcaccctgaccgaccgactgacaaagatgcaagtcattcaaccgaccgaccaagatacgagtcatcccaactgacctattgagataggagtcaccgtgactgaccgatcgagatacgagttgtaataccctagaattaagaaatagattagcaaaatcctaattagataattatgaataattg

SEQ ID NO: 66322 - DNA, 981 bp, Cannabis sativa
agagaatcaccaaaaataaaattagcaggaaaattttttcccaagcagattccaaaaaatgctaaacttatatatgtgtggagtgtcaaggttacaaagtttacttttattgagtaaatatccattaagacaatcaagattcaaaaaatagaccttagaattttgtattaattttaaagctgtatagactttggaggtttttaatgaccaaacatactacaaaatagagtacaattattttttttagttatttattattattatttgaaagtaaagaaagtacaacttaagaaaacacaagaaaaacgagaaaataagaatatgaaactttttgcttatgaaaacccttcaaaaactttcaccaacttaaagccaaataaagtaaaagaacatgcacatttgttggagcttgaagccaaaaacatatgccatttttataaacaagtgcttttgttaatacttaaatggtaacattaattcttctgccaaaatgaaacaaagaaatattaattgctcctgcaaattttaggccaacctcttggaataatttcaatgtatcagaaaactaattataaaagaggggaaaaaaaattagtcaagatatgagaacttttatgtattgttttctactttttatgaaattatccaagaatttttgctgaaagctattaaaaatcaacttagttgaaaattgaatggaccatcaaaggaagtaacctcttagtcactcctttccataataggtcggctatacatatgggtataaatctatatctataataataatatttatatatgggtataaatctatatctatatcgacctacaccttagattttggtttatcattttgtcatattgtgtgaaacttgaatatacgacaaaaaaaattagtaacaacgatcattgaaaatagcttttttattcttttctttaaaattaagaaattgattagtgcgtgcagttttaataattttttaa

SEQ ID NO: 66323 - DNA, 576 bp, Cannabis sativa
agtttaaacatttgaggttatggatgcaaatccataatcaaccacataaatatttttcaacagctaatggtaatttcttgggtaatctcgctagaaaggttgtgagagtggatttagaagatgatatacttttctcatggtgtaagtttatgaaagtgcaagttgatattgattttgcaaaaccactgacatctggatgctatttcgacttagcaaacggtgagaaacgatggatacagttcaagttcgaacgaataggaattttctgttataaatgtggtgtgcttggtcacttatgatgggaatgcaatttatcttcaccaatgatgattgcgaatcgtgagggcaaccctttccccatgtttgtcccgtggctctccactgcttcaatgtatttggatgtattctcaggtccagtttctagttttgctcgtggagcattggcctcggcttcggggaagtactttcgtgatgtgactctgttgaaggcagtcgacggggttgctggtgttggtctgaaggtcaatgctcgtagatcaaggagaacaacgatgatggtgacctctcttagtcacg

SEQ ID NO: 66324 - DNA, 1467 bp, Cannabis sativa
gtaatattaatattaatttttggttatcaacttgttttatttagtgatattttttttaactgagtaaaatatctaatctggaaatttattatttggattgttttatttaatgattcattatattattattattattattattattatataatgaaagtgatgatagtaaagtaattaatgaggaaagtaataataaatgaggaacataaatggtactaactcaacagtttgtttgaaaagattaataaatgaggtggaaaaaatagaaataggtggcaattattgattggagggatagggttggcatagagaaatttgggacaaggagatttttttccatatattaagtactagttatatagaaaagaaagccttcattaatattaagataattatgagacggtgaaaccaaacaagtacttagaaacaaataaaacaatacatacacacaaacacaagaaatgccctaagggaataatgatgtcaaactagacaaaaccagcaacaacaaatgtcccaagggcagttctgattattgcttaattaactaaccacacacaccaccagtacacctacgtacccacatgcagagcatgcatagaacaatataagaaacgtacgtacaagactactaatgtagtagtagtcttgtgaaacatatatagtttcttactattattttgacagtaataataagagtccgtaggtaggtaggtagtttactcataattaagttgaagtttgtgatgatgatgatgaggcgttttgttgaacatctaaggccaatccagggttataacatactccgtcctggtcctttgagcaacgcatggggtagcagcagggaaatggataaaacaaagcgcaatgctcaccttcttgtacacactgtggaacaggggtacaatgtcgattctcaccccatccccactcaccttcacaatacagtcctccacagcaaatcttttcttctgcccagtgacaatattcaccgggtaccctacaccgctggttaccaggtaccaaattcagatgaatatctggttgtaatcgaccaaagcaccccacaaccatcacacccactaccaacgccattaccataaacttcttcatcattcttactctctctctctctctatatacttcggtaaataattaaactcttttatttcttttcttcgtttatattcgtttgatataatggccactactgtatttataggagaaaccaacacttgctttgatagtttgatatttcatgcagaaacacgtttgtgtgtgtacatattaatgtgtggtgcagaaggccctaacgtagcaaatatatgcttttaaaagtagagtagtatcaccgtgattctaggggggattgcaagattccacgtctagttgcttcaaataaagtgtacttacatttaacacacacaaaaaaaaaaatagataaaatactaatttaacacaatattt

SEQ ID NO: 66325 - DNA, 929 bp, Cannabis sativa
tattatgtaaaatgttctatatattaacaattctagccaactttttagtttatttatatatcatgtcttatactcattaaaaaagacaatgtcataatgacgataaagtatacatataaatatatataatatgaccatttaattaattatttaatgtttttaaaatagaagtttctactctttttacgatggcttgatcacaacttttaatatagtgatacatcatgaataagataaaaatcaaatcatgttagcaattaattactaatgctcaaatatataatttttttggtgaattgaccacttacaattgtcttttgattttttcttcgacacttttttttttggctcttttagttttacaacaattaattgaactcgatcgagtcaaagtgaaaaaaatgctagtagaatttaattgcaattatctcataaaatagaaatgtacatttttcgatattaattactatttaattttattacaagaagaactttctattcaagaatatgagattatcccatactataaatgtagagaaaggatgtaattttgcttttaataagactagccttgaattgatttagataatgcacaataattaattaatgcatgtatagtattattaatttatgtaatttaagtgatttttaaataataatttattataatataaaccatgcacttttataaacacgtggtcaaaataaaaaaaaaaaatacttacttcaatccaaatggattctttttcaaattaacaaggtctagttttataatagatggatgtaaattaaaaatacatgcaagtagtgaaatttcatgaaataatataattaccaaaaaaaattaataaaaaaaaagttataaataattaagagaagacatttgtggcattcccaaagcaagcacacaaaatattctgattcttata

SEQ ID NO: 66326 - DNA, 1212 bp, Cannabis sativa
catttcatcagcattgataggcagtacaaatatattaacaatgataggttgagaattagagttgtatgcaaaggagaaggttgtaaatggttaatgtatgctcagaggataacagatgattgcactacaatgcgaatcaacaaatttaaggaagaacacatctgtggaattttatgggagaacaggttggtagatgctgattggattgtaaaagagttcgtagagaagttcagagcaaatccagccatatcatttagtgatttcaagaaagtaaatcctgagggtaagtactctaaactctcctcatggactctttatcgagctaagaacaaagctatggccaagatacatggaaccgttaaagatcaatatgctattctgcatgattattgtgcacagttagtaaaacttaatcctggtagcacaactttcatcagaacaagtttagtgaatgatataaggtttttcaaaagggtttacatatgccttgtagcatgtaaatctcgtttcaagttctgcaggcccatcattgggttagatgggtgctttttgaaaggatattgcaggagtatgttgcttgtagccattggtattgatggaaacaacaacatgtttcctcctgcatatgttgtagttgaaaaggaaaactgttatactcgaaattcggctgccatctcagtggaggacacgtgtcaagataaggggaatatggatcgatgcaatcgctttgtatggaataactcattaattacgtgagtatcacagtatatttgtaacttgcagactgtaaggtcttaggtgaggaatcaatatacaaactggtgcttagtatattagtgagaaaccatatgttgctgaatgtgaatagcgaggcatcaaggacagtacacgtagcaagacgaaagcgacatatatcaattgcgaaagcccttaatgtacaaactaagtgttacagtcagatcgactcgagaccaagtaagcgaggtgaccgtctcgctatggtaagacttcttataacttcatcccgttagcatcaacgacgcttacaacagtggcaagttagaagctaacattcaaatgagcttcgaagaactctttgtatataagaaccgcgagcgacacaagacatgcatcgtcgacctcgaaagaaaaaatggccccagctcgctattgagatcactggaaccaagcttctgtcgagacaactccaga

SEQ ID NO: 66327 - DNA, 736 bp, Cannabis sativa
gacattattataaatatatatatactgatgcataaacgcgtttgtttttggcaggaggagttacttcaatggaaccttttctggagagatttttcccatctgtgtacagaaaaatgaacgatgaaacggttcatcaaaacgagtactgcaaattcgatagcgagttactgacattgttcacttcttccctatacctagcagcattggcagcctcattcgttgcttcagttataaccaggtcttttggtagaaaagtctccatgcttattggaggagtagtcttctttataggctctatattaaatggtgctgctgcaaacattgaaatgctcattattggtcgcctattgctcggtataggtgtcggttttgccaatcaggtacacatacaaccatcaataccatttataacatcatcacataggatagaatctcgtacttcttcccatacaattcacctatcctaaatattttaatttgaaatataacacatgatattagcagcaagtaaaagttgggcaaaacaaatacatgaaatgtgtttctgagttatataattgtattaatgtgatgatcataacatgaataattgtatatgtatacagtcagtcccactctatctatcagaaatggcaccggcaaagatgagaggagctctcaacataggattccaaatggccataaccattggtatcttagtagccaactttgtcaactatggcactgctcaaattaa

SEQ ID NO: 66328 - DNA, 3065 bp, Cannabis sativa
ccacgtagtcattcattgggggtccgattgtgacaatacctccttctctcgcatctccactgctgttttatttttacttcatactgagtattctccattttgattgtaatgccatataatcttatcctccaaatcccaatcaccacttggaatgctagatatcaattgcacatcctcctggttaaaattaacatgaataaaattcatatcccaagtacaatcagcaagtttcaggtcaacaacatataattgatcaggcagtactgatttatcatatactttgaaagtgattggtctcggaagccaggggtcttccagtacacgcactttgttactatcaccaattcgccatcgataaccccataaattatcttcttaccccaaactaaattgcacaacaaaaatgaagcatgattcccacatttggcaactagtacacatctttgtatggtaaatagcaaggcttcaacaccctactgcataaggacgatggtgttcgaatgattcgccaaattttcttagctaagagtgcttggttgaacaaactcaaatcaagaaaactcatgccccttttttattaggtttgcttaattgtgtccattgatacacctatttgaaggagatgtattatagaatttgtaacgccttaagaatttggtacgctacgacaactggtaatatatcctaatcttgctaaactgggattattagaaaataagagcggaaaattttaaactttgattacaattaaataaaaatataacttgtaataatttaaactttataatcaatacaaatagacaacatatttcgggatcccataaaacttttcgcaaaatattacaagtcattttacatgctgacctaaggacaaaatccgagaatacaatatatatctactggtagatccaacctgcttggtctagtatggcccgaatatgtacaatccatcgctaagctcctgcactcatggctgattactaacagatttaccctttcatgtacagtaaagcacccgtgagccaagccgagcaagatagtataaataccaataaatacattaatatataaatcacataatttttaataacattgtactaattttctatttgatatagacatgcgtgttacgctcatacgcctattgatgtctatgtggcataaattcacgtgttacgcttacacgtctatttacaataaggccttagaacgatttacttcggttttaatttccgagtctaaccaaattataccttgaacgcataattctttacttcaacatataaagcaggcatagtattcagaattattcaattactagggtaataaccctagaccatataaccgctcactttagggtaataacccctaattctcatttaatcacaattataatattaaacatgagcaccaccgcgcttaactctatctgctaactacagtcttgttagatgtcctaagtacgtggagattccaaatccccgggtgctcctgaacaagtgctggtaatcttagttacaattcttgggattcacaaatagggttaatccctaaatccactttcacataatcatataattggcattcaaacacaaataaacatataaagctcgaaacgagctttctaacgataatcagaacaccccaaacaaagtttggatttaaaagttatggacaatataagttcaacatgcaatctgcccaaataaacccaagcgggccgcagcactccccaggaatgccgtggcgcttggattgaaaaacctagactttcaacatagcgggtcgtggcgctcatagagcatgccgcgcgcctaggctccaaacccaaaaaataccattttcaacaactcgaaataacaccaaatctcacaacagaaccctaacaaacatgcatataacctaagttcatcatacacaaattatagccattaataacagtgaatttaacacataatttcaagatttaaacaacatcaaaacatacaattttaccaaactttccaacaatcaactcaaccaacaagttgatctcaacaaccaaagcatcaaattctcaaatcatgctctaacaatttatgcaccaacctacaggttcaaaacataaataacaaagattaaaaaaatctcaattccaaccttaataaatctcactaaaaagcctagatgcaaaacacaaacacccataagctcaaaccaccaagaaattaactatttctacatcaattccttccaacatgaaaccaacaacaagctatcaacaccaaaaataactaaaaatcaacatgttattcagcaacaaatttagaattaaaaaaatggagaaactacctcaagctctccaacgcaactagcatcaacaacaccaaaatccaagcttaaaccaccaaaatccaacttgaagaagatcaagaaagtgagaaatggagagtgatagagagaggtttggttatgggctagaaaattcaggaattgtgtttttcattttacatatattcaattttgttaataatagtaactatggtcaaatgaccaaaatgcccctagggctaataaatcacgtaagcatacaattaggaaaaagttgtcatttcatcacacacacataacttaaataaatttcaaatttctcaattattcatataataacaaaataaaatctcaaaaatgtatttcgggccccgaactcatttcagcccaaaatacccggttgtgactataccaggccaacttgtcagaaaatacctgcagaaagatagaacaaatatactatataataatatagtccataagcacgatataacattcaaattacgattttacccttcttgggtcaaaattacaaaaaggcccctggctcaccaacagattcttaacatgtcatttatcagtataattcatatatactaaattatataataatataattctacattaatacaaatttaactagttagggtttgctaatccgattccgtaatcttaaggtattagagaatttttctaatttatatgtgtagtatgtagtattaaaccgttaggaaaaatatgttgggttttatgcc

SEQ ID NO: 66329 - DNA, 578 bp, Cannabis sativa
  modified_base (46)..(48): a, c, t, g, unknown or other
aacagagtttacttgcatttagagaaatgttatgttctttccagannnttggttaaagtaaagctcagattattaatttaagaataaattcaagataagaatagacaaaaataataaacgaacatcagatatttttacatagttttgtagttaaaatctatatactctacgagttcatattatttctgagttttgggtgtgtttacaatttggcaaagaatctgtaaattagaattgcctctctatttcccctctgagtgaacccctatgtataagaataggatggtggttactcaatcttattttagtgaaaagttataattgatgagtggttactgcccacgtttcacgtataactgaatatttggatatgtataaataactactttatatttaaaatacaaaaaagtggtctctgaagtggtatttgacttggtcagatcatgttatttgagagcaggtgcactactgctatgtaatacgaggcgatacattgctgcttgtgtattacgaggtggttcatcattatttagagcattacgaggtgattcatcactgctgtgtattacgaggtgatt

SEQ ID NO: 66330 - DNA, 1063 bp, Cannabis sativa
  modified_base (655)..(658): a, c, t, g, unknown or other
agcaatagaactcaacaatccacacaaattcccaattcaccattagagagctaggtttgagttcttaaactctaactttgctcaaacctccattcaacctatagtttcgattgaaataagcttaaacaacctcaaaccatttccagaataccaaattaaaccattttaaatcatacagcaacctagaacctaaattcacatgtaaaacctaacctaaacttaagaaaattaagaaggaagaattaccttgagtcaaagctcccaagaatcactaaaatcccttgtttaaaactcaaaatcccaactcccagctactgcccaagagaatcaaaagagaaagagagagagagaaaagaagatatgaaccttttctcttggttttcttctaacttaagaaatgtcaaattttcttttttcttttttttttccaaattaataacttaagctcagccttaaaataaccccaaataagacaaaataagtctttaccaaaagacctccttgcccttcaaggtaattagataagtataaactcccaagggttaattggtcaaataacaaaccccgaaaattctaacgcctctaacatctaactataacaccccgctaatattctagacatacaaaatttgactctctaaaggcccaacgtcgnnnnccacagcttccgaacacaacacagaaattaagtaatttacataaaatagcataataacatatatgatattaaatatatttcccaaaatatatatttcataaattttaatttaatctctttcataaaccctaattatttaataatccaaagtattaatcatatgcggtctttacaattattcccccgttaaaaggatttcgtccctgaaatctacctgaacaactctggatgctgagccctcatatcagactccagttcccaagtggcttcttccactttactattcctccagagtactttaaccaattctttggttttggttcgaaggaccttttccttcctatctaaaatttgcactggttgttcatcatatgataggtcaggttgcaattccaatgcttcata

SEQ ID NO: 66331 - DNA, 949 bp, Cannabis sativa
aatgttgaactctcttcgggttctaaatcttccaaatgggcactaaattagtagcattcacccccttgtgcatcgttccagaggtgaagaaatccaagaacgcatcaaaaaaatcttcacccactgaataccaataatgcttaaagaaaatgactgacataccatccagaccaagggccttatggttgcccatagtgaacaaaatttttcgaatttcatcaagatcatgaacccatatcagatcctccctctccacagaggagagcttatcagtaataatatttgcacaattaagatcttgatctgagccaggtgctgagaagatttcactaagaaaactagtgaactcttttccaatggcacttcgctctgagagccagatgttattcatgtccaagatgctataggtaacattacgcctccctcttatagtcgcagacaataagaaaaacttggagcatttatccccttctttcaaccaagagacacgtgtcctttgtttccaataaagtttcttcctttcaagcgacttattcagggggcgcctgacctcaagctctgccttccaatcttaagatccaatgggcaatgtttaaagatgatcaagtttgcatcaatgggcaatgtttaaagatgatcaagtttgcattctaactcttttatagtagcgtcaattttcccaaactggcatttgtgccaatttagcaaggcaacttgagttgctctaatctttttgaacaccctggccggggcctaatgatgtgcgatagaattccaagcttgggaaacaaccaactttcttctctcatctcgggtccaaccttcttcaaatttaaagtttcttttaaacttctcgtcatcccctccaaaggaaaggcacaaaggcctatgatctgaattacaagtttgggatgagcgcaatataaattttgggaacaaattaattcaa

SEQ ID NO: 66332 - DNA, 1143 bp, Cannabis sativa
aaattattaaaaattatgaaactttttaaattgattaattaaaatcttattcattttttttttcatatttttagtaatcaaaatttaattttccaatataaagactattatgataaattagttaaattcatatttctaattatttctagttaaaatatcttctttaagatttgatattttaagtagaaatattagagtgtttatgtttcggtgcaaattcgatattttaagaagaaatattagagtctttatgtttctacttaaaatatcttctttaaaatttgatattttaagtagaatttgtaactcatatttaaattattaattttaaaaagcttatgctcacttagtttaaatttttaatttctaaccaattttttaaaaattatgaaactttttgaattgattaattaacatattattcattttttttttcatatttttagtaattataatttaatttttcaatataaagactattatgataatatttctaattatttctacttaaaatatcttctaaaattgttccaatttatgaaactttttaagttaattaattaccatatcatgcatttttttttatgtttttttgtagctataaattaatttttaaattgattaattatgatatgatacatttttcatattttgagtaatttggacagcacaacaactataattggagattgctaaaaattataaatgcaaaaaaaaaaacaatcataacaatctacaagaataacaataaaaccaaaataagatttcacaatatatataatttccacccatccgaccgcagtacatgtatttacggaacctacttcactacggatgaatatttaagatattcaaactcatttaacatgcatatttataccattcaccatatctatattaataattaaaaaataaccaacactaaccttaaaacgcaagttccttccaaagataaacaacacaaaaaaagagaaataagcttctacaaagaaaatcaactcattaatatgtctacaatatttctttgatacattaatgaacacaagaaatatgaacacaataataaaaaccaccactcaaaaaccaaaccactaaatgctaatatatatataggcagccgattttgtgcccatatatgcaaaa

SEQ ID NO: 66333 - DNA, 618 bp, Cannabis sativa
tccgatctaaattagttttatataaataaagactttaacactaatctaaatttgaatttatatatatatatatatttatatacatattaagtatatagataattattaattgtattttatattcattagttaatatatattcttttaatgaattagttaatatatgcttaagaaaataaattaatacatacagtttggaagtaaaatttgaaactaaaaatttttgtgaaaactttacacttaattaaaagtataaattatttaaatataataaaaaataagaaaaataaataaatagaataataatttgtagaaattttcaataattttttgataataattaagtctttttggttttttttattaaattattatttaaacttgataaaaaattaaaaaaaatgagagaattaaggagagaaaagatagtgatgtttggagttattttagagtgacatgtcaccgtttcatatctctcctttatatatatagattttttattaaattattatttaaacttaaaaaaaatgagagaattaaggagagaaatgatattgctatttggagtgattttagaatgacatctcatcgttttatatctctcatttatatatatat

SEQ ID NO: 66334 - DNA, 624 bp, Cannabis sativa
tccatacttacgaccctacaatgcgcacaagttgacattcagatctgaaaaatgcatcttccttgggtattctcttcatcacaaaggatatctttgtgaaaacaaggatggacgggtctatgttacaagaaatgttgaatttcatgaagatgattttcctggctccctcatgtccagcaactcccaggtatcatctatccctaccctttctattcctactgctacatttactacaccagtattacctactaatactacacctccttttactgaggtacaacctgtccaagatcctacagcagttggtacacctactactgatatacctgccatttcagcaaccatttccacaccagcagctactgatggttcccatatgcctactgcagccttctctcaaccacatcctggccataataccactacaaatctccccatcccaacatctaatccctcaattcagccttcccacaacactcattcaatgcaaacccgatccaaatccggcatacacaaacctaaagcctacactgctacttcctaccccttacccgagtctctcttaccaaaagaacccacttccctcaaacaggcactagtagatcccaagtggtatgcatccat

SEQ ID NO: 66335 - DNA, 2151 bp, Cannabis sativa
  modified_base (559)..(568): a, c, t, g, unknown or other
tcaagagaagaacgtctccaactctgatcccgcgatctcttacgaaggagtcccattcgggtcctgcaatgtggacaatgccgttgcctaagaacacaggcctaacccttcgggtgttgttgtctccaaactctttgtcgttgatgtaaagattactactttggaacattggaagtgcttcaatggtggttgatagtggatttgggattaccaacttggtgatgtctttgacaagagttccaaacagtgaattttcttgatccatttttcaaattgagatgaaaacaggaaaaacagagagagggagagaagagagtggtgtttaattttaatgtatggtatggtatatatataaatagtagttggttagtgtttgatattaacagattttggcgccaaaatctggttatgatgttattaccgaaccgaactcatactacaaaagtgttgtgttagttatttatacaagagtgtatatttatggaaaattctacaatgcactcccttaaaatggatatattgatgcacccctatctgttttagcatccgaaataatttnnnnnnnnnnttttttctcatggtcatatacgttatagttatttaagaaatcctgcaaaatttaaaaaaattcgaaaaagtttaacacgcgaaaaattacgttcaaacaatgtgttgtacgcgtgactattttattttacacgcgtgtaaattagactgtttgaccattattttctatactataaattattccgaatttctcaaaattttgtaggatatcttaaatagatataacgtacataaatatgaaaaaaaattagactaaaaaattcttctagatgtcgaaacaagttaatggtgcatcaatacaccccttttaaggggtgcattgtagaatcaccctatatttatttaactatataattagttgaattaattaatatggttaggctccagtattcttgaaattgagaaagaaaaagagggagaaaaatgaaagtggtgcttaatatatcttaatattttaaaaaaatattttttattccgaactttgatattttataaaatatactcgtaaattttataggtcgttaaaaattttctctaactattgagattgttagatttaagaatttttgtctagtttcattcaattttgctaacacggtaattgtccatatactaaatcgggtccctcgaattttgatatttataaaatcatgtccttgaattttattgtgtctcttaaattttcatccacgacatactttctttagtaaaattagataaaagtccttaaatctaataatcttaatagttcgaaaagaatttttaatgacttgaaaagttcaagagacatgatttgatacatgttaaaatttagagagtaaaaatataaattatcctattaaaaattgtgtatggggtgatatttttattaacaagtatacccttattaagaaactattattttttttgttttttttttcaagtttttatgctttattgtagttgtcaatagagttatttgaaattatgaatcttattataattagttgtgcatttctgtctcatcatgaattggaatttgcttcctttacatcattctattgtttatttttaatacatatcgtaggaaggtacaatttttggacttgagtttggatgagctctgcacaagtgataggataaagagtcttcttcgaaacataacaaatctccaattacagtatcttgtaaattcattcaatagctatatcaaaacttattacaaaagagtatttatattgttgcaaaactgaagaaaataaaaagaattacatcctaacaaatttttaatgactcaacaacttgtttctcaacgtctctcgagcatcacgaaatcctccaaccactttgatttggctcgagccctcttcttgtgagttgggatttcctattcaacttcaaccttgttcttttccattttatcttcgttaatctcaactggagtcaatgtttcctcatcaccattttagactgagttgtttagccactctcttaccttttggcccacttttacagggtccaaaggtattgggctttgctaacaataggcctaacctgcttcggtctaggaccgtgcatagcaatgtgtgttggaaattattttac

SEQ ID NO: 66336 - DNA, 4115 bp, Cannabis sativa
  modified_base (154)..(169): a, c, t, g, unknown or other
  modified_base (4085)..(4085): a, c, t, g, unknown or other
cgatctcacttacctgagtattacttgttaaaacgatacgtatacttgcgtgttggatttattataacaaagcccttattaaacccactccaaccctagataatatcactacaataaaaaaattattagagttcactacaagaaatgtcacttnnnnnnnnnnnnnnnnctactgcgctggtaaaagtaattttaccagcacatttcgcaaactgtgcgggcaaaaaggtcaaagttttaccagcgcacatttacagtggctaaaatctaactttcaccagcgcatttatgcgctaggaaaagtcatttttgccagcgcttttcattttgtgctggcaaaagttctaataccaacgttgatttgccaaccccttttgccaacacatcagaagtaaattccattttaccagcgcaataccaaacttttgctagcacaaaaatgtgttggaaaaaatgacatttcttgtagtggtttgaattatgtagaagcaccattagaggaatacataaaagatattgaacctgtaattgaagatcaagacccctttgaagtggttttaactgaaaatttgggtacatttgatgcttgctcgacaagtgatgattttgatttggtgactgaagcaacacccattctcagtgaagaagttattgaacaccaatttcagttaatgttgtggatatatagtcatgagcaaagcgggaaagatgtgtcattggagggtgaatcacttatagcatgttgatttgagttcgtcaacgctatcatattatgaaatgtcaatggatccttattttcattaatgccacctggaccatattacatcctctacaagctaccaacagtttgtctccaagctcatcatttaaagtcttgtgttgttggtgctgcttttggatcaaattcatatcatgccaagcttgaggacatttacaataaaaaatttcaagttgtcttgcattacgtttattatgggcgtcaaccgcttgttgatgtggcatagtttttaggtaattgaatttctcttctctagcctttggtgtcacattaggaacaatgcgacaatcaagtttgggggtgaacttattttttttttagtttttgtcttaattgtgtgtctttttaagtttattttagtgtcatggtaagccttagtgattgaagaaatacaattcgataatacttaattgattaaacttgttaatactgtgtacttgatttgattatttttgtgcttaacattggtgcttgttagaaagttgaatatgaccatggtaaatgtaaataattggactttgttatatatgattgactagggttagaggattgataagtcgaattggatagaactttcattaattacctttgacgcaaaattcttggtgatcgaattggatagaactttcattaattacctttgacgcaaaattcttggtgatgtgtgctttgaaaaataatttaagtaactcttttggaatgtttgtgtatttcaagccaaccttgtagtcttaattctagtttaccctttttgagaattgacttgttattttttgttttacacatactttgagctaagaaaataaattcggttatcatctatctttgtctgtaactgtaccattagtggatctaaattttgggggattttaatggtggaaagtttatgttatgttttgtaaaaaataaagatattattgagagaatttgaaaataaaagttatttgcaataactcggaaaaaaaataagagaaaaataaaatttttgcaaatacattgtcataaaaatataactaaaaaaaaagagttgttgcaaggttatcaaagagaaggttcttttatgtacttaattagaagaaaaaaagaaggaatatcaggatgtatgtgtgaaaattgtagggtgatttgattggagaaacttataatatatgtgagcctgaatgacgtttttcatctactttgacctaaatctaattattaaaacctgttttatttagtctttttgatgtcaaagtatatgttgttgatataagtatagaaggctgaatgatggaagctttattgataattggtttgtggattcattggattgagttgagtatatatatagtaatttctaattgttacttccaaattgagtgcaagagttggtatatggagtaatcggattgaaaagatgatttacaatagttaaactttgtgagtgatagcagtgtggtgtgaatataagttaacgcttaatttgtttgtctgtgttcatttgcttttagtttagtgtcaatctttactcgagggcgagtaaatgttaagtttggagaagtttgataggctaatttaggtacattttataaagtattttggaggtatgtttcagttgattatatttattttgtgaaaaattatgcttgttttctacttattttaaattgaaatggtaaaattcataatatgaatcgaaaatgagatgcagcatgttaaatgagatgaatttatcatggaatttgaagttctaaaatataatgagtgaaaaaatctatgtttcggatgcttaacacgctctgtttgtcatcaaaaattaattatgaagcttcaagctaattctttactatgatacattgattttcaggacaaatgttatgaataaaaattctagatctctcttttagctttctaaaacatctttaatcgtctaatttggagaaatatatcaaacgaattatggccaaaatgttattggtcgttgcactagaagcttcctgcccaaaaaaccaagttcttgggtcgtgggactaaaagggccatttaatgttgcagcatgcctattttagaggccgagtaggatatatttaaaccctaatttacaaggagaaagggggcttttcgatgggaacttttacgatgacaaaaatagatagaggaagcgaccttggagaatacaactattgatcttcaaagagttttttcttctatctttaatttcatgtttctaattagtctttatcaactcacaattacaatgagtagttaaacttttaattagggttgttaatggatattaattgaaacttttgtattgttttagtataatttcttccccaattttttatgtgcatctatttcattcatatttaatgcttttaattgcctgatcaccaattaattgttgatgattttaatgcacaattggagaagtgagtattgattatgctatagtaaaatagacgcagatttttggacgaacgtacctatatggtctgtgtagcatttcacatttttatgcttaatgtcttctatatgtttaaatttatcatgaaaatataaaaagtttacatatatataggttgatatttatatgtcctaacccgaatataagtttctttagtaaatctgctatcacatgaaaattagaatttaaaattaaattatattaaacaatagaaagtagatttaattgaagttaatcaccctaagctttgatcattgttattctctttttaattatttttttttctgtagaatttaaacctttttcgttattattattgtcaccaaatagaatttaggaatttaattgtttggcaattaactgcagtctttgtgggaatgatacttatcattatattgtttgatttgactacgtatacttgcgtattccacaacaatatattaatcttcaatttttttttaattaatatctgaaacgatccgagaaataaaaagtattggggtatgttagggcagggcggggcggcgactcaaataaaacttgattgtcacgcgttggtgctgcccgtcagcaaggccgacccaaatattttgggggccttctacaaaagattaaaattgggccttttataaaaaaaaatgatgtacattaagatcacaattttaaaactagttttttgtttcttttctttttttttttaaagatatgtttctaagcttttaattataaatttttttatgtataataataataaaaaatactttccctttcaaataaaaaaaaaatgggccttataaaagggttaatttcaccaatgcacaaaaacaataaaaaaataacaaaaatacggtttcacggaantttaaacatttttatgatttttttgatttt

SEQ ID NO: 66337 - DNA, 1099 bp, Cannabis sativa
aagtaaaatagcaaaataaaacacaaaaaattaagtgaaaggggtgcataacatgaatttagtatacaaaacaatatttttttgaaaaattggttggcgaaaccgccgttggcggttgggattgcgtagaacgcaaaaaaatacccaagttcaaaaaaaaaaaaatcgcctcaaacggacaaccgaatcaaaaatgattaatgttcaaagttttaaaaaatttcatgcaaagtttagccatttccttaaaaaaaatacaataacaaaaatgatactagtaaaaaaaattataaaaatgacactaatatactacaaaaatacaaacacataatataaaatataaaatattaataaaaaaatatctaatatacaaacacttagagtaatgtagatgtgtatttattcaacttttcaatttaatttttatttatggttattatatataatttatacttagtttaattatattaataataaaataatatacatatataaattatgcgaaaatacaaaattgtaaaactgaaaaaagtcataagaagaccctatggcgtcggttaattcataataactgactctatatgtgtcatatggcgtcggttatatgaaacaacagatgccattgtttcataataaccgacgccataggggtcctataacgtcggtttttttacccttacagcgtcaccggaacagcgtaggtagtgaatttcaccaaaaccgacgctcaaagcccttaaaaactgtctctaaaacccaattttatagtagtgttctaaaagttgagagaacaatgaagaaaaaactctattaaattaaaattaatctcaccagctaatcactgaataatgatatattttttaaactaagtaaccactgaaaagttattaaaatacaaagtatataaataaaaaagtactttttcattttttgataagtaataatcttcattgcagagttcaaaaacagtacaaccagcaaaacaatcttaaccaagaccaacccaagcattatatataggtgattattcaatagttacattcaaaatgtaacttgttggaatttattttaccaggatcttagatctacttacaagtat

SEQ ID NO: 66338 - DNA, 1820 bp, Cannabis sativa
aagtagcagcccaatatttaaagctcatattgatatatatatatatatattttatgttataaggctggcccgggttgggtttattgggttgtaatttgcccaggccgttttcgacccataactcatgggttgtaattttttcaaaccaaataaacttcggcccataattatatgggctgatcggcccattttcggtttgggttggccgggttagtcggcccagcgggttaaatgctcagtcctacatggaatacatatctagaatcatgagagttgtgagtactcggccaggatttaagcatcatgataggtgtactccattaaagcttaatcatttgtgctttgctgatgacttattacttttttgccatggtgattatgtctccatactcttaatgctacaaaggttaaatattttctcctccgcgtctggtttagttccaaatgaagagaaaacaacagtgttctgtagtggaatgaaagatgatgaagtaaagagagtactagaagtatcagggtacataagggccagtcttccttttagataccttggtattccaatttgttccaagaaaatctcttcagccgactataaaggtatccttgagaagatggtggcgcgtattaaagtatggagctcgaggaacttgtcctatatgggaagaataacactcatcaactcagtgttaaagtctattcactcatattgggctcaaatcaaaatcttgcccaagaaactgctgagggatgtggagagcatttgtagaccatttctttggaaaggcatgacaatcaattcagggcgtggattagcagcatggcagcaggtgtgttcaccaaagaaagcagggggctaggcttttgaaatatacatgaatggaatactggagcaatggggaaatatgtttgggcaattgtcaccaaaaaagacaatttatttgtcaaatggatcaatgaagtatacttgatggggaagaagtggtgcgagtaccagccaccaactaattgcagctcatactggaagaggatagtagcagtaaagaacaccctcacaactaagattgatcaacaagcttttgcgacattgaggtatgacatcaaaactagtattgatttattgtttaccaaaccagtggatgtgaactggagtaaaatagttgaataggcaaactataccaaaacacagggtgattatatggctgatattgttgccaaagctcagaacaaaaaagcaaatacaaaagtttaatccattggtggataagacttgtttattatgtagcaatggctctgaaacattggaacatctcttctttaattgtcattacagcaatatgtgtgtacaaggcattaaagaatggctgtaatggaaaacaaaggcaagtagcccactgcaactagctaaatggactgataaagcgaagctatctgcaactcggaagagcatacttcatgctgcacttgctgtcacggcttaccacattcggagggtccgaaatgatgctctttggaatcaaaaagtgtggtgtattcgaaatactgtacaaaaaattaaagtagatttgcaatatagaatttatcatgtaatgccaaaaaaggataaagctatagatagagaatagtttatgggaagatgtatacaatagtaattgtttgatttgtaattggtgtatgtaattggtgattgagaagtacaatgatcctcattcatcaaaaaaaaactcttaacatttttttaagattttttatctaaaattattttgtgtcaattttaatattaatttcataattttttttaaggggaattatcccatatacta

SEQ ID NO: 66339 - DNA, 1287 bp, Cannabis sativa
  modified_base (312)..(319): a, c, t, g, unknown or other
aaattaaataaaaggagtacttaatttttacgtattttacttcatatttttaagttaatatttaaatttaggtggttaattggatattcaattaaaagactgatccaatcggattttaaagtctaattggattaatggatcggatgacgattttccaaatccaattagtgattagattgaatcaggaggattgctaattacaacctcttactcaacctccacgtccgaaatcacatgctgaaataatcttttttcaatttttttttcatagcagtattcgttatagttacagtatcatctctgtaaattttnnnnnnnntctgaatagtttacaataccaaaaacagagttcctgatattctagtttacaacgcgcgttcaaaaacttcaaacgtattttcgacattgtaagctattcaaaaattttcaaaaatttacagatgtaagcataatgaacacccccgtgaaaaaaatattccgacatatgttttcgggcgtagaggttgaataagaggttgtaacaggaagttgacggtaacactcctcttgaatcggatgaggaaaaaaaagttagattggaacagatgcccacccctaatcccactaatattgagataaataaaccaccaaattaaatttaataccctaaatataatgatcattttcaactatcctcagtctaaacagacttcttaatcaaattatagaattagatttaaaaaaataagttctaaccatataaaaaatgactctctataataaaaaattggtaaggagcttcctatttttttggaaaaaaacataatagtattttaaataaattcactattcttttttaattattttataaaattaatttatatttttgacaaattcaaattataaatattattaaaacaatgatcaaatactaaccgaacaataaaaatgattctattttttgctaaaaaatgagaattgctaaaaaacttcactagtgtctagcaacctcctcgatcggtgtcataccgctattgttgtgtaattgaatattgagtctcgtataacttaaaaaaataacttttaaggaatatcgcttaccaatcgtaagacacgcatataaaaaatgctagacatcaataatgctctataaatagagaattattggagatgatctattaaaataaagagaaatactaaaagacgctacttatagaaagtattagatactattagtgcttaatatcaatgctctaatgctccgaaataaaagaaggttagtactgctgctcaaataaggatattaac

SEQ ID NO: 66340 - DNA, 1058 bp, Cannabis sativa
atagaaatttatcaagagaatgagacgtagaagatctgtcatttatgacagtatgacactcatagtctcgaaggtattgtggtggtttggaggctctgttggagcgtcttaaaggctgagatgaagtgttggcagagtttgtgggatcacaatgcacaacagcaggtgcattcgaaggggaatcaggtagatctggtgtgaataattggtctttttctgctggtgaactcgggtcagatggtgaaatggtagcagggactgtatggagtggtgtgttcgtgttgatctcagctggtatatgttcctgcatattgttatttttggcagtattgttagtacctgtaagagggaaatcttgaacaggggttagtgaaatatgagatgttgggaaaaccatatttgaaaaaggatcaagcatgcttgtgtcattattcaatttatgaaaaggatatacactttcatgaaaaataacatttcttgaaataaagatttgcttagaatttatgtcatagagtttgtatcctttgattccttttgggtagcctatgaaaacacatgtccgagctcttggttcaaacttagttctataagctgtaagagttgaagcaaacacaagacaaccaaaacttctcaaattagcataatcgggtaactcatcaaaaagtaattcgtaaggagttttgtttccaagattaggagtgggagttcggttgatgagaaacacagctgtcattaaacaatctgtccaaaaccgaataggaactttagattgaaaatataaagcacgggcaacatttaaaaggtgttgatgttttcgttcggcaatagcgttttgttcgggtgtttctacacaagtgaaatcatgcatgatgccatgttttaaaaaaagatctttaaaaactaattcaggcgcattatcggatctgaattttttgaaaacacaattgaattgtgtttgaagataatgtaaaaattgtggtatgatagtggtaacatcagacttatgttgaagcaaatatatccatgtaaatcgagtatgatcatcaacaagagtgaga

SEQ ID NO: 66341 - DNA, 676 bp, Cannabis sativa
  modified_base (612)..(620): a, c, t, g, unknown or other
aacttgtgtagtaattacctccaattacatacaattccaattcccaggtggctttccaaacgcgccctaaattaaaacagacatcttaacggtagtagaaaggtatttctgggatctctgttataaaagatttacccaaaagactatatacaataacaattcaaaatacaatagatacaaccagtccaaaataactcctggcaactcggcacacaggatgataggatcaatatgtacattgttggagaagactgtcatctcatgactgttcttacttttccttgcccttacctgtactacagagcacccgtgaatcacataaactcaactataggtaatataaccagccatatgcataaaaatagatatgctcatacatttgcattgcctaatcaagcaagcccgtgtcataatgcaatatcatatataataccattgcaccatctaatcaggtgagctcgtgccatgacctgacaccaatataacgcatcgcctaatcaaacgagctcgtacctacgcccggtactcatatgtcactaacgcccgtacctacacccaaaacatcgccaagaggaaactgttggatattgttttaccaagatctagatttannnnnnnnnatgtttcattaacatcctaataagaattctaaaataatgaaattaaacacatataa

SEQ ID NO: 66342 - DNA, 1043 bp, Cannabis sativa
  modified_base (786)..(800): a, c, t, g, unknown or other
aagtaatgggaatcaatggtaaggtaatcaatcatttacatttgtttacttacattattaaagtaaggaaatggataacttgattaaaccctgatccctgacctcaaacctgcacccatacccctaccttctaaccgtaacatctaaaccctaaaccccaaaccccaaacctcaaaacccaaatcccagcccattcccatttccattcccttccccaatctcattcccattccccggccaattcccatttccatttgcattcacattcctattctcattcccattccccagcccattaccattcctattcctattcccattctcaatctcattcccattcccattcgcattccaattcccattccctgagccattcccattcccattgtcattcccattccccagccattcccattcccattcccatttctattcctattctcattcccattccccgactcattcccattcccattccacggcccattcccattcccattctgaatccccatgcccttaatagcattcccagtcccattcccattcccattcccattcccattcctattccaatttttattccccgcccattcccaatcccattgttgttccctggcccattcccgttggcatttgcattcctattcccattcctattcccattctcattccctggctaaatcccattcgtttttgcatttcctagcccatttcaattcccattcccattcgcattcccatttctcgacccattcccatacctattcccattcccattcctattcnnnnnnnnnnnnnnnttcccattcccattccttggcccattcccattcccataaaccctaatgacacgtttcctatacagtatgtaaaatcaaaataaattaatggagaaatgtaacagaataaatgaaaaataatccaaatcaatatttgtagtatatttggcacgtttactatacagtaatcagaatcggaataaattaatggagaaatgtaacggaataaatgaaaaataatcggaatcaatatttgtaatatgt

SEQ ID NO: 66343 - DNA, 787 bp, Cannabis sativa
caattgtttgagagatattattaataagcagtatatcataggaggcacaacttggtagtgtaaaaagcttagaaagaaagaaaaactaattattcttaatataattattggaacttagaattatggttttgtattgtccccataactagctcgataagacaatggtagaattttctattaaatgaaaataattaaaaaaaataaagtagaatttttaatattacaatatattatatgagaattcataattaaaatgttatttatgaactaaatgtgataaaaataaaataatattgatatatattttttacattaatgtgatcatatttaatgttgtgtggtgtattgtgtatactatgcaaaataatatgataatggtcggacaaataatattttatgaaagataaaatcattgggctcaaaacccaacagttgaggccaaccgcaatccaaatggactatggtacacgaataggcccatataccactcatgtcacgactaggcccatagctcaactaaagaccaaaaaatgtgatataattacggagagtttttatttgggaaatttagagtgatgtactaacttttccccatgtattacaaaaatactgtgacagttcaaatttacgtttttactgtgtttatgtttatttggaagtatactgtcattagttataggtttatatataagcaaatttataaaagaaaaggagcttaaaacgacatatatagtagtattactaaaacaaacatatgtgtacgcaccttttttacacacacattcaa

SEQ ID NO: 66344 - DNA, 1745 bp, Cannabis sativa
ctagggttataaacccttttggcgtcggttatttggaagtaaccgacgccataagtagcgtaaaatttcattctaaaaatttccaaccctatggcgtgggttatttattattatgctgaaaaagtgcttctatagacttgttttgtagtaatataagaaatataattaagcaattttgacaggcgttatgtgtctttgacgcatcttcattagtttatatatatagggacatgattttttcccgtgattgtactttcacaaaatgtatttcgtgatgtacgacagccgttagatgagagagttatttgatctgatggttgagattgatttaggggtaattaaggttaaaaaaaaatagtaacgtaccctgagactcatctaatacatgtaccacggaatacatactgtaaaagtatttcacgggacaaaatcgtatccctatatatgtatatataatttctcaatctcatggcggcgaaccttttttttcattcattgttaatctacttaatttttgtaataagttatatttattgtctctctgattagtttcttagcaactacattaaagcttctctcctctacaacttgcacattcactaaaaaagcaatgctagtttcggtaccactaaaatatgactttagttaattagttaacaaaaaataaatatgactttagtcttattaatcagggctaatcagataggacaaattagttggcggccaaatatatgttggtcaaaatcaaatacaacatgaattaataaactaataatgagatatataaataataattaatttatccatgttatctaagtcttgctgaactagactccaaatgaaacgactaaaactcgtgcgattaagcattttaatctatattttattgggagaccaacgtgttaattgatattaaatacaatatttttgtaaaaattcatgatgatggctatatcttgtaccaaaaccatatggaaatggaagatcccgattaaaaattggtattttatactgtgttaaactaattatagttgaacacattaattaatttaatttatattaaatatgttaactatgatttaattagaggtttaatttttttataaataaaaaattaattgatatgtcaaattggtttaacacagcatgaaacaccaatttttaacccgggaatattgattaatgcaaacgccctagcgttttgtagataaatagggccaattaatctgtaatggcgacaagcaggccaaaactatagtttatgatctctatatatattatgtaattaatatcatttgtttgattgggtttggttcggttcggtttttctaacaactacctaaattataaactgcgaatacttcaaagtgatgaagccattacatacactgcatcctctctcattgaacaaaaatgtccactatgatagtaatcaatatgcatgcaaagaactttcataataatattgtaatgacagcatagacctggaaatataattaattggtattatagtaaaatatagaataatatatatgatattagagattaagacatatgattagaatattagaaaatagataaatatgagattagtatttaattataaaaaatttatgatttatatgtgtggcatataatattttttatgcagaaaaatcacagcgacatattttgatagtttagaggtaccaagattagttataaatatttaaaaattatgatttgtggaaaagtattgaaaatga

SEQ ID NO: 66345 - DNA, 713 bp, Cannabis sativa
aaggtggagattgctaatgacatggaaactgcgcctccatcgggaaaaataatggaggttgaagccctagagaacttgctggcctatcgtttggggggagagatcactccgtttgttactgagcttttggaccaagtggccgaaagtgcaacgaaactaccgacggaggtttgggcatcttgcagcagtgtagtcgccttcgcactggcccattatgcaaagaggcgggccatcggggtaaggctttgacttttttgcttttgattctgcttgccctaccccatgttcttgagtcttcagcttctctaacttggccttgttgtttgacaggcggccctattggcagaaaggactactacagaggttggcgcacttgtgacggagctggaccaggtttgggtggcaaaccgcgacttggatgctaccaacgagaccctccaagctgagcttttagaggccaaattccaaatttggggtctgctgcaagccaaccagcagctggaggaggagagtgcctgccagacctgcctcatccaaaatatgaaggtcattcacgacctttatatggagactatggggcggatgtctggttcaggtccatcctcttcattaggttgtgtccaaccgtaatcttccagctgacctatttcaaaatttatttgttttttttttgtatatatatcccatttttaactacacatttcaagccgcgg

SEQ ID NO: 66346 - DNA, 1218 bp, Cannabis sativa
aaaataaataaataattattaaattaacatgaataaattttaaaatagaataagaataattaataagcagcttcattacccttctttagggtggagcttctcttcatgaaaataaagatctagaactccaaatctttgccccctttatgttttcatcagttaaaaaaaaaccaacttttaaaaactaggctaattttttttttttttttaaaaaaaaatagtttaaaaaaactataaaacaaaaaacattaaaatgttattttctattttcaaaagtaattttttttttaacatatttttttttactttttttttactcacatacttagatttggatctcgaacttattggattaagacccgaattcgttcggggtccaggttcagggttttgagttcggggttcagggtttcgggtccggggttcagggtttcggctctagagttcagggtttcggctctggggttcagggttttgggtctggggttcagggtttcgggtccaagatttagggttttaagtccaaggtttagggttttgggtctgaggttcaggatttcaggtctagggcttagggtttttgtgtggttcagggtttcaggtcgggttgagtgtttcacgttcggggttcagtgttttgagtttggggttcaatgtttcgggtctggggtttagtttgaggtgggataggttcatgttgtggtatgttatagaatattgattttctttttctaaaaaataaatcgaaaaatagttttaaaaaatttgaatcaaataataattaatttttaaaataacatttttttttctgtactcactttaaaaacacaataaacagcctccaagcttctcttcattaagagttccatatctttgcccctttatgtatctcatatgaaaattaattttaaaaatacaatcatcaattaaaatagaagctatctcacatgaaaattcattcagaaacataaacaaacccagatctcccttgatccttcgcctttgtttcttgtcgttctccattgctgagaagaagaaagatcacctcgatcccaagtcctctaagcctgtcgacctcttccttaattgaccttttgccaaacgaaaaacaagatgaacaataatccatcttcgtaacatttatttatatattaattttctaataatattaaaaaaaaaagacacaaacgtctaatttcttaatctttttaagtaata

SEQ ID NO: 66347 - DNA, 1322 bp, Cannabis sativa
ctactatgtacgcgagcagttattgtctgccatgttttctcttcgcgggtactttatcagttctacttcgcgtaaaaagttataatctgatttaagcaaaattaaacatactttgaatgattcacctttgtgaattacttggtatatttttaatttcttatacgaatagttaggctttctattcaaatcttgggttaagtatgatcttttcaaggtgtctttgtgcctcgttcattaaatacattcctaataaaatgtgaagtcgttagatattgagcttcacatgtagcttagtgttgcttttttgagttaaatctcatttacaactgctacttttgattttcctttctggcgataaaggtttagtttttgactttacattgttcatagacaaaaactttaaaatttttaaaatggagtgggtttgcaatatattatgtatttctagaaaaattctcgttgatcatacacatatatatgcccctcaagtaattttaaagaataaaactttgtaattacttgaaaaatacttcaactttattaataataattaaaatttaaaaattacatcagagatggagattatagcatttttgtgctggtaagggtcgcaaatgctcaacattcttgtggttctttattagcaagccgttaagccgagccaatttataaacctcggttccaactattgcctcggtcaaataaggaccttcatagtttgggttaaatactcctgcagatgcatctctcgtgtttgcaaatactcaccttagcaccaaaccaccaacattaaaaagccttctcttcactttcttattgaaatatcgcgtaacttggtgttgatatggtgcatttgtgatttgcgactcaacacgtttttcttcaactaaatccaagtacaacttcaaaagttcttggttttcttcttgattagagaaatctcacatgtgggtcgccacatttacttctactggcagcattgcctccgagccaaatgccagcgagaatggagtgtgccccattgctgttttctcagtcgttctatgagctcaaagtacttgtggtagttcatctaccaatttaccctttgcagtgtccaacttctttttgatagtatcctttaaggttttattcacagcttctacttgcctatttgcctgaggccttgagagtaatgagaaactcttaatgatcttgttcctctcgcagaactcagtgaataactcaccatcaaaatgagttccattatcaaatactatcttaatgggtattttgaatctgcgaattatgctcttaatgacaaagtcgagaactttcttgca

SEQ ID NO: 66348 - DNA, 746 bp, Cannabis sativa
gtttcttttaccttttgaaattagtatttttaccctcttaattttgtctgatacaaaaattttcccccttttatcaaaaaaaataattttaaaattataatgttctattaattttgaaaaaaactattaaaatttattaaaaaaaaagtaaataaaaatattaaattaattaaaaaaaaatatgaagtttacttaaaacaacctaaattatttctaaaaaattatttgtaaattttatattattaataaacacctattttaaaaaattaaaccaaaatattattgaaaatccaataagtaatttaaacaaactaaaattttttgaagaaaaaatcatgcttatttatatttatagactcatatattaaaaaaaaataattacaaaattaataaaaatataaaattattttgaaaaaaaaagttagaaattaaactaaaaaaatgttatgtttacttaagcaaatgtaaatttttagataaaataataaattcaaacttgttcctgtaaaatttagtttttacaaatattttaaaaaaaaaaatcgcttaattaattttgaaaatgtaatttcttttttattttcttaattattcaaaatatttttcttaagatccaaataaattttttaagatttactaaaaaaaatattgaatctttctcattcttatttttttaagggtacaattcgatagtcatcaaagtttaggaggcaatattactaatttataaagacacgacagtattt

SEQ ID NO: 66349 - DNA, 1307 bp, Cannabis sativa
aattatgctttatgtaattatccaatttattaattgggcattctgttttgttaaattcaaattcaagatctaataaatcaaataattctaaatacctcttccattaacgcttttttgattcccgataacaaatttaattttgtattttctaaaatagtataaaatattaccacaagttgattttttgttgaaataaacttaataataatccgatttaaaggtgtcatgacaagattggttacattttttgtatatgttcgtgaaatttcttcaaatttattatattaaaaaaaagtcaaaaaactaaacttaaggtactattttgtacaattttataaaatacatggtataatttactattttataatacaaaaaacatatattaactcaataaaacataaaatttaaaaatatattaactcaataatcacacttgtaatcatggtgtatattacaaaatctaaaataagtttttgagtacaaacaaacctttgccaatcatatatagatagggtggtccattatgttgaaagaattatatatgatcacgggttcatcaacttatatctatgtatttgtttgtatttttattttttattcttttatttttatggtgtgtgagtattctctgatgaatttttatctcattttaatgaaaaattattgctatttggtattttaaggtacaaacactttgctgatatgatattttaatattttataattgattagtaattttttatattattttttaaattaaaatgtatgagatctaattagtactgaccctaggctaaggtgagcctagaacccacccatcttaggggtcaattttttttttcttaaggcacatttaacctcaaaatcagccatggacctaatattaaaattaaaatgtactaatatcaatattaggcatttgaggtaccccttgacacttctcttcatacaaaatagagcacctttctcatatttgaaggatgtgtctttgatgaaaggcctaactcaagggagaacaactttatctttctgtttttggctaattataatttttgtcttccgaattttaacacatatcaaatcatgccaatcgaacattttagacaattaaaaattccctttcaactattaagatagttaaatttaaaaatttttgtttaattttactaacgaaaatctgacgtgaatcaaattttaaggagcacaatttagtacatttcaggagacaatttggcatattaaaatttagagggtgcgatttaatatatggacaatcgccacactagtaaaataaaatggtattagaa

SEQ ID NO: 66350 - DNA, 2020 bp, Cannabis sativa
ggttgtgtcgtcagattttattgcgtgtggcagttccaacacgcctcctcccatgcggtattaaatgcgagatgactgctcagaggaagcctggcacctccgggagatgctttgatgctatcttgatctccgggagcatagaaaaccttgcatgccttctccgggaggcatatccaggataatgccttactttacttagctattaatttaagtgctaaaacctttgtgtccacgtgtaaattctccaccaaggcaagatactctaatcacatggaggcaagatatgtgattagctattaatttaagtgctgatgatatgtgattagctattaaaggcaagatatttcaataataactcattcttgaggctggtatgggctcatatccatatctaacatggagggtcatcatgtggggtaaggaattacttgtcaaagggctttggtggaaagtgggaaatggagctaacatcttctgtgcttcagacccgtggcttccaagttacaccagttttaaacctttagtcttttatggtgatgacataaatatgaaagttgttgatctgcttctagattctagacaatgggatgttgatttgttacgggaattatctttggattcggatgttaacaaagttcttagtattcccttaactctaatcaaccagcaggatattctcatgtggcaccatgaaactaatggacaacacacggttaaatctggatatgcattggccatgaaacttgaagatcactctcctttagctagtggtattgaagcaattcaatggtggaaaaagttctggggtctttctcttccttcaaagatttgaattttcctttggagagcgattcataactgcctccctgtatctgatgtacttcataccagacatataaatgattcagccctttgctccttatgtcagcgtgataacgaaaccattatacacgcactcttttactgtaaaagagcccgacatgtatggaagctgtcttgttttaattctgaaacgctactgcaacactagaccaatttaatggaattgtttatgcactgctcatctattttttcaactcagcagctggagcaatttgcaactattttatggtgcatttggagtgaaacgaaatagggagaggcatggtacaagaccaaaaccagctgatgctcttctctattttgcttactcatacatagacgagttcaagtgtgctaggaaagatttcaatcagagtgcaacgtgcggaaatatagccaacacttctgctgctaaagaagctccatggatgaatcctccttcgggttgtctgaagctgaatactgatgcaacaattgacataaggaaacaagtttcaggttttggggcagtcgttcggaacagtttgggggatattgtggctactacatctattctcttcaaaggctgctttaaaccagaaatcatggaagcactagctttgatgcatagcttgcaatggttacaagatcttaatctacatgttcacttaatcgaaacggattcgcttttggtagttaaaggattggattcattacaacaacatgtttctgatttccattgtcttttgaataatatttcgcttttagtatccaaattccctggagcacatatctcacatgtctttagatctgctaatactgttgcccacttattagcacagtttgctctttcggtggaaactaattgttcatggctagaggaaatgcctctaccgttaatgcctattgtattgtaactttccagctaatttaatataatagcatttcatctcaaatatatatatactacacccctcacgtggccaaagaaagctaaaacttttcttaaaattcaagaatatgccacatcatcttaatggttacaaaaaaaaaaaaggaaaacgacgaaagatgcatatatgtatgtactgttgagcaaaaaaaaaaaatacataaaaggcacatttatgtacatcgataaaacaaaatctgattcagaatatatatacagtttggtata

SEQ ID NO: 66351 - DNA, 579 bp, Cannabis sativa
tagatcaggcttgtttatcctgatcatcatcatcaaagttaaattaattaagtgtaaataattaatattggtttaattttacaaattaattaaaaatgtagtgatatagttagtaattgtacctgtcgatgtccacatcgtaaatttgattcatgattgctgcaaagaaattaaaggacaatataggcaccaaagcaaagaatgccttccacatcaaaccccaactgaataaatgtctgttattgaacaactctctcccaaacaaaccactgctcaccaacaaacaaaaaccattatttaatttattaagttggaaaattctatggagctagtagtagtagtacctctcaaaaattgatctatgcatgcacatcctttatgtttttgatattctaatcattgtatgggtaaatacatttttgaatattatattttataaaaaattatgcattggaccttctaaaatgataattcaaattttatattttttaatatagtccaaagtagactcttgagattaataataacatgttttggaggtgttataataagattgattatatttttttgtatttattt

SEQ ID NO: 66352 - DNA, 702 bp, Cannabis sativa
ttgtagtgcatgttttttaccttaaaaattggtgttttatgtgggaacttccttgatcttgcttgaagataagtacatctaagttgattggaagattttgtaaaatttctaaacaataactcaaagattcaaacaaagaagcatcatgtctccaaaacaaaccaactatggagctaacatcattgaaatgttggcttaacaagtgttgtgatcactgtcattaatgcagggcaagtacaggtagaatgctaagatggccaaaatgcaaaaagaaaacaatgcttgactcactcaacaagcaatttagtcaatgatgaatcctctgaatctttccataagtgtgggatgtacgagaatgcagaagccaagaccactgatctaaacgtgcctaccaccaagttcaaaaactctgcattcattgtcgatctaacgcgaatgcaaatcctcctacatttgatctaccaacacgcaagaaggatccacataagccaagctagtaggttcctcgaacgaaaattatttgcatccataatttacttttagctaactggaaggagatcatgaaaaatgaggtgctacaacaatacagtccattctaagtgcaaggcactgcaaacttgatggaattggaaatgagtagagctaaaaattctccatctgttgattaaatcctcaatgagtgaaaaccaaaagattcaacgc

SEQ ID NO: 66353 - DNA, 547 bp, Cannabis sativa
gtggacattctattggacctatcacgcctggtaggggcttacgtcagggagatccattgtcaccatacttgtttttgatttgtgctgaaggcctgacggcccttttgaaaaattatgagaggcttcaacttatcactggttgtagagtggctcgtggggctcctgcggtttctcatatgctgtttgctgatgacagttatgtttattgtaaggctaatacacgagaagctcaacatgtgattcgtcttctcaatgtttatgagcttgcttccggtcaaaaaatcaattttgagaagtcttcagtgttttttagtaggaacacagcggtggacgtcaaggataggctctgcagtctgatgagattgagtgaggctagtgaaaatagtttttatcttggccttccttgtattatggggagaaacaagaatgctattcttggttttttgaaggaaaagatgaaaaagaagattttcagttgggaaaacaagttcctttctaaagcgggaaaagaggtgttgattaagtctgtggctcaggctcttccaag

SEQ ID NO: 66354 - DNA, 1364 bp, Cannabis sativa
tgttatctcaaaggttgtccaggaaaatgtctcatctattcaccaaactcttctctgcatctcagaggcttttttgattttgactgggcctcttgtctaattacacgacattctattatgagattctgcatctttattagtgattgtttagtttcatggaaaactaataaacatccaacaatttctaaaaggtctgctgaagctgaatattgagctttagctgtcagcaccaacgaaattacatggctgaattatcttctcaacgacttgcatcttcctcaaactaaatctgccttcatctattgtgacaaccagtcagctatacacattgccaacaatcacaccttccacgaacgtacaaagcacatcgagcttgattgtcacttcattcgtgacaaaatcaacaactctacagttcgtctcatcccagtttccagtaacttacaactcgcagatgcttttacaaaaccattaccatctaccacactcaactctcacatacacaagatgtcagtatacgatctctaccgtccatcttgaggggagggggtaacaagtattcgtgtattttcccaatagtactttttagtgtgtattcagttagttgtatgttaggtggagctatttagaggagttagttacttttcagttatttcagttgtgactgattagttggtgggatgttggttaagacagttggtcattcactatttatatactatgtagttcttcattgagacaaaccaccaataatatttttctgttttgttcactctttaattaatctgcaatatatcaagcttgaacaaggctttcggtgcaaattaaattagtttttttttttgacaaaattgttaagtttattgagatttattgaaattttatttttacacatttattaattaaattcttattattaagatttttatttttattttaatgtaatattattcttcacatgttttattaatagtaatcatgcttatttccttttcatgaataaactttattttatttataagaatctttcataaaaataaataaatataaataaaccaatattagtgataaaaatgacaataattataagaaagtaatatgatattatttagaggtgatttatgcataaaattttttattaaaaaaatcattaattatgtattatatttgatagttccaaaactttaaattaattaaaatgtaatgttgacatttagtagtaaatattaatgttcaattttataaaatgaagaaaaatattcttctaaaaatttatgaaatgtcacttttttaatgtacaatacttatattattaaaattaaaatacatgtacattacccttaaaatgtagaccttaaattctg

SEQ ID NO: 66355 - DNA, 511 bp, Cannabis sativa
taataataaattataacatttttaataggtcgtgctgtactttttgggtttgtcgtatgtcgtacttttcaggctattctatttgtgcttacgtattgtacttttcatggttctcgtgtcgtgttgtgcttctcgtgtcgtgtcgtgcttaaggatatatttttagtgtcgcatcgtgccatgtcgtgtttaaggacatataatattaacgtcttagaattcaaatttacttattttctttgaatttgaatttgttgacccataaatctaaactagacttttaagccacactcttttgctagattggcaagaataagaaaagtagttaagtaattaagagagacacatcaaatttatagtagttcacccctatttcacgatagtaatagggctatgtttacttcgagtttttatttctcacgagatggtaattacaaaaatagactaagtatcagaaaaactccaaacgttagagagagaagctctaaccttgtaggtagttttttgaatg

SEQ ID NO: 66356 - DNA, 1537 bp, Cannabis sativa
atttgtgaaagaaaaaatatgttgttaaataaaatggcaaaactaaaacctatagggaccactacagcgtcacgaatactgggtagaatagtcgacagtagaaagttctcgttataaaagaattcccgacggttactgtcggctatagtcgatactataagccacggtttaaaatcgtcagctactatagccgacagttttaaactgtggcctatagtatagccaacggttttaaaccgtcgctatagtggattgccacaattaaaaaaattatcatcgtcatcctcctcgaaaacagttctcgcatatatcgcatccgttccaaaacccttacaagcttcatcctcctccacggttgttgtgctcatattcatcctcgtcaaaattttctttgataagtttcggattgcttttcacttgacgatccttgaaactttcttcgcattgcaagctttggatttagttcgaacacacatgccgatcaatatcaacaaacaaaatcatgaataatagaaatttaaacaaaaaaagagaatattgtgctcctttatgctaccatgagagagcgtaggaaaggggcagagtgagagagagtaaaggagagggacgaccagtgtgactcgtggtcacaaaggagagaaactttgaaaactgagatatgatttgttttggaagggggggggttatatcttaaaaggagggaaatgaaatttaaaatagggaaagtaaaaatttaaaatttaagatgcggcaaatgacatttctgatccgaaacgcgtaaaattgaagcatgagaattgcctacaatttaaatcgtcgcctatagtattgtcgacaattttaaaccatcgcatatagtattgccgatagttttaaactgtaagccattcccttttaattcacgtttaaaaaactgtcgcctatacctttcgacagtttaaaaccgtcaggaatattttatttttctcgacggttttaaacactcacttaatttttttagtgacggttcccaaaaaaaaatatttttaaaatcgtcgcgaatactcttttttgtagtagtggtttgattaattttttaaaaaatttgttaggtaagaatagtcgcagggccaaccctaggcataggcgggctaggcccgtggctagggccccctcttttggggctcaaaataaaaaaataaaaaaaaattcattaggcttttattaaagtaaaattaagtgtattataaataataaatagtcataacttagtttgttgaggtgtatgacatattataaatgttatcggttcgaattccataacactctttttcaattttttttatatatatttctgaatgtcctaaaatttagttcgccttaggcccatatattttaagggtcggccctgaatagtcgggtacagtttgtggagtgccctaatgatgtcaatggcatgattgatgctgccaagtttgcgaatgggctgagatgcaaaacgaccctaaatttaaaaattaagctagtaaatgtctcctttttaaaaaaattaagaaaa

SEQ ID NO: 66357 - DNA, 1519 bp, Cannabis sativa
aataactctaaatcttagagttatcagattcctagttacaacagtagatactaatcaacctatttcaactagacttgaaaatacgagattggtgtgtgaatttctagaggatctacctagattaccaccttcccgagagattgaatttgttatacaattagttttgagagcggaaccaatatcaaaagtaccttatcgaatggctctagcagagttaaaggaatcaaaggttcaacttcagaaattactaaacttgggatttaccagaccgagttattcttcttgggtgcttcagtgttattcgtgaaaaataaggatggatcactttcaacgtgtattgattaccgggaactaaataaactcactatcaagaacaaatatccgctacccagaattgatgacctatttgaccagttgaagggtaagacagtcttttcaaagataaaccttcgctctggttacgatcatttaagaattcgagaagaggatatctcgaagactgcatgtcgtactaggtatggacattacgagtttctggtgatgtcttttggactcaccaatgccccaactgcatttatggatcttatgaaccgagtattcaaggatttcctggacaaacatgtgatagttttcattgacgacattctagtttattcagaattagaagaagaacatgaattacatctcagattagtacttcaacgactacgggatcacaagctctattctaaattcaaaaattgtgagttctggttacacaggtctctttcttataacacatagtggataaagataggatcatggtctatttggccaaaatcgaagctgtttgggatcggccaacaccaaaatcagctactgaggttagaagctttttaggtctagctggttactatcatcaattcgttgaaggtttctcaaagatagcaacacctttaacgaaattgacgtgaaagaatctgaagtttgttcagatagatcggtgcaagaaaatttttcatgagttaaagcaacgcttgattaccgcttcattattaactcttccttccaataagaaaaattttgtcatttattgtgatgcctcaagacaaggtctaggctatatacttatgcaaactgcaaaggtaatagcttatgcttctcggcagttaaaagagtatgaatagatgggcagtccaaaaggaccattcaaattttagaagacatgctacgagcatgtgtattagactttgaaggatcatgggtaaagtaccttctcctgatcgagttctcgtacaacaacagctatcaggcaacaatcaagatggatccttatgaactatctatggaagaaagtgaagatcacctattcgctgggatgaagtaggtaagagaaagttcttgggtcccgaagctatttagagaacaagtgaggcagttgacaagattagagaaagaatgctcgctgctcagagtagacagaaaagttatgctgatccaaagcgacgagatattgattttcaagttagagatatggtat

SEQ ID NO: 66358 - DNA, 911 bp, Cannabis sativa
agaaacctgtgtcatgaagaagttgaagtgtaaaagaccgctgagaaattaaaattccaaccgaggaacgatctattttcaacccccaaaaaaaaaaaatcggaaaggaccaaggtcttttaactgaaaagttaaatgtaattgcttcttaaaattctggacagcaacatcattgttagaagcaatgacaatatcatcaacatacacaagaatagctaagaaaatattgttagtactcttgataaacaaagtatggtcattaggagattgtttaaaaccattagctaagaggtattgacaaagtttagtataccattatctagtggcttgtttcaaaccatatagacttttgtttagcttgcaaacgacatgtgaatggtggacccatcttgcatcactttctatgaatacaatgtcatcttactctttcttgaacaacttcaatgatctatcacttagattgttgacatttgtcaatggtttatctcttggttctttggcgtagtgatcttgtgccttctttaactcgcctccgatgtgcgatccaccaattatatctaggatattgcgaggagctcgagagcttcctactttatctccatcgagattagttctatcatctccctaagaatttttgttatctgtcctttcaaaaagattagtggagataagaaaacatgaggtatatgtttgtgtttagcgatcaaatcaaagaaatacgcagtgaaaaaacttctaataagtcagctctccttctacatatatatgtatatacattgaacaaaatgagagagaagaaagaaattaaacctgaagtccttcctcattattatcttttcgtatgacaatcgttgaaaactcacaccaagatcttcatccagagtctcacaacgcaaatacaagtgtgaact

SEQ ID NO: 66359 - DNA, 756 bp, Cannabis sativa
ctcgaacctcagccccaacctaaaccaggaaaaaataatgaaaaaaaaattattttcaaaataaaaaataacattttgatgattgatttttttaactcaattttctaaaatttgtttttcaaaaatttgttcaactattgtatttaaaatgcaattgtctctttaaaaaaattaaaataattttaagttataaatcaaaaaccatcattgtctcaataaaaaaaaatggtcaatacaattcaaatttcgccaataacaaattaaatcccaattaagaaaaaattacatcataatatagggaagcattgtctatattcttaaaagcatctgtaataaaaaggaatgttaagaatgtttatcaatgtcatcatttatatttttttattattattttactaaaataagaaaaattgataatttaatatttatttaataaggatttttttatttttacacttgtaaacagattttttttttttttgtatttttacgaaattctatatagatatatccctattgcaactagtagcgctgcaacttaatttttaacaaaaaaatcgtatagaaacttttattgcaactagcgctgcaactattttaaaaattcaaaccgtaaatttaaaaaaaaaaaatataaggtaattctattatttaataacaatataatattattttaataattttgagagataataaaaataaaaagtgtaagtagtaaagaaatatagtagttagtagtagtagtagtatagtagt

SEQ ID NO: 66360 - DNA, 589 bp, Cannabis sativa
  modified_base (204)..(213): a, c, t, g, unknown or other
tttaagaaaaataaatataaaattaaagaatattaaaattaaatatactctcaatattaaaaataataataatacataataatattacaaataatatattaatatttatgtatataaattaatttaaaatgaatataaatttaattaacctaaaataaataatattaatatttatatatattaaattaatttaaaataaataannnnnnnnnntatatatatttataaaactaataaccctactaataccgttaaattaaacagaatattcttaaattcttaaaatattctgttaaatcaacaaataattatattttatatatgaagtatatgtaattattatattgaatcaattttaaattaaattttgacttaatcatggggaaacctattcaatccaactaaagtcggactatttaaattcaatccatatagtttttttttttaaaaaaaaaaatgaattgttatatacgtatgtacataaatatgtaataattaatgtaatttacatctaatttttacgtaccaaaatttacggagagaagaagtacgtagtaatattaattagggtttaaataattccatatat

SEQ ID NO: 66361 - DNA, 757 bp, Cannabis sativa
aacacaactgttccacctggaaccaacacccagacaaccatcggagatgctactaagttacaaaatctctgcgacgctcttggacacatgcaggttgataacaacaccctacatcatgatcaagacgaaccccgcactacggtaaatctcgcgttcgaagaacaaaggcgtatgtttaccaagtcgagagatagagagatggaggcattaagggatcaccatacagagattgaaaatcatagtcggcaagctaccgtgctgatacgaaaagcctacaaaactgtaggtcatcaaccttcgaatgtcattcccctaaactgtaggtcagcctaccaatggtgccatcccacccgtcaaccaagcaaatcaatcgctaaggcagcgaggcacttctgtatttgaaaggttggggacgacccatgacctaaggaatgatctaatagaaggaggagagtagacgatcagaatgtcacgacgaccatgcaccccaaaacccgtactcaaattcccgctcaaatgatggtgacgtaattcaaattgaatagaatgccaagcaggttagcccagccgtacaggacaactagacgaactgaaaaacatgtttcacggcatggctggacaaagaaagaatgatcttgagctggaccgaacacgcgaaactcctttctcacctgaggtcaatctcctggcgttgccccacaagtttaaaatgccaacatggaagatgtacacaaggagagaagatcccctttcccat

SEQ ID NO: 66362 - DNA, 1112 bp, Cannabis sativa
gtatttgttttatatgtcacgggcaaattggtcaacatgttaaggtgtctcttgtcttttgtgagctttattattcaggtttaataaactctttagttaattgatcttttatttagataaacatatgcatagaaaaatctagaacctctctctctctttcaaattgtcaagaaccagcaagaaagggaaagaatttcatttgttattcaaggaagtacagtagaatctaggtgtttcaatctaaggtatatctttctaacctagctattccttgttttcataagctttagttgtttgattttgagactttaggagttgtgaatgtgtaacttgcttgatttcgtgtcctggagttagattaggttttatgatggttgatttaagctgagttggtaggttatggtatggtttgagcaatgttgaggttagaaaactcaacttggtacttttaatggtgttttgattttttgagtttgttattgaagtttattgattgaattgggttcattatggtatatacaggcattttagaggttattgaagagtttggggttaatttgaggtgttggggatgattttggggttccctatactaaaccggaattcttgctgaggaaccggtctaccggttgggacaattttgtgaaccttaatttttccagttttggaatatttagggtatttccatattattcatcgataggaacatttatagttttgattttaagtcccctggaagtcttttagcatgtctctcatcagaattttgaatattgtgatttagggtcctgtaagcgtcaagctgttgttccactcaggttgaccagcacacctgagcacgaaaatgaggtaagattagcatagaatatattatatatgcatgatgtgttttgtgattgtatatgttttgggtgatatcatagcggcacaatcattgtgccggttcgacagtcatcacgaataactccacagttaagcttgcttgaccttgagaaatttcaagatgggtgatctcttgggaaaacttctcaggaagcgtacgagtgaggacaaagcacgttggaaatactcgtgttggtttatagggtcaatcatcagtccatgaagtagcc

SEQ ID NO: 66363 - DNA, 772 bp, Cannabis sativa
atagtttcattatattattttagtcttaaaacggtttgagaattccatgttataagccttggtatgaagctgaccaaattttgtttattgtgaatcttcaaaaagttagccattaggtattggacgtcttgatttgaatgagagaattatatttctttataattttttgaggactgccaagataaatgcgacagcaaagaatgccataaagacatactatgttttgcttcctttattctttgatgttcttggtttgtagaaaaagagtagtggagattgctagtcttcctgggcaggagaacaagtgagtttatatgtacatgagtaaaaaataagacttattgtcagaaatatatatttgtgttaaaatttctcaattatggagattttattatatgtacatgtttgcttatcattattgtcattatgatacggttgagtatctaaaatttagtgggacaagatttaagatttagtttcatggatgctagtgagttcatcagcaatatgagcttgaccattcatcaacgtctttagttgttatataatcacgaccaagttgtgatcatgggattttgaatgttcttacatgcgttaaatcttggcatcaatggtctgcattcccttctccattctcattgacactatttactagaattggtgctctgataccaattaatatgatccgaactgctgctgtttgattactagcaaatacaacattataatataaatagtaatagggaaaatatgtatttcaatagtaaaaatg

SEQ ID NO: 66364 - DNA, 3001 bp, Cannabis sativa
  modified_base (42)..(49): a, c, t, g, unknown or other
tagaattccgtaaaaaagcaaaaaaaaaaaaaaaatgttttnnnnnnnnaaaataaaaaagtccctaaaattataagaacacatttactacatattattttttaaaaaatgtatataacaattaaattaaattatataattttattagttgcatactattatattgtaactgttgaccgaggttttcggcaaccaattaaataatgtatgagaagagctgtagaaaatgtaatacaagagatttttatgtggttggggcattaatgagccttagtccacgaatcttttgtatttatgagagtgtttattacagagaatgttcttggtggattttttttcctattttctctcttcgattccttaaataaaatcgatcgaccccttttcagtctgtctgtggggtatttatagtacttttctggggagatccctaggaatggatcacttgtctttctgtgttagcttcataagggcacacattcctagcaatacaaaataagaaatacatgacatataccgtaggtatcttaggagttaggtggatataatcttttatcccctcttgactgttgtgattcctcataatgtagccatcactagactcttcgattgttgtgtaatcgccgtaaaaaggggcttacgccatctgtcacgtcttttatggaggtttcaacacgtcttcccccatgcggcattaaatgcgaagtgattgttcaagtaatctctttacctccgagaactgtattagcatggctttagcctcccagagagtaaagatatgtcttatgctctcctccggaaggcacattccctgaggtgttcctttttttgtccaagacttagttgattttcgtgagtgatggttctttcagatccacgtgtccccttatctgcgtccacatgttttgggaaaaaccaaaggcaatatttacccccaagctcgtttagtgaagggtaaatgaggcttgtttgatgcctccggttagcttgttgatagtactgcacatgccttaggcgcatgggttgtatttatgatggtcgtcattaatatttatttcttttgcaggcaacgattcgcttcccgtccattgagaaaccagcgcatctgatttgggtactcaaacattttcaaacgccctggcccccacttatctcacccattggatttgtagaatgcgaatcaattacaattcccaccgtacgatggtgtctgatcaccgctgtcttgcaccttttctggtctataaaagccaacatgtttccttcattgggttacttttgctatctcgccatttcgacccaagaaactctgagaaaatttcagaaactatagatttcttgctgctatttcttcatcgttgccagttcgcattctaccgtcgatcatcatcaacttccagttcattacctttatgtaagttttgtgggtacattttgcttttgctattcatttgcatgttagagcagagtttttggtagagtcgtatttgatttctacggttgaatgattttggtgaaggccgtcggatggcgtatcttttcatctgtgttctgctacttcctttctttttcattttgtaaacacttttttgcttagggactgttaagagtatgacacggttttcaaacttatgtccctctctctttttgtcttttcctttttctcccgctttcgctacctttgggatatttgcacccgatgtatgccaaggaaaatccatggatttatttctggcagacatccggagggggcctttttccagcggttaggggacccccattccctccttttatgttagggtttgggggttaactgctggattttgctttttcagaatcttactaatctcgagacatgtctatccccacgaccggagcgaaatccttagacaaaggttctaacaccatggccacccttgaggaagtgatgaagggacctgtggtccaggagaaatatacttgccgatctaccggctgggaggctgatgagttgcattcaactctaacctgcgcccaccaactggagaagatcgtcactatggccgggatcatgccttctatttctggagtctttcaccgtcttcccagagacgaggagacgcccaactataattatggtggcttcagagcttggagccagactcacctcatgtttggggcaatgctaccgcttcaggattatttcatcaatctcttagcttttattggtcttgcgccttaccaacttatcccccaagcatattgcctgctctcaggcttgtttattttttatgttaccagaagcccagcctggctaaaatcctttatttttatgaacttgtatctgtccccaagaagagagacaaaactcaaagatgtttttttcacactctgggcccatcctgctaatgagggtccggttccttttaacttccagaaaaatggtaaggaataccgtcaccagtttttcttctcctccaatttccaagctattgagcgccttcaacacgcccaggtcttctccacaaacgacaaggatgggtttaatgttggggacttggtcacgactgcacactgcaggagggccaagttgattacagagagccagtcaatggatgatttcaatttatccaaggttctttgccccaacgttcgcaattctaactctgagaaggcgcttcgcgcagacattattgcttccgtagaggaccgatataagatgtacctgtttaggagggaacaagaattggcctacatcaaggcccaagccgccgtagggagggtctttcggatcgaggctggaaaagagcaggtgacttcccggcccaagcttccgttcccagtccccaacactggggctcctgatgccattacctccggagctggtaagtccccactaattgttcatcgtgtctcttccgttaaggattattctggctgtaggccagtagagtttgatgaacgacttcataggtttaggatgccccctttccgatgtggtgaccatgccaagggtttttat

SEQ ID NO: 66365 - DNA, 1179 bp, Cannabis sativa
  modified_base (34)..(46): a, c, t, g, unknown or other
tctttattaataattaaatctgattatattgaannnnnnnnnnnnnagggcacaaaacccaacattcctatcaaggatatttggagtttgaagataggggagtttcccgtatcccaggatccaggcatccttgaaaatagagatggaggtaccgttacctactatattttgtagccctggcaagaggagtgatttgccccaagagatgctattccagacaagagaaggacggtgccctttaccagagtcaaggaaagaagagtgagggtagtatcaagccttaagaagttgggcaacaagagaggaaggagcctgaagaatacgccaagcctatttggctaacattgcttgattgaaagctttcattgatcggaaacctaggctgccatggaatttagatttgcagaggtaggaccaactctcccaatgaactttcctattgtggtcagttcctccccaccaaaattaaaattgagccatcatggactccattttttttgtgtggaagtaatggggtaatttgaaacaagtcatcgcataggacggtatcgcttgaaccaccaatttaaggagaatttctttgcctccttttgagaagaaggtggaattccatctatttaaatgggaccacacgtgatcctgaaggtaagtaaaggcttcttcttttgagctgccaaaagattgagggagacctaaatattctcgatagagtctcgaataggcacattgagcaaagaaatgatctgattcttaatcaagtcattggtgtttggggagaaatacagcgatgatttatcatatttgacaagttgatccatagccaggctgtaatcatgaaggattaccttgatatgtgtgtctgcaataggagaggcgacactaaatagaatgttgtcatcagtgaaaaatagatgagatatgattggtgcagtccgggaaatctttaggccaagagcgtgctttcttggaaggcattgattaactttttgggttatgagtgattagaggccttcagagcataacatgaaaagataagggtcgagtggattgccttgacgaatgccacgggatgggatgacagatctcttggaattatattttaccaggaactttgatctactcacaagtatgttgatttaacaacctaaaattgaatttctaaaacgatgaactaaacac

SEQ ID NO: 66366 - DNA, 3414 bp, Cannabis sativa
  modified_base (249)..(271): a, c, t, g, unknown or other
tacctcaaaaatactcattcattaagttatataaccggttctattttagttataaccgatttaagttatttcgtgttatttatttttattcattatattacagaaatcaaatggctcaaacaaaaacatccattcaacacgctccaattcaccaaataattatacccataccatatccacatcaaaaatactcattcattacgttatataatttgttcttttttagttataactggtttgagttatttnnnnnnnnnnnnnnnnnnnnnnnataacattgttatagaaccgattcaattttaattataattagtttgagttatttttttatttgtttttatttattatgttacagaatcagttatattttaattataacctgtttgagttattttgtgttatttatttttattcattatgttatataaccggttatatttttgtttatatttgagacatctacttctggtgactttttcagtgactttttctgccatcgatgactttttcagtgactattccggggacagtaacttttttcgatgatttttctaattttttcggcgacactaactttttcgataacttttctggcgccggtgactttttcgacaaaatttattattgtttacaaaaatatagcataaaaaagtcaatataaatataaaaaaataaaaaataaaaaaacctataaccccttagcattatttatttatgccataaaaaagtaaacttttataatttcccattaatttttactttttttttcatatttattcaatgtttatggtttcaccaaattttcattgtctcactttttttttttagtaattttaaaaataatctctggtcacattttaatttggctaaccattaaaaaaatactttgtggcaaactcttcaatgtgaacatttgttattgtggaaaacatatgttttttttttcatattttaagaaacgaataattatatagacactattttttgtaaaataattacatttttacgttcaaataatgtttttttatgtatatttttacggttttctaaaaaattaacaagaaaataacattaaatcaacaagaaaactatataaaagtaacatgaaaataacaacaaaaaatgacatatagataacaaataatcaataacaaattaacaagattacaacataaaaaaaaaccgtattttctataaataaaataaaaaaatcgtaaaaaatattaatgagagtaaaaataaaagagaacaatataaaaaaaggtataaaatgtaatttctttaaaaaataacttatacctttaattcccatatttatcaaaattccccaaataaaaaaaaaacgcaaaaacatgattatatattaggtccaattaaaatgccctaatatatatctccaatttctagggcctagataagtatgtttgcactattagaataagttaatcacatgctcaatctttatatagaataagttaatcatatgctcaatctttatatagctattaataaagagaaatattatattaatatgatccatggctgtataggagtactcagtggtctcatttgacacgtcggaagctagatgatgacgattaagttacaaaaaggcctgatccatctagccatatcactgccaaagaatactgaagtcatcttcataaatcaatttatccacaacagatttttttaaaaaaattcacattcacagctagctagctagccattttggaaagagtaaagtcaaagatctcaaattagtaagaatgtagtattggaaggggacacacgcaagacaagagtaattttctgttttcaaccccaacgcctctatctttaattttttaatgtcccaattaaatattcactaatatatctatcccaagaagtttttttttttcccactatttctatgaaatttgggttttgggttttggacaaaatttggccccaaattctaaatcattgaaaaaaattgtaattgtggtagtagctagtaactaataagtagcttatggggtgtgaggggaaaaaatggttgaaataagaggaattagcattaaatcgctcaagaccaacatgctcggcgagaaagcaatgggtcttagcgaataacgacgcaaagtcatcgtaaatggtacggtgtcacatggttttgtaggcactatgcaacaaaaagtggtctcaccccacgtgtgctgagccctcacactctccttatcaatatttattttattttttaaatattttaaaaagacaactaaatttgcatgaattgaactgcctaatattacatatatatacacatagctaattaagagaaccaataaaaaaagcaatgatgataaaaaattaattgtgtttttggttgatgtttttcacatactttattgactttgatgttgaagtagtaggaggatctttgacttgtgaaattatttcttttggctgtaaattagatcgaatcattttcatatcgaacattgaatcttacattatatgattcaaaaagaacactttcgttgattaaactaaaatgaattaagtcacgcatgtaacgttccttattgtcctcttaaatactagtaaggaggccaatgcaaggcattgggtgtcattataaaaataattttatgctaaaaaataaacacaatatcacaaagttacctaacaaaaaagtgagattgtttattttttttatttcttttctttatagatagtttaatgattatagttataagttataacataacattttggaataagatttgtgataaatatttttcatttttatattttaaaacaattattatttttttttttttcatttttacggaattctacatagaaatttttattgcaactagtagagcaacctaaatcgtaaccaaaaatcgaatagcaatccacatagaaactattttaaaaactcaaactccaaactgtaaatttaaaaaaaattaaaaaaataatatatacagtaatttttgtaaaaatattatttcaatatttttgaaataaataaaattatatatatatttataattgattattttaacattatttgtgatttgtgattgtgctgcaattgatttgatggtttattgggagttaaaactccaaaagcaaaaaccagacaccatttcaatttttcctctctgtaatcgatactctctttactatttcatttttattttcataaacgttctaacctctctctacctattcttatcaaatttgaaacctctcactctcaccattctctccaaccattattgatcactcaacaacttctctctctaattatcactataagaaaaaacactttttctagcaagttttgtcacggcaaaagtaaacgtatctcgccggcaatattatacatcggcaaaagatacgggcaataattca

SEQ ID NO: 66367 - DNA, 672 bp, Cannabis sativa
ggtgaatagttgctggtattgatttagccaagagtttaagaacttggttctcttccaaagggttacaattattaagattctccacacccgtaaaaataaatcacattcactaataaacctcaccacaagagctacacaaatacccaacccaaataccaataccaacccaaatagccagttactaacaaacccatatgtgagaggagacttatcagtttggttgaaagctttccttaagttgacacatgaagctacggttgagcatatatttgttgtggctagtgggaaattccagcaaagaagttttaataacttctagttaagtttctttatcttttcctttatcactcactcttgtacacacattaattgaaccacttaacactccatgcctcaacactattcggtttgagcatttgaggttttaaatatgtaatgcaaaagagtttttgaaggaagttaataacatctcttgtcaatacaatatttgttcaattttattgtgctctttgtatattacaatttaaatataattttaagatggactttgagatttatacttattttgtaggtaaataaattcgcttctcttggctagctaccttgtaaactcagttcaatgtagtgtttagattagcaggagttcagaatttttgtattttcttggctctc

SEQ ID NO: 66368 - DNA, 1098 bp, Cannabis sativa
gagtaccactgagtgatataccacgcactcccagtacctctccgtacttatgctggtatcacggtactctcagataacattcactatacaaatgcattgtataccataactgtataagtgtttgtagtataactaacattttaagcatggatatacacataacatatacatacactcagatatctatatcacacattatatacagttctcaccttctttccgaattcaagtgtgctggccgacctaaaaatagggttccaaaaactgccctaacagacagaccagttcccaactaaaagtccggttccaggacaccaaccggtcaaccggttgctacaggtcccccagaaccggaattccagttttgtgctgggaaaccaaaaaatgctcccatgacctcaaaattaagccaaactttccaaaactctccagtatacctgaacaacatataaccaacattttccaactagtatttcacagaacaaaccaaagaaacttaacttgccattaatgatcaaagctatgtactcaaagcttaaacttgcacaaaactaaaaccaaacatcaaaaccagctgctagaacccttaatcaactcaaactaagtccagaatttgaaccctaagcatcccaaacaataacaaccactaattttcaaaattacaagttcaaacaaaactttaaagcttcaaaacataaaactatggttctagggttacctttaattgctcctccttgaaactctagcttaatttcagagaattaggaaggaataactgatcctttccttggttttgtcttagccgaaagagagagagagagagaaagaaatagaggattttctatttttttgcttttctttgattttacatttaatttccctaagtggaaataaaggttactacattaaccttggctgaagtaaaagcttgctaggtgtcactctaataggcagccaccaaaacatcatttaaccaaatgaccaaatttcccttactcataaaattaaggtatctcaaaagctaggggtaaaatggtcaaattccataaccccgcttaaactcggtattttattttctctaaaatatttcccactaag

SEQ ID NO: 66369 - DNA, 726 bp, Cannabis sativa
attaaaaataaaaatttttgaagttaaaattaatggaagttaataatattgaatgaatcttgaattttttttaaagttataatagacattttgataattatagttcattgaaagaacttaattatttatacatatatataaacttgattcatttctaattgcttatatctcttatagaatattgtgaaattttcactttgagttgcatgtaaagaaaatttttcaaaactaaaatttataaaaactttatttaagatcatttgtgtcgtaaaagaaattaaatggattagcatattatctattaaaaaaaatgttacataaattttactatgattatttaataaataattttgcgaaagactagaaaaataatttttttataaatttatcttttaattgattcataaaatatatatttatttattattcaatttcttattttatatatagtaaaaaattgttataaaaaagtctttattttaaagctcgcccaaggcctccaaatggctagagacggctttggtttaactttcagttacaaataaatatctaaatttaatttttaatagtaataatacctaagttataattttggaacttcctggttaaataaattgccatgtagtaatttttgattggtccaaattattaaatttttattttaaaaaaaataatttaagtataccaataagaaaatgatatgtggatataatggcttaatattta

SEQ ID NO: 66370 - DNA, 826 bp, Cannabis sativa
  modified_base (522)..(525): a, c, t, g, unknown or other
atatatatatctacttcacactttaaaatttttctaactaattttatttattctctcttaaatttttttactttctaattttttatcagcttcataaatatttatctattttcttatatttttttttctaatttatctaaaataattccaaatacatttatttattcttaacttaatttttatttttcttttttattaagtttataaatatagattgattgattaattaattaatttttcaatttttttctcaatatacacgtaaccctaaaaaaaataatactctataactatatactattttttttttctctttctatatgaaggattaaaaaaaaaaacaatatctcaaccacatatataactatctaactcatttttttttttaagataaatatcattttgaattttatattttgtaaaaattattaattgaacattcggttttgttaaatgataaaatgaaccatgtattttttaaaatagcatgaataagaccctaaattaattttttgtcaaaannnnatttaataataatccgatctaaatgtgttatgataaaattgtttacatttttttatttgttaatgctaagaattatcttcaaattgattatattaaaaaaaattgttaaaaaatttaattaaaaaaatattaccaaatgccacctaaattaataacattgtgaactcaaacaaaaacaagatgataatacaaaagtaatatgtctaataaatatattatcacttaagacatggggttatattttatagaaaagattattatattaataggaaacaagaaagaaaagttgagatggccgagt

SEQ ID NO: 66371 - DNA, 1172 bp, Cannabis sativa
atttggctttaccagtagcaacacaacttatctcctaaaaagttcaggtatctacttattgttcatgatgcggagaagattttgaaactcttgacactactacaaaaaggcttatagcgtcatttttcaaatgacatatataataattgtgtcagttcgtgtaaccgacgtatatataagagacgcaaacaattactctattatgttggttcgtaactagcgacattaaatagtactatcagttttaaaccgatgcaatataaataaattacaccatatacgtcggttcataatcgacactcaaccacacaaacaaaaataaaaatatagatttgggcactcaaaccatctcgagcccgaatctctattcaaaataccaaatacgaattaaagtacataaactataaaattgaataaaaattaaatctgcaaaccaatatatatatacacaaaaaatttaattagataaaccaatatacatatacacaaaaatcaaatttgccaataatcaaaataaaagtgaaaaatttatggatctctaaaacttcctagccaccgagagtgagcaacatagttggtgcatctgaagaaaaaaaaatgaaaatcaaagcaaagaagagagagattgacggagagagataaagggaggagatgcttactcgtctttcgtcgttggagaagaacgcaacaattatggctcaatttgcgttgagacggtggaggatgtcatggtcatgcagtgtcgtgttgctcctgcactaatgtgggcagctccaagtgagaggagagagcttgtagtaagtgagagaaagagagagcttgtagtgagagagagagagagagagagctgaagggggcggctattttagttagggttttatgatatatggtatattagggttaggtatgtgtagtgggtcggcccattaattagtatattacatattatttttaagttttatttgcgtcagtttttatctgacgctactttacgtcagtttccgaccggtgtaatatctaattatgtctactttcaactgacgcaaaatagcgtcaaatagcaactgacgcaaaatttagaaccaaaatttttgtgtcggtatttagtgttgactgacatgttgaccgatgcaaaaattcaattttgaaatagtgtgagcatgctttatttt

SEQ ID NO: 66372 - DNA, 675 bp, Cannabis sativa
taaaaaaaatctacaatgctggctattttttttttttttataattgtatatgttttagttatttaaaatattctgtaaaattttaaaaaaatttaataaacttaaaataaaattcaaaaaattggttacacacatttgtttttttgtttgtatatacatgtaaaataaactatttaaacattaaattttattttattttatgtttttttttttgagaaaattaaatcttatttttttaaaacataatgtttacaactttaaattctatggataaattattctaaattttttaaaattttagagaatatttttattaattatttcatataccacaataaaaaaactaaactaaataattcctcaaaataccaaaacaatattactattttaatgaagtgcatcctaaaatcactcaagtatgtgagagaaaatctttcctagttatatggatatatgtatgactaggcattagaaagccgaaatggaagttattttagaaatcttaatgtttaaatgagccagctggctcttctttattggagggccacaaattgaaacgcataaaacgcggaacacctgattccactccccctctaacccacacaaattctgttttccccatttttatatgagttttcatttttttttttagttaaaaatggcgaacaacaacga

SEQ ID NO: 66373 - DNA, 2766 bp, Cannabis sativa
  modified_base (808)..(810): a, c, t, g, unknown or other
aaaaaaaatcgtaatacaaatatactgaggagttagtattgttttgtttattgcaattagattaatattttattatttttctgttgatttgtagttatttttttgttgttttcatattatttgttaagttatttttagattagttttttttattttattaaaacacaatatttttataattttaaaactttaaaatagtattttttgtaaattttgtatagtaaaaatatagaaatcctcgtgttctaatatttttgtaaacttttttttattttttactcttaatacatggcgtgcaaccagggttcgccctgaagctgccttgcctccaaacgcttaaggcttgaaattgtgaagaaaataaaaacaatgcgtattttgtgaatatagtaattaataatatgatataatatagtattttgtatagtggtaaagggtatcatttcaagtaactattattttaatgataaaactatttgtatagagttcaaaatttaattgtttgtctaagtcctatttactttagactttccctccttgactatggtatattatgttcatcacaataaaaagaggtaaacgtatatatgcttacgatgtttcgaggtaatggactcaaatcataatttttctttattagagaaagagcactcacaacacaaccaatgataattaaacacaccttatattattcaaatacgcgtccaagtccaagtcttaactcttaagtcaagtttttgtatatatatatatggaacatcttaatagtattaattattaatgggtactaaataaatttaattataannnttaattttaaaaatattaagccattaaattttgattcgatggtgaataataaaagagaaatttgaatttctacgcttaaattagttatttaattaaaaaaaatataaaaaaaatacatttttttacactatatcaaaaaaataagtttatatgaaaaatatttaagtaaaactcaatattttttattatttttgtgctaattttttttattattattttcttttcagtcgatggaacaacctcagcccatataataaaaatataagagatttttctaattaaatagaaaaattaagcatataaaaactcaatttttttattattactcattcatgggtaatatctattaaaattacacctatatatatgcaatacaagccacgagaaatgtccaaaaactaagataattaacttatgtttataaatgagaaatgctaaaagtcacttgtaattagtacttttataataatttttatagaatattaactaattacaaggcaccacctacactatttctacttattaaaaatgttctttataaatagctagatcaaatgattcatgaatacctccttaattatcaaaaaaaagaaagaaagaaattcatgaatacccttttaaattccttttattaattagtcatttttgacttcatttttgactgagacaaattgctttctcatcaagtcatctactttctcctcaagaaatcttcagcttataagtagagccgaataggcgggcaaaattattattcatcagaaaacttgatcatctcatctcatctcatctcatcttatatattagatcttataagaagcattattatttaatcactttaatttctggttggagctggagcttgttgcgagagattaattattaataatgggcgatcatcatcatagtagtagtaaccttaaaaataagaaagacaaggaaagcagccacagtagttcaaattcaaagttcaagtcctttgtgtcgtttttctttgaaacgacaactgaaaatacgaagagtagccgagaagaggtatcagcaccggaggtcaccttgattcatgccgcagcaaaacacttctcctcaaaagtgcgttataattaaatactacctcagtggtatcaatcatcaatgctacttattttacttaacttcatcttatttatttttccaattaatgatgactagtttatgatgtcgccccaaaactctgctcatctagtaatgaaattgtattaaattttagccataatattttttttatttttttttttaaataatagaataagttttctttatttaaaaagtccttttatatttttagtataagatatcatgttgggaaagcacattatttacatcaccaatcacacatactaaggagagactagactgcttgctatcgcaagtatacaaaattgatcccaagacttagaatgtaagctcctcttccactcaccataaaagctatagtcaaaccccaagaagaagaactagacaagataacttcaatatcaacataattataagcaaaattaagaagattaattaacatcatttttattttgcgaaagagtaacaccaccactcctaccacaagcctcaactgcgattatactatcaaaacccaaaaacgcacacacccttttaaccacatccttacaacaaagaatttcgcaaagaaaacaaaatcaagtttcttttggatcactagatcctgaaggaattgaataacctgtagcttcacaagcccacgatgaatccagcttaaaatactcataatgtccaatgggcctaaaaaccaaaaccaagacccacgtctagcccatgttttgagagaccaacaacattcaaaccaaactccactatagcattcacatctgtctctaggggtgttcatctgatccaatccgcatttttttggtcaaacaacatccaatccgcactaagtgc

SEQ ID NO: 66374 - DNA, 1315 bp, Cannabis sativa
caacaggaatagtatgagacacaactctccacataaagtgtttaatttttggaggggcttgagaatgccaaattttattccaaaacttcctagaagtcacatcagatgatgaggatcggatatcctgagtagagagagccaaatgataagcaaacttgatagtgaaaagacgagaactttctctagaccaaataatatcatctttgccagaaaaaccagtaattgggacttcaaggatatcctgaatatcagactcataaaaatgattcctaagcttactagaatcccaatacccagaatctgaaatgaaaaaagaaagcttaggtgaaggaggcaaaataccatctttataacaaagatatttattgttggggatccaatgatcatcaatggttaaaatattttccccatccccaatcttccaaattaaacccgaagccatcaaatctcttccccaaaggatgctcctccaagcaaaagaagggttatgacctgggacaacttccaatatagaaggatttgggaaatatctagctttaagcacacgacacaacaaagagttaggttgttttaaaattttccaagcctgcttcgcaagcatagcctgattaaaatgaattaaagaacgaaaacctaacccccctacacttttagactgacaaagctttttccaagatttccaatgtattttattattattaccagaagatccccaccagaatctagccatcgcagcttcaattcctttacacaatttaacaggaagcctgaaacaagccatagcataagttggaattgcttgaataacagccttaaggaggatctctttaccagccttggaaaaccatttacctgaccaactaggaagtacagacagaactctatccttaaggaaggcaaaggaatgatatttagacctagcaagacattggggcaaacctaagtacttactaataaaaggcctatcctctagatcaaaagtagcaaagaaaaggcttctaatgtcctggggagtactaggagagaataatatggaagatttagcaaaattaataacctacctggaagctatagaataaagatgaaaaatattcctaagagagctacaagaatccctatcagtagaacaaaaaataaggctatcatcagcaaatagaagatgggaaatagaaggagccctcctagaaatagatatccccttaagagaaccagaacattgatgagcacatagaagggaagatagcccttcagcacaaagaagaaagagatatggagataaaggatccccctgccttattgttggaatttattttac

SEQ ID NO: 66375 - DNA, 1177 bp, Cannabis sativa
gactgcttatgtgtacacttttatctaggtgtcacatttatatcggtacacctaatattattatttaaaaaatataaaattatttcaaaatctttaatatattttttattttttaaatattttattttttattattatagtatttattctaaaataataatattagatgtaccaatataaacttgttttgtgtacaagagtatacacataaagagtccataatgacagttaaccagacgatgccttaaattttcaactgtttagtaatttggaaggttttactgtcgaaatttaaacttggaaatttaaatgcaagtgaaacaacagttgaaaaagtttgaccacaacaaattcttttttgtttttattgtttttatgtttcttttgaaattatctcaaaatgttttcctttgttcatcttgttttatttaataaaaattgaatggttttggtttgggtctaaaattatgtgggcctgattgaagtcaccaatcagtgatggacttaaaatttgacgtgggcttaacttggaagtccaatcagtggtggacttaaaataggaacttttataaaaatactagacttttatcgaaaatttacaattttactgtcacacaattttttttacaaaaataatatttttataaaataatcgtaaaaaaaaacaatcaaaacaacagtggaataactaaaaaaaactgtgaaaatataatacaatacacagtataaaaaatttatatacacagtatttttaaaaacatttccgtctcacagtaaaaaaaaattaaaaaattaaaaatttcatgttaacattatggtgtaaaaacccgttaaaataattggctttaagacaatattggcccatatgtatgaccttactctgccaccagatggggtcatggccgaggttgagaaacgctcacatctgttatggtggtctcacatgaccaggctgtttccaaccatgaaagtcgatgacttttccactgattctgccattgaagaaaacaaaatggaattggaatgagaaatttgtgatgctacacttggggctgtttgacttcaacacttaattttttttttcaatttttaaaaactaattagattgaaaaattaaacttaagaactaaaattcacttgagtaatagtgcaactatatataatatttatacatatt

SEQ ID NO: 66376 - DNA, 745 bp, Cannabis sativa
aatcccctatccccttacctattcttattggtggctgaaagcctctcggcaatcatccatctcaaatctcttgatcaataattctatgggatttccatctgtcgctcggccccatccatctcccatcttctttttgctgatgatagcctgttattcacacatgtcaataatgtcaacagcaatgctatcaaggatatccttgctacttacaatcaggctactggccaaactgtcaacttcgcaaaatcctccatccttttctcacccaacaccaactctactgataaacaaaatttcctaacctccctgcaaatgagtgataagcctttcattgacaaatacttgggggttccccagtgcctttccagatctaagaaatcatcctttctcttccttctccaaaaggccggcagtaaattatcagcctggaactaacatcttttctctaaggctggtaaagaaatcctcctcaaagcggtgatccaagctatcccctcgtataccatgtcatgttttaggcttcctctttcaatttgtaggcagtttagtaggattatggccaactactggtgagaatcttcaggtactcataagattcactggaaaaaatggacccacatttgcagttccaaattctttgggggtctcgggttcagggacatcatacaccacaatcaagccatgcttgctaagtaagcttggcacatcttctccaacccctactccttagtctcttccctcctga

SEQ ID NO: 66377 - DNA, 808 bp, Cannabis sativa
  modified_base (253)..(257): a, c, t, g, unknown or other
  modified_base (315)..(325): a, c, t, g, unknown or other
cgggtatttagaatctttattattgcaggacaacaggtaagacagtgattagcgcctagagtatgcacagtggtgcttatattgaaaatgatatgtatgattgtttagtaaccgggattagggttattaccctaatctgagcggttgatggcctaggcttattaccctagtgatatatgtgtataaataccatgccatgttaaaggtaatgagatttagggattatgcactcaaggcataatcaggttggacnnnnnaaccataaccgagatgaaccattcaaaggccttattgtatttagacgtgtgagagcannnnnnnnnnntacgccacgtagacataaatagatgtgtgagctcaatacatagatctactccacgtagacataaataggcatgtgagtgtaacatgcaggcctgtgacacacaaacatatatgaatgacattattgtttaaatagtataatgagcatattaatattgttatgttatatactgccttgctgggcttggctcatgggtgctctactgtgcaagaaagggtaaggcattagctgatcaaccatgagtttaggagctgggcaaagaatgtacgtgtccgagccatatcagaccaagcgagttaagggtctaccagcgatgtattttgaaactctattttgccgcgtaggccggctaaaagaaaaagagttgtaataaagtttgtaaatatattttgggatcccaaatgttaaaaagtttaaattattacaagttttatttccattccttttattacaaaagtttaaattatgtgctattttgattag

SEQ ID NO: 66378 - DNA, 598 bp, Cannabis sativa
tacgctcaatactcatatgtcactaactcccgtacctatgctcgatacgtcaccaggtatatcgagtcacctaatcaggcgagctcgtatattatgttcataatatcatcacattatcattgtctaattagataatcgataatttcaaaacttattgtgccatgtggtacattatacttttcttacctcaagttctggttcaagtatgttggccaactttcttggagaacgatcgatgatcctgggccctatgtgataaaaatgataaaccaataagtgtttatctcaaaacactacttagcaattgcaaagaacaacctaggatttcataccaaatctcgtaattcaaatacactaaataaaacttatattttggctctaaaacatataccatatggtagagctcgtcgcaatctttaaaatgttatatagaacatccaaaatggacaccacagtgaaaagttatggcaaaaatacaattcctaaattctcgagactgccaaaaaacgacaaaccggttcacaaccgattaaccgtttctagtagaaccggttgaccagttcacaaccaaatgaccgattgggcaaggtggtaaaac

SEQ ID NO: 66379 - DNA, 748 bp, Cannabis sativa
tggtaaaataatttccaatactagcacctttgacctgggctgtgtcacctgcgcgagaagatggagagaagaagaaagattgataatttgtttttttagtttattttttaactttttattattttataatatattttttagttttatcgctcaaaaaaatatataattttttaaattttatatattttttataattgtaagtaatttgtaaagattaaaataattaaattatatggactaataaaaacatgtcacgtgtacataaatgtacaagcaatccaacttggcattttagttggcatttaacattgaaatttaactgatacattgaatttgcaaacagaagctaagttaagggagttttgccataaaaaaaaaaacagggagttaagtatatgataattgaaacttaaaagagtttggccgcaaatttctctaaaaaaaatattgtacttgttaatggacttttgaatatttttccaataataagcgatagaagcttttaactttcatttggtatcagtattcttttttcttagaaaagaaaataaaaaagaaagatttaatctactacataaaattacatattatataatgttgaccttcaaaaatcatataaataatttgttaaaaaaatgtcagtatagtgtagagacaaaattaacgtcattactataaaattattctatatatatatgatagtatatatataaaagtagggatatgattttgtcccgtgatgtacttt

SEQ ID NO: 66380 - DNA, 826 bp, Cannabis sativa
atgctcaatttgtagaccaagacaggattttgtttttcctaaatctttcatttcgaactctttctttagatattccacagcttctaaaagttttttaagagtttcaataatattcaaatcatcaacataaacaacaattataacaaactcaaacttgaactttttataaaaatacatgggcaaataagatcatttttgtatcgttcctttaatgatgaaactgtgggatcccaatgttaatttcaagaaggaagatgtaaaatgtgtcccaatttggatccaacttgaagagttagatctgaaatattggggggaaagattattgttcaagaatgtgggacaaataggtaacccggttatggtgaattcgctgacaaaggagagagatggactgacttgtcctagaatcctaattgaggttacgatggaccaacagtttccaggtttcattgattttgagaatgaacatgggtttaatgttcaggtgggagtaaaatatgaatggaaacctgtgagttgtaatcattgctcgggcttaggccatacaacagaggaatgtaggaagaataccaagggaaagcaggaatgggttgtgaaggaagacaaaaggcagaaacagaatattatagatgaagatggttttatggaggtgacaaaagggtacaaagctacagataaaactactaccacagaaactttaaaggttgatgatgcatttcagattctaaagcaagaagggcagcaagatagtgaatcgggaatgctagggaaccagccaaatgagagcaatacaagagcggggaggaccctctctttctaatggata

SEQ ID NO: 66381 - DNA, 762 bp, Cannabis sativa
aattatacatttttactaattttaatgaataaatttttgataaaaaaaattataaataaatgtgtgataattctttcatttaaattcttattagatttaaaatatctaaataaaatcaaaatttaaaaaatgataaaaaaaatctcacctgtatgggattatttatctcacactgctagatgggataaataatcccaatcaaatgagattagctggattagttattcagacttctaacgttccaaacactggattggataaattagtttgtctaatccaatccagtcctgtgtaccaaacgggcccaaatataaatgacactacaaattaaagaaatgaatttattagacactattttattggtatgaggccttcaaagaaagtgcataaaaacaaaattgtgaccgcttaggtcaaattgaggtagcggcacaacaaaagtggaagagtgcagcccaacaagtggtatcagagctaaaagtttcttatgatgcccaacaccacaagcacatcgtaattgttagcaattcaatttgtgtaagacctgatatttgaaatgcaccaataacaatacgtcacattttatggtgtcccttagcatttctcttattttctactaaattagtgattgtctctaattaatcttgtgctaattgttttctgcaaaagcacaatcacaataaataaataattggcttaattaatcatattcaactttcatgatatatattttaaatttaattagcatcattataaatgata

SEQ ID NO: 66382 - DNA, 1864 bp, Cannabis sativa
tactaagtagggttgggttgtacatttaaaaaatttgaatgatttatagcgtatccaaaccgcaataattgagttagcctattaaaacacctttaacctagccaactaagcgcatgtgcacccctagttactaataggtaaatattccttttatagaattaaattaattataattaactatatacttaaaaaaattaaaattaataaatttaatagactttttttagtaattaatatttataaatgattttatttttacctaaattcccattgtaatttttttaatattcaaaccatttgattataatatttgcaataaaatctcattttttttttttttttgcaaaaagtagacttctacctcttctaaaataaatttgttaagcggtaattaactatttggtaccctgtatttttttaaaatacaaacttaataccttatgtttttaataatgatcactcggtaccctttatttataattcctacacatttggtaccatcgttttgaatttcgtagacttaaatttctagtatgactaaattactcctcatttaaataattcgtataattttaaatatttttagttattatatgatttaataaatataaaaccaaataaaattctatttgattcaacttccacttttgtccatctaaaaaaaactttcatttatatattctttgttccttccagttcagatatacaatagtcaggccaatactaatatattttatataaataaatacaggacttgaaatcaaacaaagagaacactgaacatatatcatctaaattatcacatgtcacctctttatatataaatatattagctccaaaccataaagctactatgtagtatctattatgctacgaacacaatacgtgaacaaaaaaaaaacaaaaaaaaaagaccaaaaccttcaaatttagacatgaaaaatatgacttaacagagataaaaaaaaaaaaggaatcgtataggatttttttcaaaaataaaatatattaactcatattatattaaaattaatattaaaaagaggggtaatctactcatacttgaaaattaggtccaccaaagtcaaagatagggtactaagtgtgtagaatttgtaaataaagggcaccaagtagttaattttagaaacataaggtactaaacttgtatcttgataaaacacaaggtactaaatatatgtttattgtttgtaaataaataaattaaaaatattaaaataaggtcctccaccgttccatctagccaccggcgagaacaccctgatctgtcacgccaccatatcgacatggtcggtttcgcagcgacgttttcagtcaaagaatagcgagtggaaattaacaaggtcctcttcctgttgcataacttgtgttttggatccttgattcggagtctgaggttggtcctacgctcaatcctaattagagtccagatcttttacgggcttctcgacgaagtcaaaaaacaacgaatcactcaaggtctctctttcctttcccaaggtatttgattccatgtgagcatcatatcagcaaacagtaccttattagcattgtttttgcactatttttttaatgggttggatgctttttatggtctttgtgtcatctttatggcttgcccctaattatttaaggtagatttatagtttggtcaatgggtaagagaaatatttcatatttggtattcgtggcttttgcaaacgacttttgagatttgacagataagtgtttcaagttttttgatattattatatgaattgttttacaatctttattcacattacatatttttcattaaattatgtattaatagagttttattattattttgtaggtcaatttt

SEQ ID NO: 66383 - DNA, 645 bp, Cannabis sativa
aacagtggaacaactaaaaaacagccatagaacaatagtgaaaaattaacacagtacgcaacatttttgaaaaaaatttcatcccacagtaaaaaagtaaaaaaaattaaaaatttatgtatgtagtgtaaaaactctaaaattcaaaatacaagcattacactattctctctttcaaagcaaaagatgattagaacccaatcattatatgattactcttactttttctgtctacaatttttatgcgactgttttcttcaattttcaacactttaaaatttttttttctttcttctattttcaaattttcacaaaatggttgttttctttatgattcaaatatttttttttttaaaaaaaaataataatatacgaataatttacaattacattattatgaaatcttcaaccatcggaaaattaaatcaatatcactaacatattgcattcagcatttacttttagattataacactattatttttgtgtattgaatatacattaaaataactctacaaaatagttaatattaattattcttgtcttaattactttatattaaaaaacttcaattagaccttaataataactaaaattataaatgattatttgtatcatattaaattatatagcatctaacattaa

SEQ ID NO: 66384 - DNA, 858 bp, Cannabis sativa
acctctaaacggcataaatttacatcaagaagtcgagcttctgtgttcattggatatccccaaggcatgaaagcctacatacttcttgacattgaaacaaaacaagtttacatatcacgggatgttgttttctatgaaacaattttccccctctcatgtacaacctctccttgtgaaatcaacacactatttcctgatattgtacttcctacaaataaatcagtacaacaggctgttcaaatctctcagcctacgactatacctgcaccatcatctagtgccaacaaaccatctgatgcacctaaaccagctgctgcaaatcagcatgctggtgcaaaaaaaccagtcgatactgctacaaaaattggtgcatttcaccacaaaatattgcatcctgtcccagcatccacacccgcacctcaaactggtgcacaacaacaacctggtgcacatccacttgttgcaccagcaccacaatctggtgcaaatcaacatgttgcatcaagcaacttcaatgacattacacaacttgctgatccaggcaccaagagtctcaacccacctgcctatataccagcaatcccatcacactgctcaccagttcctggtattaaaaataccacagaacatgcaaccgtgtcaatcaacaatcccacaacagcctctcatatatctgaaagtgcatctggttttcctacacctttgccttcagtatcctccccaaaaaattcagttcctcactccatcacaagagttggccgaactgtcacaaaaccaaaaaaattgacagattacatctgtcatgcctcatctacagctcatccaattgagccttttctctcatacatcaaattacat

SEQ ID NO: 66385 - DNA, 996 bp, Cannabis sativa
tacatcttcagcggatgtcagctctttcttcttttcaaattcatctgtctcgtccacccgtccataaaaaatagctgtatctgcagatatgcagcaaccagatgtagtttccacaaccagtgaaattccataacctggtgagctgttatagataaaatgtctgtataagaacatagtgcaaacagtgaataccaacttaaacaatacttctatatgagatatatctccatttcttctttcaatactcatacacctaagactgcaaacattcataacatagatatacttacctttatctttatataactattgctaatgtccacagaagaaaactcaccaaagcagtaaaataagaagttgaattaaaatttacaatatctttattgcttctttagggacaaatatgttgtccatgcatgtgtgggtttatacaaacacaaaacaaaggtaataggacaaatttatctatgtaggtttaaacaatagacctccataacaaaatacataagagctatatcattatatggtaagtaatgcctgaaagcttactttccagcttgtgaaccagatttaagatcagtagctatataaacatctgcaagcaaacaattaaagattctgcgagctgaataacatcatagaatgttgaaattgagaagacaatctatcccctaattcttttaaccatgccttcatcagcccgtgtaattgcctgaacatcaaaacatacaagatgcatatgaaacagagaatgtagagttctacacaccattatttagactacctgtgctgttgttgcaagacctgttaaactatgatgaaaaggcagagagagggaaaaaacacaaaataacagtcaaatttccatgagggtttcaagctatgttgatatattgatagcttcaatctatgacttgtgattttctacatttcgtgggaaaaaaaaaagcagtgagagatgaataaatttttttgtgttaataaacttaaaaatgg

SEQ ID NO: 66386 - DNA, 693 bp, Cannabis sativa
gaagacaattctaaataaatcgtgcgtgttctttctcatccatggttaactagtttagtctttggtttcaagtcctttacgcaaaaggttggagtattcttatcttatagtttaataaaatttagtaattatcctgtagcccgacgtaaattattgaggtcgaccaaaatcttcttattagcaagtttccaagagaaatttttttaatttaatgtttttattgagctcgacaaaaaacttctgatgagctagtttgggggggccaaattaatgttttttggagctacgtaaaagacaaatacagatgttggaaatttcaaattggcaccctcacatagcttagtcattgtttctaactatcctcctcactgcccatcagtaacacgtatagatttattgctggtaggaatttattaaaaatattaaatttagtgcctcagttaaatttattaaaggttgacagatcaactaatttagtttatattaaatatgttaattatttttgttgactttattagaggtttaatttttttataaataaaaaaataattaatgtgtcaaattttgattaatctaacacagtatgagacactactttttaataggagatcttaattcgtaaaaaagtattagacaccattaaattaatgcacactactacaatctaagcctttagcttcccttttttcaatc

SEQ ID NO: 66387 - DNA, 1608 bp, Cannabis sativa
gcaccctcaaatatgctttttgcctaatgacccggttagagagtatttcgcaaaggagagacctttgcgcgacgcgtgtcctggattgtacaaaagtcctcacaagcagctgtataccacatgatgaagaaggttcttactagccaatggtcatatcgccctttagtagtactgaccttaatagcgtgtggggtacaaaaccctaggtgggtaaagggtatgccctttaccccatgcgtgcctataaatagtcctatttttcttcaagaaatgagagaacaattttacttatagacactctgcaaaaatcccaagaaagctctctcgagcgtaccaaagtagtctttattgttatccccttgtaatctcaaaaaacattcgcccaaagaggccaatacaatggactcgtggactaaggataattaacacctaaaccacctaaaaatctgtttgtttattgttcattatttcttatttctttaagctctaaatatatttggtttctaagaacctcggtaaacattttggtgctttcattgagagctaaagaaagtctagtagcgttcgtcgtccttcaatcatggtaaaaacatgaaagactactggtaaaggaactccattagaaacgatcgaggaggaagtcacctttcatgcagctaacgcgcgggtggaaaacgatagagaaggcacaactgctattgagaatcaaggaaggaacaccgagaatgttgcagagggtcacggtgatggccaaaatagagatgattatgaagaggacaatgatgatttctattataaagatggttgttattatgagcatgaccctagtctagtgcgtgtaaccgcagagttggaagccacataggcaaccctagaagagcaacaaaggcttattgcctagatgaaagaaacgatggtgcaacttcagagcaagtttgatggcttggtagggacggatggagaaccatctgtggaagcagtgactgagcggcgagcccgtaagaaaattgaagctgggacttccaaccctcgcatggacaagggtaagggaaaagtgggtgaacctccacaaaaagcttctcctaaacctcatcaaaaagatgcgcctccggtcggacaaccctcgaggatgtagaaggccaccgatgcttttgagcctggacgtccttctgacccttgaaatagggttgcaccgaaaggaccaactgcgaaagtccctaggcctagaagacgagtagatcctcccaatgattctgtcaaccaagatgggaggatccatgccagtcattctggagacagttggtccacagctgatctgccgcaacggttggacgctaaatacgagaggtacaagagcgagaaggctaggccacgtgggggtgacctaaggaataatctaagtgacaagatgaggggacgtgatcactcggaaagtgataccaagaggttggaagaacaaatggtagccctgactaagttggttaaaaagcaaagtggagcattgtcagattttgaggatgaggacccagagccctgtgtcaggagaatcacggagactatactcccaaaaaacattaagatgcgccacatcgaattatatgaggggag

SEQ ID NO: 66388 - DNA, 623 bp, Cannabis sativa
tcttttctaagaaaaaatatattgtttttgagtagatcaaaactcatatttcacttaatataagggtgaatgcatatgttgcgaaaaatgaattcttttatttaaataaatccaattagcaatttagaccaaaaactttaatttttttttttgacaaaatgatctgaattgcactaactttaacgtatttctaccctaagcaatcactaacatgtttgtcttctttcgaataattgtttttactatatttggtatatggataatcataaaaatctaagatatggtatttataattgaaaattacttagacctactcttttttctgaataaaatctaaaatttagcatttctaaaaatataatggacattttttaagaaattttcgcaatggaaatgatcattcgaaagattctatattttgtaaaatgaaaaccctagccaaatttcattcaaacttttttagggttaagatcgtatcaaaaattgggtcacaaccattgtgtagaagagaatattttagagtcatggaagaatcgaaaagtttgtccaaaattaaactcaccacaaagactaacaaagactaacaagtaatcttactaaaaaaaaaaacacagaattcaaaa

SEQ ID NO: 66389 - DNA, 956 bp, Cannabis sativa
gttaaataaatgtgtctcttatccaccttttaagggcccttacacactactctcaactgcacaatcttcctcacttccaaactcaaattactaggaaccatacaactataatcaaacacacatttatttctgttcttccacaaaaaataaaaaacagcagccatgacagcatttagaatacgctgagtcagatccttggttgcattactgcaatactgaagcatctcaacagtcgaacgaggccaatgaaagtccccaaccacctgttgacagcttcaaaaacctgagaagtgtaatagcagttgaagaaaatatgatcatgagtttccacttcagcttcacaaacgggacaaagattgtttggggtaaccattatgtgatgaagataatcccgagtaagcaaatgagagttagcaatctgccagaaaataaatctgtgttttgggagcacaagagtatcccaaatagcattagcataagcaaaaggagtctctcccactagagaattatagcactttttggcgctgaatttatctcccctagcagcttgttgaagtttggcttcatccaagttctctcttatactcaaaatcttcttgaagtaccaacttgcatcgtctttctttgcatagtcccatatgctttggtcttttaaatagattgagttaatccatttaacccataagcaatcctccttcttcgaaagagcccacaagtacttagccaacaaagctttgttccattttttccctcccgaaaaccaactcctccaagctttttaggaaggcacaccttttcccaagaagctcggtggagtttgctcttaatcccggatcttccccaaagaaagtcacgacaacttttgtctatggctgctgtgattttggacgggatgatgaaaatgctcatccaatagtttctaattccaagcaacaccgagtgaatcaactgcgccc

SEQ ID NO: 66390 - DNA, 843 bp, Cannabis sativa
aggaatgagcaagtactacatatagtatggatggatgtgatgttaatgaaactattgaagaacgagtcgaggtcccaagtccagaatttgagacgcttgttgatgacaaagccctgttagtttcaatgattcctcgctcgacacaaaaaattaaagatgaaggcagttcacatttgacttcaaaacattttaattgaacacttgtggaataaatttactaattctaaaaataaatatagtttagttaatatttaatgtgtgtgttatattttaactgaatgttatgcttttttctcttcaataattgtaatatttatttacaaatctactatgctattttaatttattgtgttttagtttaataatctataccaatattatgaagtaattaatagttacacttgcattaaaaaatattaacccattcaaaaaaaaaaaaaaactagatataataattgcgttactcaaataaaatagtattctattacacacaaaaaaaaaaacatactttttggttggtgaaatttttgattttgtgtttaaaataataataataataattattattatactaaaatttaacatatttggtgttattaaatgtgctcaaacatatttggggtttttacactacctattgaaatttataacttttttacatttttattgtggggtgaatttttttaaaaaaatattgtatttttttcaacaatactatgtaaattttatagtttttacttttattccacggttattttagatattttactgttgttttaattgtttttttttttttttgttttacggttattttataaaaagataatatttttataaaaaatt

SEQ ID NO: 66391 - DNA, 500 bp, Cannabis sativa
tactacattttttctaacataaagacccaaatttttttttctccctatgacccactttgtttcagggccggccctgcacttagtacccaatataagttattattagtatattttatataaacattgttattaggtatcagtagtacattaactaaaagtggtaacattaactaaaagtggtgctttattattaattagtaatattttttaaaaattattaatatgagatccaatatttaattacatatatacatacaactgtaatatcttttaacactttttattttatatataaggacttttatgttttaaaaataaataaatttattaataataagaagatgatgaagaagaagacttattcaacattgaccactatacacagtctataaattcaacttgcgtagccttcaatattattctctctcgtacacaaacacaacacatgaacacaacacggtcctctattttaatacgtttcttaatcaataattaattaa

SEQ ID NO: 66392 - DNA, 2133 bp, Cannabis sativa
tttttttttttttgaatgaaagaagggtgctgactgtttaggatggaagaaggaagaagatagagaaaaatccattaatcaaaaaccccccattaaaatgcacttacttttatgaatggtttttaaatataggcccaatctccaacttggaccgtcgaaattggatttcgtaatcaattttttataaaaaaaaaaaaaaaattaatgaattatcaatgacaacatttctaatgaaaaccgccgagattggtatctatctcgacgattgcatacggtaccgtcgagattggagtgcgagatagcctaatattttagtagtgatataattattaaatagctagatttaacatttatagaattagaattaaaagatggcatttgtgaaaagagaaagataaatttgaaataaaatagcaaacttaaaatcctgtaaggcccactagggttcggccattaggattaattaagagaaatttacaccacatattgttttttcttattttatttcaattttactgttttaatagaaatattacatttttttagttttttttttctttactatatatgtgtactgttttttatttttttttacatttttttttttttgagaaaaagtctgttattataaatcacaaagagttgtttacaacaacagagaagatggtagaaggaatctcccctaaccacatacaatcattatccagctgtaatgcttgtttggccaaattatgagcggcttggttagcgtctctcttaacatgagaaacacaaacattagagaaagaggataaatgaaaagttacatcagaaaccaaaccaaagaaactcgaattatgtgaaatacatccattcaaagcattaacaagcattaggcaatcagtttccacatagtcaataggaatttgatattgcttagcccacgagagaccaacaaacattgcttttgcctccatttcctgtgacttaaaattacccactgctggtttagacattgctcccacaacttggccagccgaatttcgaacaatcacaccaattccaattttactcctcgaagaatccaaagctgcatccacatttaacttgtaattgttctctggaggaggctgccatttagcagttggaattggactggtgcgaagaccacctactggtgtggaagtagctggttatgcagcataattagcactctgaaattgctgtaaatatgcagctgattgtgtcaccatttggatagatgtcttaacctttttaccatggatgtagctgtttcggttagaccagataaaccacatcaggcagagtatacattccaggtcttgtttgctatagattgtggacaaatgcataagataatcaccatcgctcatgtgatctgcattcgagaaatcaataataaaaccagaaagtgtccaaacatctttagcatgacagcaagaaaatagagcatgccctattgattcccatgcccttgaacacagagaacaagttgcagaagttaagatttttttatgatagagagattttgcaactggtatggaagattggatgacttttcaaccaaaaatcttaactttagatggcagatttaaaccccaaaaagacttccaccatgtctcctgcgtgtgtgaacaggaagatatatcatcttcttctaatgaacttgcaaagttgtaaccagtgctaactgaataatctcctgaaacatcatagtgccaaatccatctatcattagttggaaggaaggacaatggaattgtaagaatatgttccacatcatgtggagaaaaatgagtgttcaataactccaagttccattccctattagatgaaatgtaatctgcaacaacgtttgaatgatcaccagtgtagcaataaggcttaaaactcttgtgacctggtatccatgagtcatcaacacagctaatactactaccagtacccactttcagccttaaacctttagcgagcaattccctaccccatacaataccctgccaagtgatagaactcagacccccacccgtagctgtcataaaatcagagcgagaaaaataacgacctttcaaaacacgctgagtaaactatcaggattttggaaaatccgccaagcttgctttgccaataaag

SEQ ID NO: 66393 - DNA, 1278 bp, Cannabis sativa
gcatatcgctcctgtgatttcctggaatctcctgcgatgtgaggtccgccgatgatggtcaatatattgtgaggagttcttgaaccactctcattgttattttcttctttgtcatctgcttggggatgactctcctcgttctttttatatttgttgaatttccctcgtctgattaattcttctatctcatcctgtaaaaaccaacattccagagtagtatgaccaatatccttgtgatacttacagaattttttcgggtctctcttgttgcggtttcccctgattgggggaggctttttgaagactctgttcttttcttcaattgcatagatatggtcccgaggaaccgccaattccgtctaattcacgaaacgtggacctcctttcctcttgggagatgactccttcttcggaggggatttggccaacttcaaacttcgctgtctttgtagactgcgccttctagggctcctcccattggaactttttcctctaggactgcgggatcgtgatcgcggtaccggcgactcgcgtttatcctttcctttctctagttcggctagagaattctcaatcctcttatgcggttctgccatagcgaaaaactcgaccaacgattcaggtcttcaggcctgcagctccttccaaaaatcagttcttggcaggacacctgttatcaacatacatactagtgaagactcgggggccttctctacttttgttacttcagcattaaatcatttaaaataatcttgaagacactcaccgacctcttgtttaatgttagccagagtggtatagggtggcctataggtcatcatggcttgaaagtgcatgagaaagaggtcgacaaaagtctcccatgttgatatagatacttcaggcaattggctttaccaatcgtgagcattatcctctagggttgctgcaagaatgcgacacttcgcaagctggggtacctggtccacttccataatagtattaaatttttctaaatagtctataggattagttgtacctttatatttcagagacttggacaatcaaaatcccttaggtaatcgagcttgtcgcacttccgtagtaaaatgagaagtcccatgcagcttgtatatgggctttctctgctgctcaattatcttcaaagtttgtaaaagcataccctgatcaatacctcttgctagggtagtattgccttgagccgtcgcaggtgtcgttactactgcggcgatatttgctgggatattaactccggtagtcgcagctggtgcggtaggc

SEQ ID NO: 66394 - DNA, 691 bp, Cannabis sativa
tggcttgtttgattaatagaaagattattattcttgatcaaaaaaaaaaagaagatttctattttcaaaaaaagaaaaaaaacaaagaagatttttggagaatatgtttgatatatagtttggtctacacgacacgtcgaagaagaattaaagtcaagttttataattgagacaatttcatgagaagaacgaggaagattatatttgcttttatctcatcattttcttgttttgttttaccaacttaattatctttaatttagtaataatgatataaaagataccataatcttcacgaaacattaacataaatgatagacaaaccgtacagacacatggcattgctgctgtctacctttgttttgtttaacattaggtgtaccatatttaacgactaaattttcagtccaaattttgtggaagcatttgcttgaaacttaattcaaacatgtttttcagcaaaaaataaataaataaataaataaataaagaaaacaaacatgtaaaatgtctttaaatttatctgcatagatgtatgttttgatcataaacagaaaagaaaattatatttcaaagaaaggccaaaacatagtcttaaagaaactaggataaaataaaggaatttttacaaaaatattgaatttcagacaaaaaatttataattttgttgccacacataaatttttataaa

SEQ ID NO: 66395 - DNA, 743 bp, Cannabis sativa
ctttagtgccttggctctctctttttttagtaaccttcttttctgtttgactggcttgaagttttcgacgtcgatgtttaatgcatgacttatcctagtgaggcttattccttacatgtcttcgtgtgaccatgcgaagacatcttggttttcccttaagaactggatcaaagcggatcttatgtccttaggaagctcttttccaattttgactaatttggatagttgtttgggctctaatggtacttcttccaattctttaattggaccaacccctgtatcaacatccctaatacggggatcaatgtcttcaaccccgttttgggcgagtcctcattgcttaaaactacttgttgtagctttgagggatttggctactttctcactgattatgatggataggttgtaacactctcgtgctactatttgattgcccttcaagtagccaattccacccttggtagggaatttgacgaggaggtgaaagatgtaggtgactgctttcaggtcatacagggccggacgaccaattaaggcattgtagggtgatactatatccaataccacgaataacgccatgacagtgacactcttgggggatgttcccaccgtcaacggtagcttaataagcccagttgaggttataccatttcctatgaatccatagatgagatgttcacagggttccaaatcctttgctcccaaaccaattctttccaatgaagacttgaagaggatattag

SEQ ID NO: 66396 - DNA, 981 bp, Cannabis sativa
  modified_base (40)..(59): a, c, t, g, unknown or other
ttatactaatcttacctcaggtgtgccggtcaacctgagnnnnnnnnnnnnnnnnnnnnggaggccctaagtcacattaacgtaaaactggtaagtgtctcgttaaaaaactttcgggacttgaactcataatctgaactttttttatcaataaatagtgtgacaataccttaaatatcgagaaaacataaaaattagggtacccaaaaattaccccaaacgagtaacaggatccctaaataggcaactgtttacccagggtctgcctgaattaatggttaactgtttcttcagaaacgatgtgcagatttcaccaactcgatcttatcttcctcatttctaccccaaacttactcaaacttttcagaacaccctataatcatgttctaaacatatttcaaagcttaaatgcatcaataaaccttagaattaaaatctaccatgttgagctaagtttgagttcttaaactcaaactcacccaactcaaactacattatctatttcttttttaaaaatagctacaaacaatttcaaaccaaccccaaaacaatttctaattcacatacacacagaactaaatttactaaaacacacataaagcccaaacttttcttacaaatttcaaagagaagagtataacttaggacttattttgatcttgattctaataaccttttgaattgcaagctaaagttcttgttgaattgtaaaattgctcatgatttcttctagggccgaaggtgagaaattagtagagagaaaatgacttaattttagttatgtttatcttatcctacattaattaaaataatccatttcagcatataaataaaaacccatcttctaataaattcactaatggtttctaaaataagcttagatagaaaagacaataatatccttatttcacttttaagtaatctgctaagaggtaaaatggtcacaaccaaatatcccgcataactccgatattctaatta

SEQ ID NO: 66397 - DNA, 1473 bp, Cannabis sativa
tgagtggaacaactgctcgacgataagtgacacgctaaatcactttttggggacttaaaattgaaattaaaagtttctttgtcgatggataatatggtaatactctaattatttcaaacacgagaaaaactagtgttcctaaaaaggccccaaccggtagaccaattctccaactggaattccagttctatagggtattttggggaccaaccggtcgatcggttcctacaggtccccttgaactaaaattcttatttagtgcaggaaaaaaaaaacccacctactcacttcaattcaactccaaacttaagacaaacttccagatcacctaataacatcataatagagagaattcatgcaacaaaaactagaaacaccccttgaaactcaaaataccattaaagaccaaagtttgagttctaaaactcaaaccttgtctcaaaaccaagccaagccacaaactaacttcaaatcagctcaaacaacaataatatatcatcaaaacaaaaaatccaacaactataaaatcacagaaccttatttcacaaaattatgcaagagaagttaacttaaaactaaagaaaccataaaaggaggagctaggaagtttacctaggattgaaacctcaattattatgttaattaagctcttaattgctgaagaaaccctagcttcttgctggcttctagggtgttcgagagaaagagagagaaaggagaggaaatattgatttttttggtatttttcttaatttgaatgaaatgggatatactaagctttttctaactaaattattaaagaaataatcagattataactcacctaaaattccactaaaagacaaaagtaacattgggcaaaaagaccattttgcctttgcacataccaaccagcacacttgtcacttaggggtattttggtcaatttactacctcaaataattcctgacattctcaatgtctaactaagttgtcccgctactacaaaaatattaacatgtaattctattggccaaacgacacgttccaattttactgagctcaaaacatgcaaaaatataaaatttcatacatggcataaataatacatcctgaatttaaataaatctccatagaaatataaatcaagattaataatctagtttcataattcgaccctaattatctgctaattccaaatcaaaattaagtggtctttacacaattaaagctataaaataataaataataagtaattatatttaagcaaataagaaccaaagatttatagaggttcgtacccatgattatggtaatagcctacttcctattatcttgtattacttcagagaattatgaagatcaccaggagctggccaggtgaatttcttaacaattcttagtaaaaagcctacaataatttgatagtataagagctctcaagaatatatgatttcaaatccctatacaatggaatgggtccactatgtatag

SEQ ID NO: 66398 - DNA, 1810 bp, Cannabis sativa
taacacctcctaagggtagagttttacgattggtgttgtgaaaattcaattacatgtcatttgagtatgttattggataataacaatgcttatattataataattacaaaatatttaatacttgcttatacgaatatatgataatatataatctatactcgttaataatttaataagtaatataagaaactgataaattaaattgttgtctagatatcaaataatgttctattcaaaaatataattgacaatgaaacatataggataactacattttctcatattaggataaatgcaaacaaaattatttatactttggcaagacatgctataaagtttaatgaatttatatgcatttatttggtgaatgttcacccatatattttgtttgtaaatgaatgcatataatctttagattactccaacaacaataataatattcaaacctcattatactgagaattcaatctcaaactctcatacacattctctctgttcacattctttgctttttcaaatgctatatatgaaatgaacagggaaagtgaatattgacattatttctattctaacttagttaagaatttgagtacaaacataattatagcaatagctacccaacctaataatattgcaataaagttaatgtattatagtgtatcattgatagaaatagatttttgttgtggtagatttctcccttttactattttataatttagtgttatatcactgtgtgtagacaatcttacaacgaaaatgctaatgtaataatttacaaccgaataaaagaatggaatgaaattaaataaactatcttctcttccattccatttaagccaaactaacaaaactgataaaatgtttgctttggtaactaaaaatgattgttatattatataaactagttcttgtttttatttatgtttgcagttcaggaaattatttccaccaaccaaatgggctgcagagttcaatgcagcattgactgttcctttcttccattggctagttggaccttcagaggtgatattaacttatatcctcatatataacacatttttgttactggtaactggtaactaaaaaggacttttattttctatttcctcttctaaaattaggttatagaaattgaagtcaatggggtgaagcaaaaaagtggagtacttataaagaaatgcaggtataggattttgtgtcttttgcgttttgtacataaatacacacaaggccgtcgttagaatagaatagccagggccattgctcaaggcccctcagtccaagagacagactttctgaacctttttctctttcaagaatattttttaacattaggccgtaaagtcctctaaatttttcttactaaaagcggcttaaaattttatcttagaccccgtaaaagttagggacggccctgatctcgtatatacattaacaatttttaagaatgtaacctttttttcacatcattgatgatcaaaataggtacttggagaatagtggatgtgttggaatgtgtgtgaatatgtgcaaaattccaacccaagatttcttcacaaatgaatttggccttccattgaccatgacaccaagtatgtttttgttacacacctcaatttttctaattatgcccccaaatttgcttaaatctgatttgattaatttttctctggttttccacacagattttgaagatatgagttgtgagatggcttatggtaaagttccacccccatttgaggaagatccagtgtcaaaacagccatgtttttctgaaatatgtaagttaaaatatatatatatatat

SEQ ID NO: 66399 - DNA, 664 bp, Cannabis sativa
aatttaatagaatacacacatcaagccatgtcccaaatatacttattatataatacaattgtaataattctatacatataaatgcatatatattaaaaaaaaaatactataatataggggattttgtaccacataatgaaatttctaacttttttgctttggggtgaattttttttttaaaaaaatagtgtgtactatgttaagttttcactattgttctagagttatttttagttattttacgattattttataaaaagacagtatttttataaaaatttcatatgacagtaaaattgtaaactagcttttgcccaaaatctaatatttttgtaaaaattcctatgatatacctactcatcacaaataagaggaccaaacaaaattcatactactaattaatcatctttgatgaattttcctaccaagccaaattaatgttaaaaacaaataatctaacgctttaaaaaataaaacaaaactaattcctctttaagcattatatttaaatatgattatctaaattataattatatattattatagttataaagtaatataattaaatattaatatttaataacaatgatcaaaatatttatttagtgtgatttttttaagatgattaaaaatttgttattttaattattgtatgttgcaattg

SEQ ID NO: 66400 - DNA, 773 bp, Cannabis sativa
agagatttagagcatctttttcttcagtctcatcctttagtttgtatcgacctaggaatggataagagtttttttaatgacaacttgagcatttacttcgtaccttgattctctccttgaatcaaggtaataaattacgttataaatatcttttagaagtgtatcttaaaacataagtctaatacgtgtcggtgagcttctccttttcgaggataaggatttgggcgagcaaaagaccatgggaactggtactgctcactcatgatgtatatgggggattttgtccactaggatagtagcacaattcacgtgtcaactccatgtggctcccctttggtgaaacttcgaggaaacctttcatttcacgagtcgaaacaagcaatctgtcttgtaatctaattttgaggctgaaaacgtcaaaattgtgatatgaacgatacaaactcagttccggcttggaaagatctttccaatgaaacttgaactacatcatttggataagaattaaatgagttatgactattttactaaaaggatatgagtgcagtaagagaattctcgctcctttcgagcagtgccatcttttctggacaaaaagaaggtgttgcttgcctttacttgttcttaaactcattgggttgtgttttaactttttttttttggtgatctatattttattcgtttgggcctcaaaaacttgtgaaaggatatcgaagcaacaccatcttttaagccaaaaagatactctgaccactatttgttagtttttctca

SEQ ID NO: 66401 - DNA, 676 bp, Cannabis sativa
cacgggtcagaaacaatgttagtcctcaaaccattaccaatacgaagtcttgcaccagctttaataaggttctttgtttcaaaaatacttttccaaatgaaggatggattatttccaagagaggccgagagaaatgacccttcatgaaaatatctggctttatagactttgcaaactaatgaatcatcttcagttaacaacctccaagcttgcttccccaacaaagctaaattgtaatctctgaagtccctaaagcccaaactcccagctgttttgtgcttacacatattactccaactatgccaacttacaccattcttctctttagatgatttccaccagaaagagctcatgattctttccaaacttctacatgtttccaaaggtaaaaggaagactgacatagcatagctcggaaccgattgagccactgtcttaagaagagtttccttccctgctttcgatagaaatcggctttcccaatgctgcacccttttctgcattttatcttgtatgaatcccagaattgcttttttgtttctgcccacaattgatggcagccccaggtataagctagtaccatcagcttctctgatattcaacatttgacttatccttgttcttgtatcagtagaagaattggtactgaaaaatattgcagatttattaaagttca

SEQ ID NO: 66402 - DNA, 652 bp, Cannabis sativa
tatataacattaattaattttatgtatccttttatatatactgaatgacatttgaagagaaaattgatgattttctttcctacaaggggttgtttggctttgtttttagtttttagtttttaaaattatatttttaaaagtgagaatagaaaatatttttgtcattttaaaaatttaatggtgtttggctcatgttttttaaaactatttttagatatttttcttactgaaaaaatattatacatcataccacgacatgaatccatcccaccttggcccctggaccctggacctcggagtcggactcaaaccccagactcgacccggacctagacctcggactcgacttggagtctagggtctgagtccgagttggggtcagggtctgaggttcgggttcggggtcgaggtttggggtttgggtccgaggtcaagtctgggttcgcatttgggttcgagttccgtggtttgggtcagggttcaggttcgggtccaggtcggggtaggggtcgaggtccgggtcagggtcggggatcgagtctgagtccgggtcatggtctgatcagggtttgggttcaagtttgggttcgggtctggatcctagatccgaatctgagtcggggtccacatctaaggtctgggtccagggtct

SEQ ID NO: 66403 - DNA, 1081 bp, Cannabis sativa
tttcttagttattaatagagttgtaaagttgtaaagttattgagttattcaagttattaaattgtttgaagtagtactctgtggtgtccaggattaaatgacgacatcaactcgttatgacaagataagttttctctttttgtatagatagaatattgttaataatttttaatatgattaatttgtagtgaaaatatattgtaaattttttaattatatttatttatttattatgattattattttatttttttcctcactaacgtatattttgattatttacagttaacatttttctcttcgagggagtcaattctcatgagcacaagctcctcaccttcatgctgattggacaatcccctttggcccgtcttgaattgttcgtcgataggattttgtttcttgtttagagagtgattatgaagatgttgtgatttctatctattctttttctgagggtgtctccgagtagggttgttgttagatcttttaggttcttgttatctatctttccgggtgtaagtcttcaacatgttatgcaaaatggtaatatcgtaacatggtgtttatgatatgcactacagataaaaaacaaggtttcggggttggaagaaattcctcattgtttaataaccaatgtattgtttgactctagcaataaaattgattattatattggaaaaaatatattaatgtgacaaagtataaggtaaagatctttaaaataattttattaacatggtttcctatgatttctaaaaggaagacaaaagaaaaaaaaaataaaaaaaaatcagaccaagttaatcctgaaaaacaattatatgtgaagaaacgtaattttttttcgaaaaatgatcttaatgatgtctaatatttaacattaattcatggtaaatcttatattgtgtaatatctataattgtagagaattaatattgtccccttaaaaagggaaattgcaccgtatactctctttttttttaacaaatttcatttttactttttttttctatatatttaatttatacccttttttatttgttacatacggattataccctcatgttaaaccctaaac

SEQ ID NO: 66404 - DNA, 881 bp, Cannabis sativa
aaataatttgttttcttgtataaaattaacatgctcagtttggttaaataaaagaatttgataaattgtagtgaaaagttatataaaattagtagtatattaaattcattgcattaaaattaaagaaatatattttgaaatccaccttttaaaaaaattaaaattgctctcttttgaattatgtaatttcacagtatagtttttctgacttaaaatagaaaaatcacctagcaaacttagaatatttctcattaaaattataccatactaagtggaatcatgagtgttttatcaattaatctttctggtgagattataagcgtcctcactacatctttttaggattttacccttagtttgttcaaatcttccaccatttccttcacccgagggatgagtctcaatcgtacttgtcctatgggaattctgatactgagttgtttctcctgattgactttcgtttcgagtaattaatgtcgtctgacatagatggaaggttcaaatatattttagagaaggtatttttttaagtttttagttacaagactcgatctcaataaaacacatcaaatgttaacgcagattttttttaaccaataaatgagtcttaaagtaataaataaattctaaaattaaataaataagagtaataaatggcaagaaggtttttaacgtgattttcaagttaattattcatactccacgagtagtctatcttattttgggattccttataaatcgtatacagaaaacacaatacaagaatttatttgtttgattctcttttttcttaaatttattgtctctcgctccctaagttttgtccctatttataggagttttagggaaattaatatatttggaaagtgcataataaagct

SEQ ID NO: 66405 - DNA, 815 bp, Cannabis sativa
ttcagatagtttagccgtcaatatccttttttattaataaagttttaatattattattatgtatatcattattattttttttattatcatatttattatgagtattataaataattttaaacttatatgtatatatatattaaaaactttaaacaaaactcaaaattaaaaacctacctgctttaccttcatgtgacaaaactaccacctcctccatccttttttcttcaaaatttcagccaaaaacttagtgtttcaagccgtgatagcagctaggtagtgaatcattgaaggagaagaacatgaggtaagaatccatttccttttcaaaattgaaaagttaatttttatatgttgactttatgttttagaatggttatggaatctttgatctcgtgattttgtttttgggttgctatgggattgatttcgatgcttgtttgttggatttaaggtggttttgaagtagaaatcgagtttgagcttttaaagctcaaagcttgagctttaatggtgttttttgtttaaggactcattttttatttctgttacactgaaactgttgtatgtatgatatatatgtgtcctgtgaagtttggaatgatttggatagatttcggtggagttttgagacatataaaatttggggttcccgtttcctacagaaaatggaccactgttttgttttgaggaaaacagttaactgtttcttgccaagaaaccccaagaaaacggttaaccattttctaaaatggcaggccatttctagtggtatttttgaaccccgttttcatattttctcaaagtttgaagta

SEQ ID NO: 66406 - DNA, 1746 bp, Cannabis sativa
cttgtgtaattcataaggcttttcaagtttacagaaatgatattgacgcgtgaacgaaggctccttcacatcccaaccacataaaaattctagtttcattcttcattgattattttctttagctttattatattttattggtttctaaaactctcggtaaacaagaccgatctctatattttcattttcctctctctttctctctctctaatgtacaggtgaacaacattcgattagtttggtctccaagttctttgttaatggttgatagcgacttggggctttgtgttcatggcatttggatctgattatattttttttaggtttatttgattccaaaatagtaattgtataaccaatttgtgggtttgattccaaatgtaattgctatttgtaattttcaattatttgtaatttttttaatttttattgatattttatttagaaaataaaaaaaacctgtaattatacatatttaagtttttgagaaattttaaaaataattatttttttaatctcttaaaataatttgaatcctcaatattatttttttaagaaaataaaatataatatttaatgacgaccaagtcgtcgctaatggccctcggagttaaataaaagtgaatattatcagtgacgacattgtagtcactgaagtgacgactttgaatatcgtcactgatagtgacgttcagtgacgactcttaaattagtgacgaaattttgccactgatggtcatcattgacgaaaaagattcccttctgtaacaaacttttccctcactgatacctatttttcttgcagtgagacaagctatccaaaaatgttaggtttctctctcttcatcaatggtcaaattcaccaccatgtttttcaacattttgaactttaagcttcaaaaacttcattattgtcaagatagttagttataacttttttttggtgtttgtaatttcttttggctttcggttacacttgctctgtaatgtttcacttcttttgagcttgtgtatataaactagtttaacactctcattttaatgcaatgtagtctttctcaatcttcttcttcttcttttttctctcttcctctagctctattctttctctctttctttctgtctttttacattgttcttgaaactctgcaacaatggctagaagaggttccaacactaacatggtatcaaagccacgaccaccgttggtggcaaatatggcaaacattggaagaatgaactaaagctcgacatatccaggacctcctcctggattctttgctgcagatcaaaatagaacaagaattgatgatgtttcaccaattcatttcaagcacactttgtccatcagattgaatgatcacaacttccttttgtggaaacaacaggtgttggcttccattcgtggaaatatgcttttaaagttcatccaagacggtgcaccattgcctcaatacctcaacaatgcagatcaagctgcatggatccataatcctgagttgtggagtgggaggttcaacatctattgttagtttcatggcttctctcctccttgactgagagcctactaacttgaatggtaggatgtaacactcaaagacagatatggagtgccctggaaaaacatttcacactgcaggtttcatcaattgtcctatgaagcctttcctgctcattacaatcgaaattttagaggttcaaatgcccctcgaggtaagattccctttaatccctctcaatattcaa

SEQ ID NO: 66407 - DNA, 813 bp, Cannabis sativa
acgggtcacaggtatgtccatacttgaatcttatcctataaatattacattatatcctcatgtaaatgattgaaaattcatcgtgtaaatgttagaaaaataaataaaactaggatacaaatattcgtacataatctagagcacaataataaataataattagtacctacccgattgatccatatcaactaagtcttcctccttagatctttaaatcagaagcaattttatttatctcattatcaaaagtatataattgtgatgagacaatatgtatttatagagttagggagggaacttagctacctaatcctaattagactgagcctactcatcaaagactttagttaactagaaaagtctacaattttgcttcaactagactttacacacatagatgctaagcccattaattattgatcactaacaatatgggctaacacaacaaagaactatccaatcaacccatattttattaaaaccaataaaagttaatgtaaacccaaataaaaaagattccccacttggactatattaattttaatacatatgtgtcatatatcaaaagaattttatttgaaaacgactcatgggttgaacaatcagaaaatatgtgtgaccactttaaaagtgataattctttgatagcatctcaacataccagtctaatttaacatttgatattaagcaatgacaatgatattgtttttaaatcaacaaaaaatattcataatcacaaatatcaaagtattaaattgacatggtctataagtctaatagccaggtaaagaattatgttcagcatgtgatcaa

SEQ ID NO: 66408 - DNA, 973 bp, Cannabis sativa
ccaaatggcccaacacacagcagccacaagagacctttttcagcattcagcttgctgaaaaccgaggtgcaccaatcaagaaaaggatacttgagtcactaatggtgtcgattcccaccctattccagcatgttttgatcacattgcaagtgaccaaacaatgagtaatggtttcattttccacatggcagagaggacagagagagcttacctccacatgtttagttcgaagttgtatcatcgtcggaaggcaacccaccgccgcacgccacatcaagtttttgatcttgagtggtaactttaagctccaaagtttactccaaaagttattatcattagtctcataccatccacctttaagcttttggagtatattataagcacttttaaccgtataaaaacctgaagtctctttagaccaaacaaaatgatcttccaagttgttgtcatgcaaaggaatggacatgatcaaatgtttatccctatcaacaaagagatcatcaagaacctccacatcccacctcgagccatcaggtgttaggaggttgcttaccgtagcaagtgaaagagcaggatgatccgaaatgacaaaaggattaacttcatttggcaaccaaggagagtgaagtattggaatgttattacctgatccaatacaccaacgaactccttttcttactaagtcttgggattcccatatactcctccaaacaaaactcgggtttgaacctatcgaggctgatagaaagtctccctggggaaaatatctggctttaaaaactcgggttaccaaagaatttggtcttgtaagaagcctccacccttgttttcccaacatatccaagttaaaatcacgcagattctgaaaccccattccaccccctttcttatgtttgcaaagtttatcccatgacaaccaatgaatcccctttccactatccttgttagtctgccaccaataacttgccatcat

SEQ ID NO: 66409 - DNA, 868 bp, Cannabis sativa
tagatcgtatcgtaccgtgtcataaaaaaatatgagtcatgctattaaaagtatgggttgtgatgtgcaataattgtataggataggtcccacacggtttacaagtcagtaattttgtattgttctcggattcgtataatgctttattcgagtcgatttgtttttcttaaatagactaacctatttttttatacgaactcaaattcgtgtctttcttaaatactattttggaccatatattttatataagttactaattggaccctttgttttgttaaatgataaaatagactctgtattttccaaaattgtacaaatatgacccataattaattttttatcaaaataaaacttaataataatctgatctaaagatgttatgacaaaattggttacattgtctgtatctgttcgtgttaaaatttatcttaaagttggttatataaaaaattaaattattgaaaatttagctcatggtcttatttttaccattttgaaaaatatagggtcaattttgtcatttaacaaaacagagagtcaaattaataactttcacaaaacataggatccaaaatgatatttacccttttattttttattggctaaatactaaaatatatatatttatagttttagttaattttatatatttttatatttttttaataatagatacagacaattatttaaaagattaaaagataattataattattataatttaaatattattattattattattattatcaaaatatcatacattttatttatttatttattttgaatggaaagagaaaacttcgttaagatagaacaaccaaatcgactattacaccattgttaatagcaccaagaacattgctac

SEQ ID NO: 66410 - DNA, 1290 bp, Cannabis sativa
agatagttagggtgttacaatactgatttgtggggaccatccccaattgcatccaacacaaatttcaaattctacatacactttatggatgattttagtagatatacatggctatatccattgaaacaaaaatctgatgcattgaatgccttcatagattttaaagcctttgttgaaaatcaatttgatactaaaatcaaaagcataaagtgtgattggggtggtgagtatcaagtgtttgaaaaattagttaagactaatggaattctttttcagcactcatgtcctcacacctctgcccaaaatgggagagctgaaaggaagcataggcatatagttgagatgggattaaccctccttgctcaagctagtatgccacttaagtattgggttgatgcttttcaaaattctgtgtacctaatcaatcggcttccaactctagttttgcacaataaaacaccttttgaaactctattctgtagaaaaccagattacaagcagttgaaaacattttgagctgcttgttacccttgcataagaccctatctgaaccataagtttcaattccattcacttaggtgtgtcaatttgggttataatgactcttacagaggctactaatgcttgagcacaacagggcgagtctatatctctcaaaatgttgtatttaatgaaagcatgttccctttccaatctggttttctaaacactctagctccagagaaacaacttgttatacacaatgagtcatggtctcagcttccaaatattcacttcagacagttcagctctaattctcaaaacaaaaatggttctgcaccatctcaagcctccacagattccactcctacagcagcatcttcaccaggtcaggtaaattcctcaaactcaccactgatgaactttgattcactcgatcatggatctgtgacacctgatggtatttctgttagcatcagtagagataactttcatatacaagaggaatataacaatgaagaagcaagaaatacagatcaggaaactttgaatcctgatgccgaagcctcaacacatgaaaatcaaaatctcactgctgtccctacacatcacatgattaccagatccaaggctggtatttttaaacctaaaacatatctcagtcaagctaagtggatgccaatttctgaagagccaaagaatgtaactgaagctcttcaacacaagggttggaatggagctatgaatgatgaaatcacagctctcaaaagaaacaaaacttggatacttgttcccaggtcagaggcaaac

SEQ ID NO: 66411 - DNA, 591 bp, Cannabis sativa
cttctgaagtcgtgagatgttcttcaggctagtatcaggttttcacggatgcagcaattgatgatgagaagaaggtttatagtctaagtgttgtggtgaagaatgattcagatcaggtggttgcagggctggttaagccagtttctagtttagttgcccctgtagtagctgaagccaaggctgtttctcttgcggtcacatggactaaattgattaagttgtttgtccaatcctttcatactgattgtaagagtattgtagataagcttaataattgtaattggaacaatagtgtttgtgatgatttgcttgtagatgttaacaactctttgtccttcagtcctagccctagagttgtgtttgttagcagggatttgaatactcatgctcacaatttagcaaagttgggcttaggattagataaagtgttgttgtggaatagttctttaccttacttgtaacagcttgtttgctttgtttcttcttggttcaatgaagcttcaagttcaaaaaaaaaaaaacaatgttctttaaattttctttttaataatgattacaacaaattatttaataaataatcgtagactacct

SEQ ID NO: 66412 - DNA, 1011 bp, Cannabis sativa
agtttgggcagagttatttgtgtctgcctgcgtgcctggtaggtcatgagactacaggatgtcttgtgattacctgttgttgacatgcccagtctgggcctgtcagatagcttcttcgagtttgataaagccatcagctctatcaaggaactccttcatgttgttggttgagatcctttgaatgtctttccagaagttactcaatgggagtatgacccacagtgtggtcgtatatcagccctcttctgtaaggcttttgacctttgtggcatcgaccatgaacctctagatgtaatccttcaaaggtaggttctcattttcgttgtttgtttgactttgacatggtcttctagctgggatggtacaagcctcaaagatgagaattgagtgtagaattcttgagagaacttggcccaagaattaaaccttcttagggctagtttgaagtaccattgttgagttgattccaacaatgtcgttaggaatatgtgacatcgcacatcaccactaaccttctgaagatcgagctcatctcgaaatatttgatgtgcattgactggtcttctcaactggtatatatctttcataccggcatcttgaatttggacaagggctaggcatttatgtatgccgagaatggtgatccccttgaccggtctagtttaagatctaaagggttgggactagctatgccctaaatcatgtcccttcgttggtctaagtgtgctttcacagaaggatattttgctgtagggacttgactaactggccctccttggacgggttgcagattctagtatgacagggtctagcaggccatactctgagagagtgtatggtggaggtcggccagacctgcgttgtaattccctaatcaatagggacgacacgtttgtgattttatcaactagtttattactaatagattaattaatcattaaaatctgtgataatattaaaaactttactataataaaactgtaacaccctaactaatttaggcgtattacg

SEQ ID NO: 66413 - DNA, 1329 bp, Cannabis sativa
  modified_base (178)..(178): a, c, t, g, unknown or other
aaatttattacctcaaactaaatattgcctttgagttttgtattctatacattttaaatttagcgtttagttagaagaaataaaaatataagaataggattagaatgcaaatttattatctttttgttttatagttgttttcatgttgttgtttgttaagttgtttttttattttacngaaacacagtatttttataattttgaaattttaacacagtatttttgaaatcgtagtacaataaaaatatcaaaagaagagtgtgacagtaaatatataaaaataacaaaaaaaaaaaattggtattttgtgtaaaatcctcttttttttttatatagttctatataatttagaactagttagggatcttagtgacgaaattatttaattagcaaattttgtaacacttaatttttttatgctgttaaaattattgaatcaaaattatttttttgaataaattggacattttttttatataaaattattacagaatttaaaatattattagttgtcatgttttgtcaaattaacaaaattgttaaaagaactcttaataatttatctattttatcatttaaaatatatcattaattatgttttaatagaaagtgaactttattaacttataatagccaactaagctattatagaataatgtacaacactaggaacattgctgacattaaaagtgtgatcagcccaataacaaaaatcgcgtgcaagacaatagttattttgttagcagatcgcgaaacaaaagaaacaaacatatcaatcaaacagtttaacaaacgtttacactcagaaatcaacaaactaaaaactgaaggcatagaaaacgagttagaaatagcttgaactgtcacaagtgaatcaatttcaataacaacattagaccaatttttagtcttgatccaactcaaagcttccttaataccaaaagcttcatcagaggctggttgaacattaccaaatctcagtgcagtaagagcttctatcaactgactgtcactattacgagccaccactccaataccataagaaccattgctttgaaaaattgtaccatccacgttcaccttgattttattggcttctggtttggaccaattctcctccttttttgcttataccatacatcagttttttaaaaatttattaccaattatcttcttctttttaaaaaaaaaaaattaatatattttatttatttttaatataaatattgatatatactcatattcatatacaaaaataattattaaaatctaaaacaattaaaaaggaattattacatagaaaatataaattgacactttatttacaaa

SEQ ID NO: 66414 - DNA, 2719 bp, Cannabis sativa
taagtaatggaaaaagatacagatattttaagcttttctaaatcagattctttgtggtctgagttctaattgttagggatattcagtttttttttatcttgcggaaaaacttttaagttattaatgtccttgtagcttcagattggagtgtgttgtacaattgtaaaaataatgggatcatttgttgttttttaaaattatttcggacaagaattgtcaccatcctgataaaatatataaagatagacaaacatgaccttggagagttcttgcgtttagttatattttaagcaaactccactacaatttgatagtgacgttactgctggttctagacatgcacaatatgcttgacacagtctataatctaagtcttataacaccaagaaaacaagaaacgcatcaagatcttaccaacaagttttacatctgtgttctccaccaaccattttgctccatccctcataaatcccacgtagcttgtgtcgaactcctttttaaacataagtcgtctgaaatattaacaatttgtaaaatcatcacagaagaaaatttgcctttcttgtactttaacatttacacataattgaacaaactacaatgattaatgaatcttaccttattttgtaactatttaataactagacctcgattatctttaattcaaattttgggttaatacagctatatgtaggatgaaacaatcactatgtcattaactgaaaacaatacatgagtttcaagtgctataaaacaatattgtaaccaaaaacttacttgtctgtatttaacgttctgaaaagcacacggcgaactcctttgggaatatttaacgacttcataacttcggctgaagcataaaatattttaaacattgtgaaattatttgaaatacctgactataagaatacaattgtgcataaagaaaccagagataggtagcaaagctcaacaaaagatttatttttaacattttgagattattagtgcatcaagtacacgtaccagttatattcttgtcccttggaacatcaaccaacaatcctggacctattggaacaaaaatatatgtcaaaatgaaataacaagtcaagcaacataataacttatttattaccatttttattttcttcaaaaactacaactgaatttagtgaaaaatgagtggagtgatgggaagagaaagacaaacacaagccaaaaactggaaataaacaatcagaagatgtagtttttagtcaattaaaacagagaatcccagaagctcttgacaagttaacatgaatgaataaccaaagtccgaaaagctgttggtgtatttcaatgcttgcagtttaacaatttgtactatgtccgtactacttggagtctaggacaagtgaactgctgtaaaatcctaatttgaagatccctgtacaggaagatatgacaccatagactataggaaagaaaacaaaaaagaaccaccttgactacttattcaatgactaatcatagacaagctagcaatatatgtgacctccattaccatagaacataaacaatctaaagtccaggctagttcaaatacagtaacaatctgtactagtaaagcatttctatccatatgaattctatatagagcacacaaaagtttgaacaactttcatattcttcaattcaagctccagtttcacctaatttctttccaaattattatgcaatacaaatcgtgacacatttacagtaccaattaaatatcagagaaaatccctctttccttttcaatcaaccaactaaaaatggacacaaaattttaaacttttgaatataaatttcatgaatcaacttcattacaactagtcaaaactcaaccactaatatagttttacccattaaaattcaacagaaacacaaacctaaacttcgatcaactaacttaccattaagaacttccaaatcaagagtgtcaacgtcgaatccagcatcgaagtagtgatcgtaaacgtgtccgggagcatcgacgtgggtcccagtatgaacaggaagcttcatctcggagttgttggcgatagaaccattcttcatgctcttggcaagccagacgaactggccaactccctcacttgactcaaacgccggcatgtcagtgctaaatcgatgactgatatcgaagattcttccatccccgtatacttcccggcgagtaggggtaagagaaatctgggcgtcggagagcgagcaatcaccggaattggtgccggggacagcgggataggcgtcggtggtggcaaaggagagagttggtatagtgagcgcataggcgcagagtagcaggagaagatgagcggcttccatggtaatgagtaaccgaatggagatgagaagagtcaataattgtgacaacaaatttatgagaggctatttatgatttttctttttcactttgaattttaatccataaattagaattagaaataggtattttaaaattattaaactaaaaatcatttaatatcaaaaatattttaatttatattaaaaattactatttagcaattgactaagagtatcacactaaatttacaccattattaaatttaatgtaataaatattactccaacctaaccaccaaaaataataattgaagaaatgttaaaaaatattattagtgtttagtactctcttatgtgttaatatcattattagtgtaattaagtatcgagttttatatagttt

SEQ ID NO: 66415 - DNA, 1804 bp, Cannabis sativa
gagagaagattgagaggtgagagatgtgcagagaaaagagagagagattgagttgggttttgtaagaagaaacttctctagataaagaagattcttaaatgaaagtgtgagagttcaaacactttgtgagaactcaaaaatactcatttgtttttttactaattttaaaaaatactacattttttttaataagaattcaaaaataattattttggcagtcctatataatatgatcattgtactatatatttattttttttcataagtaaacaacaacacatgggtccaatttacagaaacagaaagtcacgaggaactataggttatatatatggatcacattttctcgtgtataatttaaaaatagtacataactcatagattatttattattagtaattatgtgtatatatattgtttaaacaaagttatatattatatattgttaagtacactatgctaggtttaacatatattttgtattcatcaaacaatttttaaattttagggaatttattaatcattcaataacagatacaaaataagttattaatccaaaacaaagcttatacacaaaaagaatagttttccaatataattatatatatgtattgtgtaatattccgaattttggttgtatatatataattaacatttagtattattttaccaaacaaaaaatcaaacactagaataagtactatatatacaagaaggcagaaattgggattaattgaattagtagtagtatatacttatgtttaatatatatggacaaaaatttacctaagtcccaccacaccatgaaagactctccttcccaataaatatagatttccccaattagggttaccccatgataatggggtatatatacttattttttagttacataccaatgattcgatcccatgatctttttcatacgcacctcaatattttttattgggagatattagtggcggacttagaatttatattgaggaaatacgtatttttttttaagtgaggggacaggcccggtcctggaataagatgagttaggcccgtgtctaagacccactcaataatattcacatatagtatatttttttgcattgaaaaaataatatttttgaaaaaatttgtaaaagaacgctcaataatattcacattttacattaaataaacacacactaaacaaattttttgagctcatattgtctggggaaggtcaagtactgtgatgattctaagactgtgtaagtatgagattatagtactacttataaaggtgcatcttattttttagtaactcatcacgaaagaattttatagttaagcgtgcttgacctgaggtaatttcaggatgggtgacctctgagaatatttatgtgcgagtggaaacactatcgtgttggtttgtaaggtcaatcatcattccgtgggtgtaaggatccaataaaaatttaaaacgggaatgttagagacttgaacccataatcttggtaggataaaagaatgtaaatttaaaagtgattatattgcaagtacaaaaaaaaaaaaaaaattatgataattatatccctacaaaataaaaatcatagttcaccactatgatatgatatggtactatagcaaataggtatgtggacaatggatatattggttaatgatgaaattgaccctacgaaacaacaataagtgtcctacgaaccttcccatccaacttcatattttgccattcatattagacaatatacatatataatataatataggtatttttttttagaaaatttcgaataatttacaatactaaaaa

SEQ ID NO: 66416 - DNA, 603 bp, Cannabis sativa
tattgacttaaaaaagacataacaataaatttataatgtattttccactgtcaatatcggtccaatccgatgtataatcgatacatctaatataagtttactttattagtgctatggaaaagacattctacttattcaagtgtaagtaaaatacatcgctaataatcacgtcagtgtaaatctaatacactgataaattatgagactaaatattttaaagcatataatcatgattatttttctctgtgttgacaacactataatcatgagtaattatatattcaagatttaataaaatatatatatatatatattgaatttataatcatgaaaataacatgtaaatcaaacaacataatataatttttgatttttgattaagtaataaataaaattatattaaaacgagttttatctaatcataaaaccccaacatgttattatatacaatttttttttactagttttctattcctcctaaaagatgaagataaaagacaaatgaagtgggcatattcgtttaaaattgttattcttagctcaatttttaatcaaattacttgataaaaaatgagtctaatattggtttgagattttaatttt

SEQ ID NO: 66417 - DNA, 2361 bp, Cannabis sativa
ttggattggatcggatggaaaaatccaatatccaataaataattggattagatcgaatggatccaaatccattggatgtgatccaatgaacacccctatatgcaatgcttcttgctttcacattgaatgtgaatacatttttttaatgcaaaattcattcataattaacaaagggacaaaaccctaaatcaagcagaaataaagttgcacaaatttcactaagaaatgactcaattgtcatccaatcacgcacaaaaaataaatgaacaaaaaactcaaaactcacgtaggaaatgctaaaggaacaagcccacaaagaaaaaacataatgccaacgctactaagaccataaggtgcaaaacactaataaaattaaacaaactaaaaaatacaaaccaaacaaaacaaagataaaaaatcagcctcattaaaactcccacaaatgcaaaggagccatcgagacagctcactgccaactttcgacaaaaatagtctacacttagccttccatttagattcagaatggtaaaggagatgagacaagaaaagcacatccctctagcctttaggtaaaactttggtccccgtactacatctacaaaactcttagaacccaaaatgtgcaattatgcatcgaagccatgaaaaattgacattgttcaaaattctaatacatgatcgaataagagagaaatcaagtaaaatattatttgattaagataatcatttacaagaaatgccttcatataggcatgagtagtaaacagagttagttagacataattaatttgacttgagacttaacagaatggttagctaacttagttcctctaataggaccttgtggcagttgatgtccacatgttttgtctattcatgaagcactaggtttttggaggtgtgtattgctgcattgttgtagcagtagagaatgaaaggtagagatatgtcgatgtggaagtcttcgaggatcaaagataactaagtgagctcacgtgtagcattggtcatggctcgatactcaatttcaacagaagaacaagatacgatttgttatttttgttgggaaagcatgcttaatatgatcgattttttactttcatataaatattaatttcctataacatcaatatcatgaatagagtttataatacttacatagatgtagcacatcagattatgtctccttctgtttagcgcgatttaactcttgctgctttttgtcgtagagtatcaccaatcactaactttggatcttcacttgatcaagaattcattcttcaatcttcaatttcttcacaatcgtccatatagatctaggtgttgtaacaaaattgtgtggacaattcttacaaccactaagtgatattttttaaaatacaaagagagagagagagagtaaaagtctctcctcaactctgtatttatagccgaaggtcttataaaaaaactagaagtctttttttcttaacgattaattaaataaataaaaagaaaaacaagaaagtcaatgcttggtcaccaaacatgcttgactgctcatcagaaggagatgtgtttttcttgtgttctctattatctcatagttcaataggcttggataaaggtcttttttttttttcatttatttatgtcatgattaatttattctttgtatttaaatactagttcaaattaagaatagttttttatttatgccattatgaaattgatgcaaaatagttgtgttaatgcgcaactaatgcaaaataatctatttagcgtaaattaacgcaaaatatgttattttgcataaaatgcaaaaaataaaaaaagaagtagcccaatcttcactattagtgtcactcaataaggttgattaacactacatgcctattttgaagtaatatatcatcgttttgctaaccgacgcaattactttatatgtcattttaaaaacgacactaataataaatttgtagtagtgtatgtcctcgtttagtaaataacaaaataataaatatatgtgttgtaataatatgataaaacttttaacataaaaattagcaatataacaactaatttaaaattatgacaacacaaagtatatatatatcatataatgctctacaattatctctaataataatcttcagtgataattatttttactaaaacattcattcattcaatgctttttctttttatatgggtattttttatcaattgttttgctttgataatctcaattctaaatcaagctgagatgttaattatttgttttatgactcttcaacttagatgtttacagtctttatttcttctgttaatcaattggttcatcatactagattttgtaccaatttatttttatatatatat

SEQ ID NO: 66418 - DNA, 1093 bp, Cannabis sativa
tatatagaatagatatatatttaattattaatatttatatatatttttattattgtatttatgaaattaagaatttatttttgagaaattttacaatgtgcctttctaaaagttatgtacgaatgtacttctatttgtttcggcacccgacagacttttttaatttattttttttatataggtgtgtatattatagttatttaagacatcctgtgaaattttgagaaactcagacaaaattaacacatcgaaaataatacacctatttaaaagtgacacattgatatactcctacctatttcgacattcgagagacttttttagtcaattttcttttatgatcgtgtacattatggttatgtaagatatcctataaaatttagaaaaaagtaaaaaaatttaacacgccgaaaatatattattagctaaatttaacaattgtagtgatttttgttaattaatatgatattattcttttattttattaaaaaattaatataataataagaaattttcttttaggttatttttgatgttgtagttagagtggacatattttttgaaactaaatttaataatagtgtaacactaaattcgatgaatccttagagatgctcttagttttattaaacaatagctttcagagctaagaacgagggtgattgtatgaaagcataagaataagaatgagaatatgaataataaaatttaaaatgcatataaaaatttgataaaaaattattattttttttgtatcttgcattaaaatagtatttttccttccaattcaaaataaaatagtcattctgctaaaatagtacaaagactattttattagaattacattccaatactttaaaatataattaaataaaaattattttctttatattctatttaactaaaagccaccataatattttaatattttaaaatacaaccaaataatgaatggttataaaaattatttctgttctatttcattatttttaattaaaagtcactttatctaaaaaaaaaaaaaatatacttcaaatgaattatttatctataataagagaatgaaagaaaaaacattaatatttgaaggttt

SEQ ID NO: 66419 - DNA, 946 bp, Cannabis sativa
acctgaggaatgtcactgcaaaggaaatttttgactcgatagctcagcacaaggtaacccacatggaaggagcacctactgttttgagcatgatcattgatgcatcagccacagagcggaaaccacttccatctaaggtatcgattatgacaggtgttgcccatcgatcccatcactacttttcaagatggaagaaatggggttcaatgtgactcattcttatggtttgactgaaacatatgaccctggaactgtttgtacttggaaacctgaatgggattctttacctagagatgcacaggcgaaactaaagtcgcggcagggtgttcaatatcttggcattgaggaactagatgtgaaagatcttgtgacactgaagagtgtaccggctgatgcaaagataataggtgaggttatgtttagaggaaacacagtcatgaatggatacttgaaaaatgtcaaagcaacacaagaagcttttgatggtggttggtttcgaattggggacttaggagtgaaacatccagatggttatgtcgaactaaaaggatcgatccaaggatatcatcctttctgggggagaaaatattagcacaattgaagtttttttgtactttatagccatccaacggtgcttgaggctgcagttgtgggaaggcccgacgaccactagggagagacaccttgtgcgttcattaatgtgaagagtgatgctaatgtcagtggtgatgagattattagcttttgtagaagccgtttgcctcattacatggctccacagactgtcgtttttcaagatttgccaaagacttctactggaaaggtgcaaaagtttgttcttaaagagaaggccaagtccatggaaagcctcacaaagaagaatatcagtaaactctaaggcagcctgaattaaaaatcaatgatttttcatgtatatttattgaaa

SEQ ID NO: 66420 - DNA, 723 bp, Cannabis sativa
aaatagttttccatcaaattaaatgagctaaactttagctaaaacactacttacaatttttgatgtgtggggtttattcactacaaatttggacagttatgttaattaggtttgttagttaaaatcggttaaatttgttggttcctgtacactactcattttgggatacgtgagctgagtgtgtactggtgttgtgaagggcgtgggaatttataactcatggccctcgagtgaacttgttttcagtaagagcaagactccatttattctgttcttgtccatgtttgtacaccatatgagcttcatcttcaaacaataaaggcaaagcctcaaggcagttcctcccaaagagtagatctaagtgtcatagctagcttgtgatcgaaccttgtaaactcactgtgttcatatactttgtttttatattctttttatcattttctggtttatgtttttcattgttttctttgatttatttgatttgttatgttcttggagggtgtttgattcaccacaaatggtatcaaagcacaggttactattgaggaatcaataacagtgaaaaaaaaaagttgaaaaaaaagatggcagcagcaagattcgaggtgaacaagtttacaagggtcaatgactttggtccttggcgaatcaagatggaggaactactcgtgcatgagggcattgtaagtgccataatgaaatctatctctaaagaaggagaga

SEQ ID NO: 66421 - DNA, 800 bp, Cannabis sativa
cgctctttattatttatacatttatttttttgtctaaactattgaattggattatattaatattatattaatgttatattaactgattgttttaagaattgagcagaatgcaattataaaagatatttgcaatgatttttaattttatggttcagagagaatttttgtaacaaaaataaattaaaagcaaaattctacaagagtcataattcaaagaaaataaatcatatttattctaaaaaataataataaaaaattcagcgctcataatcaaacataataatgtaaatgactttcatatttaatttataataacaagtttgttttctaaaaaacataataatgaaataataaaagtggtatgaattacataaaataattaaaaaaaaaacttaattaattttacatctttttcatgttaggttgacaaagcttatgaagttattgaaaatgataaagcaactttaaaccaacaccccttcatttgttgtgtgagattttaattaatgccattcatttttcttatcattaatttgtttattttagtaaatatttgatttaaatattttaagaagatagttttattgtgggaaaaaagtgagcttgaaatggtatagatggtgagttagtgttaggttggttttagtttagtagtttatagagtcatttaaaacgttatttgagtgttttcattttaatttgggcatattttaattttgttttcttaatttttcaagttttaatgtttgagtacatgacatccagtctatgagaataaatatattaaataaaatgaactt

SEQ ID NO: 66422 - DNA, 1001 bp, Cannabis sativa
atgtcatatgtcatcacctcaaattgatccacaatttcctcctaaacaatagaaaagacgtctcctcaattcataaaggaaaaacactctaaaagaagaggttaataagttgctaactagcaacttcattagaaaagcattttaccctcttaggatttcaaacccagtattagtaccaaaaccaaatggaacctggagaacttgcatagacttctccgatctgaataaggcatgtctaaaagattgttttccaatgcctagaattgatcagttagttaatgcgacggttggacacgaactcagattaaaatgcacgttgctaaccaaaaactctgattcttctcccaaacatgattgaatattagaagattctttcatcttcttgaataagtgttttctaattttacaatgtttgtagtggaagattgtatctcttagaagtagacttgtgaatgattttgactttccattgtagaaactgtacggtcagttttatatgtttatagtttctaaacgtttagttacggtttttgtaaaataaaaaccgtaagcgatcggtcggttataaatttgtaaaaactgaccttaacagaccgatttccacccctagtcaaaaaattcgttcaaagtttgaacctccaaactttgacatgcgatcctaggctaacagttgcaaaaggggcaacgctgcttggaggttgaggtcatcggtgcctagggattttaatggtccagcgcgtggggtcgaactgtggctgaagagtgatcgtcggagttacgccaacaattgagtttgagtttgtgcgtttttcttttgtggtttgaagagagagagagagagagggagagagagagagagagaacaatagaaaaagagactagatgagaaaaagaagaaatagaatagtgattttaaggtttagtttaaaacatttagtcttaaattaatagttgtgactaaaagtgccagtaaaagaaattgttataactaaaagtgaatt

SEQ ID NO: 66423 - DNA, 521 bp, Cannabis sativa
atgttcatttcactttatttttttcaatttttatctctaattatttttatgttctttaaaatatacccacttttataaatgatattcttattatatttcttaggttaatgttaaatatgtgctagagacactcaacaaaaaaataaatatattttaatgaaatataatataaaaatattatttattaatggatataaaaaagattattcctcatattatccccaattttccaatcatgtttacaggctcaataagacaattcatggtctcaaagaaggtcctaaagcttggtatgacaagttaaaacaatttcttgtttcatgagattttcaacagtcaaaatccgatactaagtctgttcctcaccaacaaaaatagaaatctgttccttttattagcgtatgtgatgacattctcattaataaaatttagaaagaaagaacttaatttgggctctctctctcccacactgttcattatttgatattggtcatcaatttagaccgttgtcgaaatccata

SEQ ID NO: 66424 - DNA, 1085 bp, Cannabis sativa
ttttttgtttacttaatagtgtttgaaaatcatttgtttcacagcaaaattaaacgaaataattgttcaacaatggcttcttcttattcttatagtcatgttgcccttgttgagagagagtttcctgctcaccatattttcaatattattattgaacaaactcctcccaacaccaaattggtaagaatacattattagtatttattactactctactctctctgcatcaacttaaattgattctttttcgatgatttattttattatgtatgcacaccagatattacagcttgatacccttgattttgtggttagattcgtctaaatttattatgtatacatatatttatatatagccctgatttgtaactttaccctaagtttctctaatttgtttactttggaaatattgtcaatgtgctaaaatcagaggatggcctgttaaagtaagtctcttattatatatgttgaattttcgattcttttatatatccctaatcgtaatctctgcaatttgaaaaaggtgcttctttgatttgtatttttttttttttttttgataagtgcttctttgatttgtatgatgagtagaatatatgtatacaatacatgtatttatataggttgcagtaatgtgtaattatgttttttggtagcttaactttagtggtaaattatcttccattaattaatttatttttatggtgttgccttgtgcagcaaatttcaaaggcattttgggtgaaatattgtgagtccttatccaatcaagtatttcctaagcttccatgtgaatcaaaagaggaggtagagttgaccaaaactagtgatggaaaggtatgaattaatagaaaaagagttggactaaatttgcacaacacaattaattaatgctattattctttaagtaaactttgagtttaattttatggtacttgattatcctcttactctttatcatttttaggagaacaatgttgttgatattggcgattctaatgaagattcagactctcggcccaacaagataaggaaaactagtccttatggtaattctgaaggtatatattcatcatcatcatcat

SEQ ID NO: 66425 - DNA, 771 bp, Cannabis sativa
tacatagtgatatttggggaccattgcgagtaaaaaatattaatggatctaaatggtttgtatcatttattgatgaccatactaggacaacatggaccttccttatgaaagaaaaatctgaaactgtttctatttttcaaaaatttcattccatgattcaaaatcaatttaatcaaaagattcaaatcttgaaaattgataatggaaaggaatatttcaactccatacttggtccatacttgttagatcaaggaattgttcacattagctcatgtgttgatgctccgcaacaaaatggagtggctgaaagaaaaaataggcatcttcttgaagtttctagatctatcatgttttcaaataatgttcctaaacaattttggggggaagccttactcacagccacctacctcatcaatcgtatgcctagctgtgtattacaattcaaagcccaagaaatttgttacttgcaacattccctcatatctcagttttttcttcagattttccattcaaagtcttcaaatgtacagcctttgttcatgtttatgatcacaacagaactaaccttgatccaaaatctcacaagtgtatcttcattgggtattccaacactcaaaaagggtacaaatgttactccccaatttcaaaaagagtttataacactatgaatgtcacattttttgaacatcaacctttctttcccaaatctggtatttagggtaggggtgttcataaaaaccaaaaaatcaaaaccgaccatcaaaccgacca

SEQ ID NO: 66426 - DNA, 1020 bp, Cannabis sativa
  modified_base (764)..(766): a, c, t, g, unknown or other
tatatttgtgtattgatggatagaaattatatttacacaggcatatattataatttaagtataaatttgatgaacaattaaaaaaaattagtagaataatttaatttcattgtattaattattatagtaatataattatttatcatatgtaacttaacatataatataattatttataatatatagaataaaaatattattttcatatatatattttttaattttgtaagtataatttacgtatggagtacgtattattttactagttaataataaaagatatgatttcaatttttcaaagcctacttaagctcgtgtatggtttattcgaaaggaaatttgattttctatacttacatatacttaatattttttctctaaacacataacatttaatatttatgggatatgacacattttagaatattcctaaaatacccccatttacattaccgcctcccctctctcttcttctctctttgttaaaaacagaaaatatttttttttttaaaaaaaattaaagtgggcatcgggcccatcgggccagtcatctaaccatcgggccctacatcgggcccattgggccattcctataaaaagaaaaaaaaaaaaataaagtaggcatctgaccatcgggccagtcctataaatagaaaaaatttaaaaaaaatatccaaaatgggcatcagaccatcgggccctacattgggccttcatcttcaagctcatatcaaaccagaaaatcggattttcatgcccagaannntcacagaccctagatctactccatctaaccctagatttaatcaagaatgcacatatccaacctaaatttattaacaaacaacattttcaccataatcaataagaaaaaaaaaataaaaaactgaaaggggaaaaaaatttaccttgctcgtcacgtgctcagtggatgggttccctccgtggggtggtgggttcatcattcgagtggagattcgtgggtggtgtaatttcaaacactagagagagagagagaga

SEQ ID NO: 66427 - DNA, 590 bp, Cannabis sativa
  modified_base (58)..(59): a, c, t, g, unknown or other
  modified_base (130)..(146): a, c, t, g, unknown or other
  modified_base (563)..(564): a, c, t, g, unknown or other
tgatgaatgtatgtgttgtacaatatttttccataaaaaatattttatttagattccnngtgaaaaattaagcaattttggttgttatggaactcgatttctgataaaaattgcaaaagttatgaatttnnnnnnnnnnnnnnnnnatggtgctcaatcgcacgcaccaggcttcggacaaggaagcctgacgcgcgcggacaataggaggcgttgcctgtctgaaggcgtgtcacgcctgtgtcttcagacacgggatgctgcacctcgcccgcacgctcccctacatctgtcgagctttcccgcacacgagaccctacaacaactccctctgcgcacgcacatgggctgcgtgcagccttcctgggttgcacgtgcgaccctcctggcagccacctcccaagtgcgatttttgtcggattttttccccaatttcattttttccaattttcaaaccctaaaattaaaataaaatattatttttaaatatatttaaacttaaatagcattatctaaattaataatattaattttttagtagattattattaattttgatattnngaggtttaaatttaaaaattgattat

SEQ ID NO: 66428 - DNA, 759 bp, Cannabis sativa
tacattgattaatccaaacatagtattatttattatttaatacaatatgatccttatacggcgtaccaaatgaaccttctgtgaataaagttgcacgttgtgttttacatatgtgactcttgtccatttttatagattgtgttttcactgagattgatgactcttgtccatttttatagattgtgttttcactgagattgatgctcctgctgaatttttatccactgtaatggttgaagcttgattgattaataaaattccattcctaaaaaaaagaatgaattatttttaattgtcaattttcaagttgtctcatatttcctcggtgatggaactattagtgacagactttaactgatgctgatgctatttcttgatgccaaaatatgcatgcaaataaaatattatttttttacagaaaaaaattccaattattttcaaaataatcatttatatataaatttaggaaaataataaattttgtatgggaaatttgattttttttatgtatgatttaagggttaattggttagaaaaacttaaactataaagtaattgttggaatatgcccactttacttaaatcctaaaacaacctctctcaaaatcccacaccgtacctattctctctccttcccttttctctctgttcgtcccaacccagccgtcccaaccccggccgaaacaccaaattgtctcaaacgccggccacacacgcacggaggagacccaccggcccacggtgctcccccaccgaccc

SEQ ID NO: 66429 - DNA, 1614 bp, Cannabis sativa
atacatttataattttatatattaatatattttatttaaaaatatatattaattgacttaatatacatttaacacattagattaaaaaaaaaaccttctaatatattaattctcatattcctaaatgctaataaaattatcaatgcgtattcaataaattttatttgttagtgattttattatgagatcataagaattaggttggactaaattaatgtttattatccatgtaaaattattatgttttaatatatatctatattttaaaataaaatcaacttaaataactaaaatgaattggatggatccactctaatcgaataaaaaacttgtcaatgcatccaatgattgaaaccgatctaattaaatacatccattagatcggatcagattggatgattcaatttgattggattggatcgtataacaaaattcaatatccaataaataatcgaattggatcggttggatccaaatctattgaatgtgagccaataaatacccctatttcgagaaaacacatggtaactactaacttataattcccaaaaaataaataattagccaaaaaaaactactaagaaattttcacttttaattcccatttcaaatttatttatacacaaatataacgtgtggagtaattatttacatgatcaaaatcaaaatcattattaactcattaagtcatcatcatcatcatcatatttcatcataatcttctctaacaatcaaaggctttgtctctctatctctgtctctaactctctgtttcagttcatccaaaactccacctttcttcttcaaaccttttctaccaaatttcttaatctccgaacacaactctgtgatctgattcactatatctcttcctccaaacaaatcacgtctcgaaaatgtacttttcagcccaggaattcctttagatttcacatttgattttccaaatggctgataatgtgaagtgtttggattattgttttccctgttttcttcaaactttcccggaaaattgaagggttttgttttctgggattttgttctcataacatctctgaagaaaaaaaaataagtgaaaattaagcttaaataataattatcaaagaaaactaaaaattgattcttttcttcttattctttatacctttgatttgtagctctaaatgaaagaacttcagaaacagataaagaccttaatagcttgacctgaaaataaaaattgaaactttatcaataaatttatgaaagattagtttttctttttcttgggttgaaattaaattaaaaatagaaaccttggaattttgtgtgggtttaaaaaaatcttcaacagtcttgggatgcttacaatctgtaaagaaccaaaaatagaaatattaaaaacaaatatttgattttcttagtaagtttctcagcaaccaaacagaacaagggtcttactcgaattgcagaaccaagcttcatcgtcttctgccacaacctcatctggagcagacaagtcaacccatttgggagctttgatgttctcgtaagttccatcttcaacgaactcggattcgatgctgttccaatcgatgttttctgggtccatctgcaaaaaatgaaagagaaaaa

SEQ ID NO: 66430 - DNA, 2354 bp, Cannabis sativa
  modified_base (1976)..(1978): a, c, t, g, unknown or other
aaagcacttttaggaatatgtttagatctatgatatatatatgtcgagttttgaggccaagacgcaccagttattgaaagacttagagcagaattgttcaagctcaagtgttgttcaatggacaaaagagacttggaaaagcattataagagaatgactcaatgatttaccaaataagtggcattgatgatccaaatctaaagaaagccttcctttcctttataccagagccacttggcgaagaaactttcaagctactctcaagatcgggaaaaaacctaacggatgcaataattggagaaattctccaactagtcttaaaagcccttgaaaaaatgtgctcccagaagaaatttctccaagactttataaagcaatccaaacaactaggaaaagtttgtagcaaacgagatttactcatcaaatacccttttgaatcttcgtgttcatagaaaaacccaaagaacaaaaataagttcaaggcgttcaagttcttaaagcacaaaggacgcagaataaaatttttgcgaaggaagcgcgattttcagaaaaaatctgatcgatgctatgtgtgtggaaaaaatgggcattatgcaaaacaatggcctaaaggaaaaacagtcaagcttctctcacatatccaataaatgactgggatgtctcttaaggaaaacaacatagagtcaatcttctccacaaatgatgaattcaactcagaatctctttgtgcatccgaacaatggagtgattcagacactctagaatgttatcaaatgtccactattcacacaatgcaaccatcccatgtcatcattatgtaagttcttctaacaaaatatgccaagccaataaaagtggcagcattttttgacatgggagtgtcatacacgataatgaaccccaatattcttcctaaagaatattggagaaaagagaaacaatactttcatgctgcaattggaagtatttttcgcacagaactcatcagcaaactgattttgttgtagttcttccaagggtgttttgttactcacaaagttattggatcaaaattacccaaaaagatttaattgtcagcttttatctttacacaaagaagaagggtttgtgtattcttcctagtgtacttggttacaaacaacattttgctctattgaaagccataccaaactatttcttaatgtcacatgaccaatttcatcaaattaagaaagagctcatcgaagtctcatgtgccaataatcatgccgagttcctgaagaaatgtgtccatcccttagggaaaaataaatagttcttcataagccttctttttaagcttaatgaagatataaaccctacaaaggctagtcacctaggcatgaattcagaacatcaacaaatggcgtctgctgaatgcaaagagttacagtagcagggtttaatagagtcaacttcctctccatgggcatgtcatgcattttatgtcaataaacgatcagagcaagcttgagaaaatcaaaggttggtcatcaactacaagcccctaaatgagttcttagcaaatgatacatttcctataccaaataagaatttattgtttgccaatttatccaaagcccatatttttttttttaaatttgatctaaaagcgagatttttggcaattaggcatcaaactatatgaccagcccaaaataatcttttgcattctaaatcatctttttcaatggaccgtcctacctttttagctcaaaatagccccttctttattccaaaaggctatgaccaaggtacatggtccaatattggaaaaggctctcatctatattgacgatattttacttttttctcctgatgaaaaagcccatcaattgttattgacccaatttgcttctatcatcaaagcccatggtatcatgttgtttggaaaaaaaaaatgattattggacatgcaaatagaattccttgggatgaaattatccaaaggacaatannnagcccaaccacatatagcccatgaactacttaaattcccaaatgaaaatctcacgaaagtttaggtcaaacaattattgggcatcattaattatttgtaaaactttgtttcccgactgtttgtactgacaaggccactcagcaatatgttgaagaagaatagtccatcatggctatataaccaaactgtagcagtgaaaaagctgaagaaaatcatgcaaaatctactacctttacagattccctctgacagaaaacgtattcttcaaatagaccccagtgaccaacattgggcctgtcctctcgagcaagatgagcagggaaaaagacgaatatgtggatataatagtgtacactttaaagattcccagctccat

SEQ ID NO: 66431 - DNA, 1520 bp, Cannabis sativa
ttacattgaaacagagttttatttagggcataaaacccaacactgagacacatggggatcatactcatcaattaattttgtgcttctcttcatcctagtcatctcaagctcaataactcaagttgcttacaactcaaggaaagccaaaattgggtttaaaaaagtcaaagtaactcggaggaatttttcaaggcacaaggagagtttttttaaattttggaggtttcaataaaatcgttttgagggtttttggaatcttaagagtctttgaaataagaccaacaaaggaggagaagtagaaaaaatcaaacaaaataattggcgtgaacttcaaaaaaaaatatatgtttttctttttacctttaagtgaggaaggcttggaggcttgacgacgataaaatcccaaagtgccctttgaaaggctatagctgtgtgggactgagaatagaagtgtaaaactttggctctcaacgcacttatatatagttgagtccaatttcctaatcctaaagctaatgggagtcttttaaatttaaagctttctaaggaagaggtaaatgattagtaaaagatataattatatcttctcccttttctttttaaagaaaattttcaattcctatgcaattagaagtaggaatacaaatttaaaaggtaacaacagttcctaatgctattaagagtaaagaaaaatgagagaattaaaggaaaaagataaatgatgagcaaaatgcaaaaagtcttttctttttttccttgttctatctatttttgaatggcatctccaaataggattaggattcaaatccaattaatcctaatgccataacaaacaaaaaaaaaaaaaaatcaaattctcaaagaaagaggtaaaatatagtgaaaaaaagataagatttttttctctttttctttgttaataacttttaaaaattctcaaggattaatcaaaagtgttcaaagtcctaattcaatttggaatgcttaaagaaaaaatacaagtgcctaaaaatgtcaaaattgatgcccatctggcagtttcaagcaaacgggctcagttgatgtcatcaaattaactccacacaagtgtaaagttgacttgggggaaaatgttaacccaaaaactttccttggtgatgtagacattaatatttgacatgtggcatgaagaatgacatcatagagttgagtagacccgagtcatagcagttgacctaggaggggaccctagccctgcacccatgttgacttcaagatctctaggatggaagttcagacttgaataacttgaatccaactcactatctttcagtattatgtaccacgagacatgaagcaacctgatccaagccccaggcgctaaaattacacaaacttgctgttgggattttatgccctaaataaaacccatttcaatctaatcggctttgttatcagtgaaagattagaagtcatttatgtttacatgtagttttcatgtttgtggtttaatatataaaaatctattaagtccagaacat

SEQ ID NO: 66432 - DNA, 566 bp, Cannabis sativa
aacttgaaatgttatatcaatattttaacaatgaaaattagtaaaatacatgaaacagattattataattgtattatgctcgttacatcacatcacatagaattcttatattaaaagggaaatttgacaaattatacatttattggtctatttttttttttctaaatcaatattggtagaatatattattttttcttaaaatttcattctacccctctcatttgaacaactctctctctctctctctctgtaaacatacacacagaggagcacacaatcaaccctcaacccaccacccacaacgttgaatatttctctccatgaccaccatgaccacagactcaaggagccatggacccaatgaccaccgtggacccaacgacttctccatcaaccacgacttcaccatcaacaatattctcaaaaggaataaattgtatgattaatgtttgctatctgtgagtggatgttagatttatggtccaaaatggtcaaatctgagttttgggcaaaaagttggttttttaagcccgatggtggttcgatgccttcttgttgttaaaatg

SEQ ID NO: 66433 - DNA, 730 bp, Cannabis sativa
ctcagtgcttgatcgagcaacaactggttgctttttagcagaccagctgattaagtttccacccaagtaaaccagataacctccagtggaccttctatcatcgatacatgaagcccaatcagcatcagagtaacttgttagggacagtgatggtgttggtttgataagtaacccctctgaaatagttcccttgagatatcgtaacaaccgtttgcaggcttcccagtgagagatagttggggctttcaaaaattggctcagtttgttgattgcaaacgcgacatctggccttgtgagggtgagatattgaagagcaccgattgtacttctgtacaatgtaggatcttcaaatgagacactatcagttagagacaacttggaggtgctacttagaggagtagaacaaatcttggctccttccatgtgaactttggacaagatatctgtgatatactttgtttgggagaggaacattccttgactgtcacgatgtatttcaactcccaaaaagtaatgcacttcacctagatccttgagagcaaactcatgattaagatcagtaatcaacttagagatgaggactttgtttggtccagtgaccaatatatcatctacatatactagtagtataagtagattgctgccagtgccatgaacaaataaagacatgtcagatcgagatgactggaaaccccattgtagtaagtaagttctcaacctgtcattccaa

SEQ ID NO: 66434 - DNA, 894 bp, Cannabis sativa
ttatagtaattcactccatgtatcgcgatagtacgtaatagagctacgtctactttgagtttttatactccacgacaaactcatgaaattttaccagcattgatgtaaaatttaaataattaataaatatatttacaattaaaaaattattaaaattatatttgggctgcagagaattcatccacctttttgctctttccttaagagagaatggaaaaggcctcagtttaatgtaccacatagttctagaaaattagccaagtgagtgtgaggatcttcagtaggcaacccacgaaattggataatgaactgcaccatttgtaagatagcttgcgtgatctcaaagttgttggcctctactgctaatggtctaatactgttttgtacccttgtaagactagggattacacaatcatgcaggcttctttcaacattagggtgagcctgacctccttgcataactccaagaattagatcattcctttattatgtgctatcattaaaacagattgtattaaattgaataaagagaagaagaagaggttgaactatcacattaatctgtaaaataaactcaagtggttcacataataatctttaaaaagaaattagctattagaagtcattctaaaacaatgaaaacttaactcaagatatagattaagagataaaatattattggagtcctccattggtggtgccttctgttccttgccctccttctacaatcgaactttctctcaatttttgaatggcgtccaagcttttccttcaactctctttttatagtgcaaaatgttgagttttcccaaaacaccaaggtcaaggccttgcttgttaggtcacgaccttacaagcgatcaaatctttgctgattctagtagttttccagtt

SEQ ID NO: 66435 - DNA, 1159 bp, Cannabis sativa
cttgatgtattataatgttcttgaaaggcttaagaaccctatagtgttcacacaatggatttctaaccctttacatgagggtataatgtaatatttataggctaggatccgggttcagatatatctgtgatccactgggatttgcatgtaaatttagcccactaatgggggaaatacataaaatacgttgactttgggcccatatactgaggcccagcctgtggggtgaaggtgattcatacgcttggggaccacgcgatatttgctagatggcatgtgtgcatcgtctttgtgtattgtagtgtgagaagcgaggtcgttggacaaaatgaaggtttcattttagtagaccgcacacttttagggtttgacataggagataatcctttgatttagtgggatttagtgtcagaggggcgccatgtcatcctggagtaggtttacaaaaggcctcttgaaatgtccttccataaatatcccaaatgctaatctagagggcctcaataaagtgctccttcgtatttgggccgaacacacctctagattcagagagattcggtcttcgacgtgaatatcttggaccttagacaagtgtgatatccttccatacctactgggttcgttatcttgttagggcttctgaccatgcctttagttaattaattttgaatcgagaatgtcatgtgtcccctttctcgaaacacaaataacaattcaagtcaatactaaaactagtattgtataaataatactaatacaatataaaataatccaatatgatactatacaatacaatacaacacagtgtaccaaacgaatcctaagaagattaacactagtgaagaaccaatgaacaactcaaaactccaagacacgcctctgaagaaagaatatggagaagaaaagaacactcaggcagaaggataacaacaaccccaacgaaatcgaaaaatagtatgataaataacaagacccgaccaagccacaccgtaaggtcgagaaatagctgacaagccttgttatgcaaaaaaaaaaaatcaaaccacgactaagaacttttaaagaaaaacccttgagagcgctaaaatcttttttaaggataatttgttaagtattcttaatttgccatagtcattcaataattattattattattatt

SEQ ID NO: 66436 - DNA, 742 bp, Cannabis sativa
tcatctactttatattattttataacattattcacattattatacaataatataagggaaatttcactttttgcccttaataaataccccatatcattttagaccatccactaatttgtacaaattaattccattgattacatgaacttcccattttacccttttttaaaaaaaaaattgttaaaaactgaaaaacttccctctctcttcctctctcttttccctctctcgtgtaccactctctctctctagaaaaaactgaaaaaacttcccaaaagcttccctctttctcgtcccactctctcgtccctgttgaatggttgtttctcagtgggcggtggtggaaaatcggagcacaacccaatatcactcaagaatcttacaccattttagtgggtaagtagtgttttaagcattttgttagactttatgtagtttactttcgttatatgtgtcgtatttgttggaactggttttttttttgtctgaaatggtagagatctgacatatctggtttttgtcgaaattgggttttccagatgttatcgacgggttatcgatagaatatcgatgccatgtcgatattctactaagaaaggtcagggatgaccattatcaacatgttttcgacagtttgtcgatatcatatcgattagaaagcaaattaacatacattagttatttgagaagttgtcgacatgttgtcgatggtatatcgacattaagtcaaccaacagtgtcg

SEQ ID NO: 66437 - DNA, 1013 bp, Cannabis sativa
cacttgagtttgaattatttatttgggtcatggatgggggggagtgggcggatgttccagtagaaggagctttcgacttgctaggcttttgctcaccattcactcgttgaatggcttgttcgagcttgatgaagccttcgacacggtcaagaaaatcactcattgagtctaccggcctgttcttccttatatccttccaaagttcaccaaggacttcaatgccccccagtatagcagataactttccatcttcagttacccgtgaaactttggtcgcctccgtcatgattatgctgatgtatgctcagagaggtccgcctggtctttgcttgacttaaacgaggtctcccagatgcaacggaagtttgcgagaggaggagaactgtgcatggaattctgaagataaggctttcaatgaactgaactttccaggggccaacttgaaataccattactgggcggcttctgacagggtagcaggaaagattctacaacacacatcccctcgtaccccttgcaaatccatttgcatttcgaaatacttgaggtgggaaagaggatcttctcttcctgtgtacattttccatgttagtattttaaacttgtttggaaacgccaaaagattaattttgggagagaaaggagttccgcattctacaacacacatcccctcttcttctgtttagatcactcctcaggtcatgattcatccctaacctttcaaatacagaagcacctggcggtcttagcgattgatttgcttggttggcaggtagaatggcaccgttaacctggtttgaactatcaggtatgacctctctttatgaattactagacaaggtctggccccctaccgcaaggcccacaactggaactcgtaaccggggatttggcggctgaccatttgcagtctgggaagtattcattgtttaatcttcgtccgtctcgcccagggggatgacacttggaggttgctggcctacagtttggtaggcttttcgtatcagcacagt

SEQ ID NO: 66438 - DNA, 628 bp, Cannabis sativa
tttttttttaaaaaataatttgtttttcttaatgttgtgtgtacttgtccattctgtattttaaaaaatatatatataaaaaaaaacagagttcgtgtgaagtttttatatttttttacaattttttatatttttattattttgttattgatcttttattatttgtatattacttctatgttattttaatattatttttatataatttttttgtaattttataaaataccataaaaattaaaaaatttacaaaaattgtattttacaacataattatccatttaaacttacttattaatgctctatgataatattgtaaataaaaaaaaatatatttaacacaatattatatattatactaaatactaaaatatgttttgtaaaatattatattttaacacaatattatattttatactatatactaaaatattatatttaatacaatattatatatgttttctaaaaatactaaaatatatcattgcatcacaaatttaatgctaaatgtgtatcaaatttgacacatgcttaaaattatatgtcaaatttaacataaaataaaatacaacttagatttatactaaatataaaattgattgtgtttttgctaaatttgacacaattt

SEQ ID NO: 66439 - DNA, 1089 bp, Cannabis sativa
tttttagcgacggtcctaaaaaaaaattatttttaggaccgtcacgaatttcgatatttgtagtagtgcacattttataataatggctctaatttatgtgaataacattgtcgtctcaggaaataactctataaagtttaacaactccattcaaaggttgaataatgccttttctcttaaagatttgggggcactaaactactcttaggaatagaagtttatagaaactcaactggaatgtacttgtcttaaagaaaatacataatagaccttctccacaagcttaacatgaagaacatcaaaccttgtccaacacccatggttggaggaaaacctctatctctccatgatggggctgtacttgaaaatccctccaattataggagcatcattatgtagtaccttactcatacgaggccagatataacctttgcagtaaaaaagttgagccagtttctcaaagacgctactacaactcacttgagtgcagccaagagagtgttttgattcttaaaggcacaatacactatggaattcacattcagtaaagtgatcgacttgggatagtaggttactcagacgcagattgagcctactgccctgatgatagaaaatccataggcggatattgtatgtattttggagaagcactcatctcacggtccttcaaaaagcagtttgttgtctccaagtctagcacaaagtcgaaatacaaggctcatgctcatgttatcgttgaaatcatttggatttagtcactgcttagtgaaattaataaatttgctcagtcttacactcccatagtgtggtgtgataacatgagtccaagctcacttgttataaatctagtttatcatgcaaggacataagcatatagatgatattcattttgttcaagataaagtaattcataagtaaattaattttagatacataccctttcatgaccaagtagctaactactttacaaaaggcctttcccattcttggtttcaattcttagttgacaagctcggtgtgatctcttcacccttttgcttgagggatggcgttaagaactgattgaacaatgtaattaggctgctaatt

SEQ ID NO: 66440 - DNA, 896 bp, Cannabis sativa
agatgaattgtgagacacatttgtgaataggggtgtgcataaatagatcaaattcaatgccaactgatcaatccaattacaaccgaccgttaaacattagatattcaattgtgatcagatcagattttatgttatttttgaatattcaattaaatcgaataagatgtttgatggggtgttaaaaaatttaatacatctaacattcaatcaaactaattagtatttttgatttagtttggataaataattaaattttatgttattatacataaagtatatatgcatatattaaatttaacattaaaattttactttttattttttatttttattggatggattgacatattggatttaaaatataagatggatctaatccgatccaaaaacggctaggtttaaaatattaaaaaaacttaaattaaactaatagatatatatatgaaacacatcaaatggatagaaccgatttgatatattggatcgattggatgattgaaactaattagatcagatcatatgataaaatataaggaaatttgcagtaaaagtcctcaaaatgttcactttgttacagataagtcgccaacctaaaaaattgacggtaataatccctaaggtcgctattttcgtaagtccgttggtactcaatttaacagacctgttaaatactgacaagaatgccacgtgtttaaatattattgggccaactcataattttaattaaaaaataatttaaataataaataaattattaaaaaaactttaatatatttttatttgagtaatttgcggcaaaaatacttaagttttctcccgagtagcagataaatacctaagtcgtatttttggcggtaaaaataccttccgtcacacttcttgaacttccgtaggta

SEQ ID NO: 66441 - DNA, 965 bp, Cannabis sativa
aatatgccatactaaaaaaattatgtaacttagttttattattatatatattttttataaaaaaatacgtgataaatatatttttataatttttattaactaatatactagatttggccttctattataaattattttatactaaaaatatatttaattacatttaaaaataaataaatatatatttttgagaaaaaaaaatattaaaaataaataatatttaattcttttatttttatttcattttaattttttttttatatttttgtttttattattaacaaacctcattaatctaaaaagaatttaaatataatttaaaaatattataaattatttttattaaatacatataaatttatactataaaaaaataattatataaaaaataaatactttatataacatattttttatatatatattcgtaattataataaactaaattataatattattattatattataaaaaaataataaaatttataatttatcaaatttttatcttagttcttttttacaatttgacatagtacatattgtgtcaaactgacccttattactcgagaactttacgaataattaaagtgcatacgtgttgatgtttgcatgacttttacattgtcattttatttttttttttttgaaacggtattatcatcagatattcagatacatataataagttctaatatacaagttcaagtataatgtcccaacactcgtgccgacatggacaatatgtgaggaataaattgaataataattaatatttattggtagagggattttgatgaacgtgttttttttttttttaattttactaaacgcatttaattcgataatcatctaaaccaaaagaaacatgacatataatattaaagaaatttataataaattgttgtgatctaacgccattaatatttgtgttaacgtatacgtactttgcgcttacacattaac

SEQ ID NO: 66442 - DNA, 592 bp, Cannabis sativa
attatttctccaaatgtcaaatatagagacgttatccgatagggaaaaaagtggtctctatagaatttttctatttataaattatctttgaatacataagaatatttttccttaggagttcttaaagtttagacaaaagtggtgccctactatagaattttttaaatttttttatttaaatttttatatttttaatttgatttctaaattatttttacatacataaaaatttagattttttaaaaattaaaaaagaatatcatttcttcataaaaaaacttcacaaattagtgaaaatcgaataatataattttctctaaatgtcaaacataaaaattatattcggtatgggaaaaaatggtccttaaaccctaaattttaaatcctatacatgagttctttggagtgttctgctattcatataaatgatgatatactataaacatgagattctcttgacataacacttttgttttttaaaattttatttttaaaaaaataaaaatgtgttttatagctaattttgtttttaaatgttaaaattagaacacaaaagtctgttcgcattctgagtgttggggaaagattagaa

SEQ ID NO: 66443 - DNA, 1157 bp, Cannabis sativa
  modified_base (1093)..(1125): a, c, t, g, unknown or other
aaaataatttccaacaaaaagatgtagagctgtttctttgtactgcttggcttgtttggttcaacaggaacaaagccctaaaaggtcaagctttcgacccatatcacgcaattctcaacttggctcaaagctttctggaagattaccaatcctcccagcagatttccacatcttcctcccgccacagtcagatagtggttcctccgtcttggtcccccccagccgtgggtctactcaagctaaatgtggatgcagcagtctccaaggccaacgggaaagcagggtttcggtggtatcattaggaacagcgaaggtctggtagtcgcagccctggcccagccacacttcggaggaggatcggtccctaccctggaagcaaaatccctcctcactatgctacattggtgcatcaatgaacactttttggtccatgaggtggaaacggattgtaaagccattacttatgctttgtcttgccataaagaagagatttcggtttttggtgaccttattcgtcaaatcaagaatactttgtctcagttccctgctgctcggctctctcatgtctatcgtgaggctaacaccctggctgataaactagcgcaccgagccctagggttagatgaagtagccatttggattgaagatgacccctgtaatctttttgagtttctttctttctagcgggctccctttcgttcaaaaaaaaaaaaaaaaaaagatgtggatacaatttttaaatgcagctcatcatcaaccccaagaacaaaaagatatctatatatatatattatataatattcatgtatttcaacaattggccaatatgtttgtgacaagtgatgacacttctagccacaataactagtgaagggtagcttcctttcccatagaaaagaaaagaaaaaagaaaactgagaaaaagaaaaggtcttgaaagtctcccagcgttgcaatttgcaacaagtaccaataaatatataaggtggctatccacaaaatcccattgtctcagctggctatccacaaaataaatctcattaatttttaattattaatataagaatgtttacatatatatctattctatatnnnnnnnnnnnnnnnnnnnnnnnnnnnnnnnnntgagaaattcatgggtgacttttatttatatt

SEQ ID NO: 66444 - DNA, 862 bp, Cannabis sativa
  modified_base (37)..(57): a, c, t, g, unknown or other
tttagaaagttcttatttaggatgtttaaacaacatnnnnnnnnnnnnnnnnnnnnncctggtaaaataatttctaataatgtctcatcccgaaagttcacaaaccttcaaagatgttcgaatttcgtcccattagtctctgttcagtcatttacaaagtgatttcgatgtgtcttgctagccgaatgaagaggagtcttaattttgcaatattgaaaaatctaagtgcctttattggtggtcgtaccaatcacgataatgctatccttggatatgagggccttcacagtatgagaaaagggccatttggtaatggatcaaaaatggcaatgaaacttgatatgtcaaaagcttatgacagggtggaatggacttccttgaagcaatgatgtcatgtttggggtatgaagatgcatggattttgaaggtcatgaattgtgttcactctatttcattttccattcttattaatggattggttaggggaaattttaatcccgaaagggatttacgccaaggcgatcccctatcacccttcctctttctcctttgctctgaagggttatcttgtttaatccacgaggctgaaagggcagggagaatccatgggctaaaattttgtttaatggaacaacggctgtctcatctcctatttgcggatgacagtcttgtttttctagaggccaatttagaggaagggtgtgccttacaagaagtgttgggatgttatgctaagttattcggtcaatgtataaatcttgataaatcagacctgtgcgtgggctgaaagataagagaggataaggcagaggagttgtctggccaacttggggtaaaattggttaaacatcacactaagtac

SEQ ID NO: 66445 - DNA, 602 bp, Cannabis sativa
tgtatgttatataatttttgttatccaatagtatagttgtatcttaaaataatatttatttattttttattttattatatataatattaatatataattttgctaacataatatatatatatatatatgttaattagtatgccacacatttaattattgttatatactttaatatatttttattatatgatgtattatttagttaagatgatatttagtcttatcagcttagacaccaaaaaaacagagaaaaaaatttgaacaagaaaactttattgaggttgaattaacattcaattgatacaagaggaagcaagtttaatatagctatagaaaattagttacaatcataacaaacacaactgaaactaactaactgaaatgacagctaagactaacaaactaacatctaatagccaatgaagacaaacatctttgatactccccattaagatggaccatagatatctctaagtcccatcttgtctttaaaggccttgaattgagtgggaaataatggtttagttagtatatcaacaagttggtctttggttgaaacatgaattgttttcacaatcctttcttgaacttttttcctcacc

SEQ ID NO: 66446 - DNA, 760 bp, Cannabis sativa
cccaattgtgtggactcctcctcatcttcatcaccattctctcaagactgctgttgtggaatttgcggcatttgtggatagtaaggctactgcaatacttttggcatttgcgggtagtacaactactgtgtgtggggcatatgttgcattgatggcatcgatgacgattgttgcatctaagacgctggtggcatgtgatgcatcgatggcatcgaaggcatctgctgcatatgaggtgtctgctgcatagaaggcatctgttgcaaatgtggcatctgctgcatcaaatgcatttggtgcatctgtggtgtctgttgctgcatttgtggtgtgtgttgcatgggaggttgttgtggcatctgtggtgtgtgctgcatggaaggctgctgctgtatctgtggtgtatgctgcatctgtggtgtttgctgcatcgatggcatctggtgcataaaaggttgttgatacatttgcagtggttgttgttgcatctgttgagtttgatgcatttctggtgtctgttgcatataataatttacctgcaactgtgacatcggcgatgacaaccaaggaaaaggggacatttgatgaggtgatgacaaaggatacataaatggaataggacactgttgcgcttggtgatattggaaattcccaggttgtgaagatgaagcaaacccacctccagacatttgaggttgaaatgtctgtgttggaggcattggcattccgaacaactcctcttcagtaggtagacgaacat

SEQ ID NO: 66447 - DNA, 2191 bp, Cannabis sativa
ttttaaaataatctttagtaattacagaaaatcgctaaccaattataagacgtcatctcatagtggtgctaggcactttttggtacccataataatgcttttaaaataatctttagtttagtgttaaagggtcattttaacaaactttcttagtcccctaaacttgtagtatgtgtagttggcgtgttagatggttagactaacaggctaaaaaatccttcaattaatgaaaaattatttaaaaagatgaaaatgtttgttaccataataaacagttccaaaacctccatgtccaagttctcttttagaatggaagttattagtagcttgagtgagatctttgtaagaaaagacaagaacacccccaagatagccacttgtccttccttgtacatcctctatattcatatgaggatcatcagccatggtttttgtaacaacatgtttttgtttcctgcgccacataatgattcccaacccaattatggtcaaaacaattccacaacctaaccctgaaaaatcaaagtcttcattgttaatgcaatggaacaaaatgcaatgaggtaatagagaaataattaatggaaatttacaaagaaaataagaatatgttacatgaaagggttatcaatgaaaatgagaaaataaaactttagttcaattaagataacggatcatcgagataggataaatctccaaaatgcactaatgagtataaatagcaatttggaattgactcaacaaactatgtaattacacaataacctcatactaataaaatggagcaggcgaaacacttatattcgagacaattgttgattattcttctgatgttagacttagattgatactccaaatgctggaatttaactcaattcctgccaagtcacttaattccttactgtttttgagttgtaattcttggagatattcaaatgtgtactgttgactattcttattaataaatattcaatttgattcattctcgaactaagtttattctttccattgctttcaattatgttgagtttttaattctttgattggttctagctcaaaatggtgttcttggacactgtgaccacaccaacaatattaaagaaattaattactaaaatcaccataagattaattcagggacatgaattaattaatttccaaagctttgtacaagaatcagatattaaatagaagagaattcttacctaatccaagtcccagtcttagtgctaactttggctttttcttctcatctcctgaaacaaaactcatcaagaatgtataatatgtcagttacagaaacaaatcaactgaattaacatcattaaaaatctcataactcatcatgatgtaaaatccttatctaaaaacttatttaattaattaccttcatcagttaaacacactaactgattttgctcattgttgtagcatttccctccttttaagaagtgacaacttgcacaatcaaaacttatttgagcttgaaacgtaaaaagaatcgaaaatggatcatgttcatgacttgatgttggaagtggaagctcaatcattggacattgttgttccattggagaacttatgtttttgtacaagaacaaatcatagtctctgtctctgcctctgcacttaatttgaccaaaatcttccaatccaacactatggctgcaattgtaaaactttagtgaattctcagctgttaagttgtaactgaatagcgatgaattgcgtcggggaagagcgaaactattgatagtttcacaatcattggcgaaatttgaagaaggcaatgatgttgtctcctcaattagaatcgaatttgcttgagagatgttcttaatggcataccaatgtcctccttcttttagttgaatctttggtttgttttcttctgaacaatcaacagtgaatactccacattcaggattggttttattgttgtaaggaaagctaattgagccaagtttcccacaaaagaatggtggacatttatcatgagctgagattgaaaggagagaatgagtagtgatgatgatgaagaaaacaaagagaggaataggaataggaataggagccatattcttcaaaatatcccaagaaagaaaatactcttgtgcatattactttaaattagtgaaggagaggttgttggtgtgcttgacttggttgttgactttgaattttctatata

SEQ ID NO: 66448 - DNA, 2572 bp, Cannabis sativa
tgaaaaaaaaaatgttaaaaaaacagtatatggggtaattccccaaactttttcatttttacacttttaaacattttttttttttgcagttttaaaaaattctatatagaaacccctgttgcaactagcgcttcaacctaaaccccaacaaaaaatcgtatagaaactcctattgcaactagcgctgcgactactttaaaaactcaaaccgtaaattttaaaaaataagttaaaaaaatagtatatgagataattctcctaaatattattgtatttctttttatttaattaatttaatttcctattttttatatttttgtatatccatagaaatttttatttacttttttttttttctcttttcattttttttctctattttatattatttataataatttttataacaagcgcgaagaaaattattttttctgttaaagttcttcgagatttgtatcctatgtttttgttaatgtgggaggttattcgtacactcagcaattattgagcaatgttatagtaagatgtgggtgataaagtgttataccaaccaaatctagaggcaccattcaatgctgctgcattcagatcgaggcaatcttaattcataaaacttttaggcacaagatattgatagagagacaggtaattagccaaaattaattgttagtgggagcaaaactgaaacaaactagtgaccatacattcagggagcactttctatcgtactattatgaaatgaacgtattggcaaacactattatatatttctattgtttcaaaatatttttatacaatctaccatttgatgctgagttttactaattagtgtatgcaagttcaaactattgggttagtacacaatctactatattgatgcttcttttgactaaaattgtatgcatgagattctgatagaaaaatgacggtgggaaatttttggaagagaaacatctagaattatgagcaattttgctggataaactggatggttattcatgtgactttagtacacagaaacatgttcatattggctccattccactaaggttagacagaataaaattcatgcatagtggacttggactagacagacacctcctcctattggcctagaagcacttgaaagaataaaagatatgttgcttcttgaggttttaatttcatgattctttgttttccatatctatggctactaaaagtactgtaactcgtattaacgcaaaatatacatgttgctttgcatacagacattttgtatattgctcatgaatgtaaatattcgtattcgtattttcctagtctaataatatggaatataggattttctttaatgaagtcagattgagttaataataataaccaatatgttgggtatcaatccaagtcccaaattggaataatatacaagagttgtcttggatataagtgttccactttcttcattagtatgagacattttggaaaggtgtctgaaaacaaaaccgtgagggcttagcccaagcggccaatatcatactgaggtagtcgctcaacatggtggaagagaggggcccaacaaatggtatcaaagccaaagattaattaggagcactgggatagtgggctgcatttgcgatgtgtagaaaaaaccatcaatgtgatgacttcgcaattgaagatataaatggtgtcttgtatcgaaagtctatctgatattgaggtagtcaggtgacgtgtcccgttgatgattacggcggtacaagatgaaaatcggtattagaacctgtgtcaaaagtcgtcctcacaaaggtgatggtcaagtattgtagtccttggtttgaggggaggattggaagaatacgagagttctcttaaatataagtgtttcaccttcttcattcatatgcgttcttttggaaaggtggctgaaaataaaaccgtgagggcttaggccaaagaagacaatattattctaaccaatcataggcattccataaaaaaaattataagcaagtgtctaataatgtgataatagaatcaaacattttttttttcattttagtaaatgagtagattcattaaaatcatcaaaacattacatcttagcagcacctcatgggaatatagtctttttctatagaatttatggtaaaatctttacaatgattcaaaccactccatatcaatactacttactgatttaggcataacatcttgtactctatataccattttgcgaaacatactctatacaactcttacttatatgacattcaatgaaaatatgagtcacactttcttcgtgaatatcacaaaataagcatgttgaattgttcatcatctgatgtttcaacaatcttggtttttaatctgtcacgaatgaccagctacatcacactatcataatatgttcagttatgacttatgagtaaaagtggtaggtaaccatttttaataataatcattctatccatgcatgttttgttagaaaaattaataataatctgaagattaatttgtatataatataaaacactataataatatataataattatatatgtattgatttatagtaattaccgcaatt

SEQ ID NO: 66449 - DNA, 860 bp, Cannabis sativa
tccaccaaactaaacctacagtactataacagtaccaacctctctttctcctcttctctaattaaccctttccagctttttcagttacgtacggcatatccaccttttttttccatttaagctcactccctctcacccataaaaaaaaaatcaagtaaaagatccttacacatcatcatatatactgtcaccaacagctagtttgtacaaaattttgattatattaataacaaaacaaaacagtagtgatagtacgtacattaaattaagttggttctttttctcttctctctatatatatatcatcatcatcatcactagtatatatttaattataataacacaaatcagcccccacaactctgatgtgtgatgaatagttgagagtgtacaaccacaacgtgatgctacagtactactagctcttgatcgatatcatcgatcacaaaactatttacattttatttttctttcgaaaaataacataaaataaaacaaaaaaaaggctatttatagctaataataattaagcttaattaattaaacatttcataacttggcatagatatttatatgtgtgtgggtatgggtaaaggggttttggtaaggttaccggcccaagcagagagcagcgttaacgtccaatcgccatgcaaaaccaccacaatccattctccaaacatcacaaggcagtgttagggagcttttgatctctttattcccattggtgtagcactgtagtctcactctgcatgtgaacgccgggcacgttagcaccgtcacaggcaacctctccttcataactaaccaaaccatcatcatcatctgatcatgatcatcaccaccgccacaatcgtggt

SEQ ID NO: 66450 - DNA, 723 bp, Cannabis sativa
aaaccatatcaaattccagacctgttcagacctgttctaaacctgttctaaataccccaaagaacattttcaaagcattaaaacaaagcttcatgcactagaacaaaaatcaccatgagagctccaagctttgagttcaaaactcaagcttggttaaatctacttaacatgcatcacaacttggtttaatctactcaaacaagcataatataactgcagaaatcaaacccacgcacaaacacccaccacagcaactaattcctcattttaccataaaaaccaagattttgagccaaaattccaaatttgcttaaaatcaactaatcatgcatcaaacctgctctattctactccatgaatcaaatttaaacttaggaacacaacaataaacaacaacaacagccacagccaccaattcatcaaacatgcaaatattcattttcttaaaactcaaggaaactaaagaaaaagctacaagaaattacttaaagcttaagcacttcaaaaccttgaagattcttgctggaaatgcagaaaaataattcaaaccccacctgctcaagaagtggccgaaagagagaaagagagaaaagcaattttcttgaattttctaagtttcaatatttttgaacaaatgagcaacaatgcataaaacttcctttatttcagctaagataaatgatataaatcaaataattccataacactaagtccactaaagga

SEQ ID NO: 66451 - DNA, 879 bp, Cannabis sativa
ctcttgtgagcacaataggaaagcaagttatgattgataaggtgactcaaaatagattaatggtgaaatttgctcgtgttagttgatatggatattttggatgaacctccaaaatcgattgaatttcttaacgaaaggaagcaattagttgaacaacaagtggagtatgaatggctcccatcaaaatgtggtgcttgtggaatgttgggacatattgttagcaattgcaacaaggataaaagagttgcttggaaaaagggagtgaatggggaaaagaaagaagtgagtcatgaagtggaagatgatgttcagactagataggggtctaaactagtctgcagtggttgaagttcagaaaggtaaaggggaccagattgataaggctcaaaagggagatgaagagaaaacgaaagcagctggggttgctatgatgcctcagatggagaaagaaaatgactggatcactccaaaaagaacaggaggcaaaccttctattgtgattcaatcaaaagaacaggaggcaagtttaaggaatgattatgatgtgctacaaatggatggaggtgatggaaacttggagactttttctaaaccaagttaagatggaagcttgtaatatgttaggttggaatgttaggggtatgaataagaaggagaagcatcatgctatccttgaagtttgtagagagaataagattggtgtggctgctctgtttgagactaaaataaagcatgaaaaggtgaaaaaggttgttgaaaccagtttccctaactggaattactattctagtaggcaaacttctagaaggattcttctcctttggcagaataaatttgttacggtgtcaattctttctgaattgcaacagatggtgcatt

SEQ ID NO: 66452 - DNA, 688 bp, Cannabis sativa
  modified_base (333)..(338): a, c, t, g, unknown or other
tttttttcatatcgatatttgttagttacaatatcatctctgtaaattttcgaatagtttacaataccgaaaatagagttcctcatattctagtttaggaccggccaagacaaattaaattttggagccctcaaaaatatataaaaaaaaatataaaagaagagtgttatgggatttgaatccatgaccctggacattatgccatccacctcaaccaactaaactataaatatttgttgcttataatacacttaaattttgcttaataaaagcctaataattttttttttattatgggcccccggaaagtgtgggccctaggcacgggcctannnnnnctatgcctagggccggccctgagtttaccacatgtgttcaaaagatttcaaaactatttttgatattataaactatttgaattttttcaaaaattaacaggcataatgttctaaatattgtaatagaaggtcaacagtagcattcctttatatctaaaagatttaactcataaatagtacttagctagatacacttagagaaatactatttgaattataaatatatatatatatatatattatttgtttaatatatgtgtgatattagtattattatttttattaaattttaaaataaataaattatatcttaataaattattacatgaaaaatacaaattgatacttta

SEQ ID NO: 66453 - DNA, 1156 bp, Cannabis sativa
  modified_base (458)..(460): a, c, t, g, unknown or other
gagagagagagagagaagagagtgcttagtaaaagaagaagagtgatcgagaaaaaaaaaaagaactttttttattaaaattatttatttttttatgttaaattaatttattttaatttttttaaaagaataattattatgtgaaccagtaaaattgtgctatgtgtatagtatgtacatatgaacagtccactatggcacttaacagttcgatttggatggaaagtgtaaatttctaatgttatagcaattttggggggctttgctgccaaaatttaagttttagaagttaattgctctcaaagtaaaattattgaaggttttgctgcaatttactttatcttctaatatattactagtacaaaaggtgtttttacagtgcccactatttattttggtatccattaaaaaaattagtccaaattttttcatagttgtgtatattatagttatttaannnattttgtaaaattttaaaaattttggaataaattacaatataaaaactaatgttaaaacagtttattttacacatgtatataataaaaagtcacacatacaacagactgtttaaaccttgttttcaatgtgttaaatatttctaaatttctcaaatattttgctgaatatatcttaaataatcacaatgtacacgattataaaaaatatgttattaaattttccaaaatactgaaacaaatagggatgcatcgggtagaggctcaagaatgtagattatcttgagttggtcaagagaaaccttaccttgtcttgccatctagtaaagttagatccatcaaacctatccaacccactaggtcttgattcatcattttgatggtctcaccttccattgaagcaaagtagggaaataaataagcttttaattgttggaaattattgtgctccaatagaatatactaaaccaataagattgtaactctatgacaaacaaatcatggactaaatagtgttacaatacaaacaaaatatacacataaaatatagaatatagagatgaagaaaagaattacaactcaaaacaataagctacacataatacacaatatataaataacatatatatatatatgaaacacttcttaatgggtaataaaattaataagataataatttaataaccttttatggcaag

SEQ ID NO: 66454 - DNA, 1447 bp, Cannabis sativa
aggtgtttgtaccagctcgggattgctttctggtatgctttctttcttgcctgtgtattctaccacaaagtctgctaaggcttggcctttgagtgctgttcggggttgaaaagtgatttaatactggcccaactctaccgcccacttgagtagccgtccagacgcatctgggttttacagtatttggcgtagtggctgctcggtgtatacccgaaccggatgagcttgaaaataaggcctcaacactactacaaaatgggctttttgcttcagtttttaagtgacatataaagtatttgcttcagttggtccaaccgacattataaccgtagacgcaaatactgtttttttttgcttcagttacgaaccgacacaaattgattttttgcttttgttatgaaccgaatcaaaaaaaaaaatatttttgctttcgttcataaccgaagcaaaaaatcagtgcaccgacgctaatatttttttgctttgattataaactgaagcaaaagcatttaaaaaaataaaaaaaaatctaaaaccaaataaatacaatatcacatcaatcctttaatatacctacaaatttttattaactacaagagagctcataatgatttaaatatatatatatatatgtagagagagagagaaagagttttagatgtaaacaaaacaatgaaataagtatctcaaaatttgtatgtacatcaaatcaatatctttattatatacataataaacattgattaagttagttattcaaatttgtatattattgatatacatagatacatacataaaaatttgaataacagtcaaagtttagcaatcttaaatacaagatggtatcagataacaacttttgttgttagaactaataattgatcaccaaaaaagcaaaactagtcaatccaattatatagacaaaatcttcaaaagaaaatcaaactaaaagtaagcaaatgaagttacaaaaataagagaattaattgtaagtgtttatttagaaattgacttgttgcattcttcaactcaaattatttccactataaaatactctagctgattggttctgtatcatccaagtttgtatgtagctcaatctgagaacacttctaagcttaagacaaaattcgatagatttgaaatgcaaacagctactcaattatggtaatagcttgtgtttacatgtctcacaaaatatgtttgttcattttttaggtttgattgctgatgctgccttcgctgtctccactctttcaatttattccaattcctgttagtgatggccaacatgtaggattacatattgtagctcaaatattgttaccaagatcattaagacccttgatattctatttcaaacctttttaacagaccaagctagcaaataacttacatattcacaagtaaaaaatgggaaggtgttaatcagaagggaaaggtaaac

SEQ ID NO: 66455 - DNA, 1102 bp, Cannabis sativa
tattttaaaattataaatttattttattatatattttcttttcttttttttcattttttttttcttgtttatctttttcatcatcccagccaaacacgagagttcaaccgtagctccaccacgatttgtggcctccattcatggcctgcggtgatcagagcaccaccactgtcgcccacatccgagaaggagaaaaggagaaagacggacaggaaaggcgctcgagggtggactgtcagggttcgggttttgatttttctaggttcgacgagaagagataaagacgagatagagaaagggtgggctcatgagatcgggcaggagggagaactgggttttgggacctggtgttgcaagtttgttttttacagaaaaaaaccccaaaatatagtgttgtttttaggccagattcgtggtgtatgcgcgaggaggagatgaactcttggtggtcttcgactgtgaaggctagatctgtggtggtggcctctatttttgacgacgaaaggcaaagcttcgtcaatggcaaaagaacaacccaacctcggcacttttggttcttaatacatatatgaatcataacacacagtatcttatcgcacattgtcatcacatacgataatctactctcactcatactgatcagacatgaagtgtaacttatcctacctcgagctgttctcacactcgactatattacatattaaaataatttaaatattattataaattaaaataatttttttatttattattttttattattatataaaaaaaatattataatagaactgcacaaaaaacagctatattccttaatttattttaaaaaataggtaaagaaattgttgaaatgctcttaaagcactaatagctcataaagtataaatataaataaacattgttaaaaagaaactccatcaagctaaaatagttcaaaattttaactcagaatagtgtttgttcaaatattgtatcttgacatatatgtaaattttgatatattttttaaaaaattcttatagcattaattacaaatagagcagtaattaaccgattattttaatttaaatattcatttagatatcagaaaactattttacaa

SEQ ID NO: 66456 - DNA, 669 bp, Cannabis sativa
cttacttaaatattttcatatatacagtattaacaaattgacactttattataataataatctcattagaagaggaatgttaaaaagcgccaataagagtgtttttattacatttacaggtttgttttgttctcttaaatgcaagtgagaaagaactagctagaatcacttgaactacagtattttaatcacaaaaggtaacattcctaaagttttcgcttatttcaagatttgacgtatgacattattataataaacagaagttaatatatatatatatatatttttaatattgtgttttgtcattttaaacttaatttgtaaaaattattaattgaattgtctattttgttaaataatacaaatataactctaaatttaatttttgataatttttttaatataattaatttaaagataatttttagctcaaaaaaatacataaaatataattagttttatcataacacttttattattaaattttaattttgaccaaaaattagttcacgacactttttagtactattttaaaaaatataagatccaatttattatttaatataataaaaaatttaatcaataatttttataaaatataaaatctaaaataatatttacttataaacatatcatgttagatatatgaaaataaaaataaataaatga

SEQ ID NO: 66457 - DNA, 5518 bp, Cannabis sativa
  modified_base (5276)..(5276): a, c, t, g, unknown or other
aaaaaaaaaaaaaaaaaagtgtctgtccttcctagtgctctgaggcaattactgtccactttagtttttttttttttttttcaatttttgagtttactttttaattgtttgtccagatcttcttctgtgttcatcctttcctgcatatcctatgggtcctttcattaataagatgaaatcttctatgaatttgattgaaaataaaaagactatctttgccattactgatgatggctcttgtgaggaaactactcctcaagaatatactatgttggctcgagttgtcacccataagaaaatttgactttccacatttcagcgtcaaatggcagaatattgggatggtaggttcaaagtgaatattaaaaagcattattttggcctattcgtactttgctttggtgtgaaggtgatttgttacgtgctctagacaaggaaccaaggaatttctaaaattaccacattattctttatcacccaacagcgctgcagaatgtcactccagaattgaaggtcttctcctccttttgggtgcaagcatacagactctccttccttagcaagtcaagatctttggcgaagtctttggggaatctgatgggtgaatttttgactatccatgaaaactctttaaatgaaggttggggtccgttttttgatatccaaaagtccagttggatattacaaagcctttgtttcatgaaaaaatgatttttttacccaaaatttgggaggacttttgggttgaatttcgttatgaacaccttcctgagtattgtatggagtgcggaattattggtcacttatatcaaaaatgccagaagtttttagaggatctcgataatggtattgaacctaactttccattcggaccaatgttgaatggatctgcacttccatcatcagcatatgatcgctatcgcaccgatttctccaaaaggaaatgcttggacgctccttaagcgactagccagaacttcactcactgcaacaatacccaaaattcttactcgaccttctgcacattcgaagcctttgttgattggagagggttctaattcacagaccttaatcctagatctgtacatggtttttctcctgctacaacctctgctaatgcctcggtggagccttccattttctcccgcgaaatccttggtcaatctacctgtttaacccctagtttaacccctatcttggtcctttctactcctagtaacaacgaatacgattgcgtttctagcacataaatgaattcatctgcctattaactgccatgcttaatgcttctgtcactaacttctcataaatctacacactaaatttaggagacaattactctgttaaatcttcctcaactttttcttctcatgtttatgcaacctatccaccattgcctactttaaataccactaatttttctactccaatcactatgaccatgcccttatctaacattttcaaacactttaccaataactaatcccaccattattcttaatttatcttctcctgttagtagtgacttagaccaagaaagtatccatcctaatcgccattataagaggcatcatgatccaaaatctttgagacaaactctgaaaacatgttatgcaactaatgtggttgaaacttcttctttgtcagatgaagtgcagattatccagttagtttttgatgtacctactgatcctgctagtgtgaatgacaatacagtggtgattgctatgcaatcccgcttctcatcatgaaactcttaagttggaatgcacggggtttggggagcccaagtgcattctgacgtctctgattgctcattcatgagcaatctcctcaggtgttgcttcttatggatacgaatgttgatgctctttctcgttttaaaaagtatttaaattttactaatggtttagaagtacctagggttgggttgaaaggtggaattatgttattgtggtaagatgatgttgatgtaactcttctttctatgaatacaaatcattttaattgttatgtcttatttgatgatggccctcgttggcatctttatgctgtttatggatttttggaagcaattaatataaagcatacttatgctttaattaaaagattggccgatgttcaatggatgttaattggtgattagaatgaaatttttttacaagcacataaaaatggcaatccacttcgaactgataaccaaatgcaagcattttgtgctatcttggaccaatattttttgtttgatttaccagttgttggagatgattttacttgggctaaaaataagaaaaattctacttgtttgaaagagatgattgattggtgttttataaaaaatgtgtggaaggattctttacaactgctaacagtatcacatttggattactatggatctgatcatagagttcttatagctgaaattactttctttcaaccacaagatcaatgtgtatgtagacgttctcgatttagatttgaacgattttggttgaatgatgaggaatgctcaagtattatttcgagttgctggtgctttagtgaagaggatgattttctactggtcttgctttgtgtctgcagagatgtgcaaaacaattacaaggatggcatcatagaaagtttggacagatgaagatagatatttcccaagcatagcagaaagttcagtagttaaattcttcaacaacttcaagcttggatcattctcaagttattcaatcagctgaagctattatagatgagttgttggccaatgaggaataatattggtagcaacacttagagtagattggctgcaatcgggagaccataacacaaaaaattttcattcaaaagcatatgctcggaatgcaaacaataagatcaaagctctttatgatgattatggaaatatcacaacttctaaggaaggaatttctaagatggttgctgattattttactactcttttgactgcatctgaagaggaccattgggctttatctcatgttttatccacaactccaacaacaatttcttcataacaaaatgagttattattaaaaaaatttactgccgatgatgtctttacagccgtgaaaacaatggggtctgacaaaagtccggtgttgatggagtgtcagctatgttttattagcataattggcatattgttagaaatttggtaacaaaggttgttctaaatgttttgaatcatggtggcagccctaaaatttttcataaaactcttatgacattgatttagaaaatcaaaaaaccgaagacaatgaagaattttcgccctattagtttatgcaatgttatttcaaatatcatttccaaaatgttggccataagtttcaaggaagttctccactcggttatttgtgaaacccaaagggcatttcttccaaatagattaattacagacaatattcttgttgcccttgagatggtgcacagtttgaaacatagaaaaagaggttccaaaagttatgttgctcttaaacttgatatgagcaaagcattcgatcgggttgaatggtctttcatagcaacagttataggaaagatgggatttaatattcgattgatatctctcattatgacatgtctacacactatttctttctcattcctcattaatggtgcaatttcaggatcaaccattcctcacagaggcttacgccaaggtgatccactctctccatatctatttctaaattttttagggtctttcacgtttactccagtacgaggaacaaactggtcgactcaaggggacagttgtgtctcgtcgttctccgactatttctcaccttctaattgcatatgatagtctccttttctgttaggcaaatgatcgatcttgtggatcgattaagagagtgcttgatatcaatcatcgcggctgttaagaattcatttaaacaaattttaggtatgccaatatgtacgaatgtcatgaatcatacctcggtcatcctacttatagtgatcgagacaaaaatcagttgctcagtaacatcaaagagaggatttggaaactaatgcatgcttggatttaaacaaaaaatcaataaggggaaaagaggttttcttgaaagttgttgtgcaatcaacacccacatatgcaatgagctgattccaattgtcttctaagttttgtaagcatattgagactatgatggccaaattctggagaggatcgactgcagacaataagaagattcattggaaaaaaatgaaaatttctctactcatctaagatggaagatggcatgggtttcggatcttttgttcattttaaccaagctttattggcaaagcaagcctagcatattttcccaaacctgaataatttgttaagccgtgttttgaagggtcgatactatcctaacaatgattttttgacatccactggtggtaatcggtctttattaacatgacagggaatcatttagggtaaggaattattagctaaaggtttgagactaaagtgggtaatggtacaagtataagatgtggtttagatgcttggattcctaggcattctatcttcacgccactatgttagcccaagatatgtttccactaagggtaattagaaatttaaacaaattttagaaatttaaacaccccaaatttttacaaatattcaaatttaatacaataatatggataaacacaagtataaacaaatggcaaacttgaaatgtaaatagtttagggaaagaaattctaaactcttgatttttacaaggttcggtataactaagccacctacgcccttagttttcaaagccatggacctagctttgagttcaactattgagccaaattaataggcttgaccaacccttacaatcaggaaatttttcaccaatatttttcccaaacctctcacaatagctttcttccaaggcctattagcctcatcggaatgttgaagtgccaatctcactaaacgggtaatttttccactggtgccaacttaacctccaccgatagttttctaaacgactataaatgtcttcatatttttgaagtgccaatgtcactctaagtttttttgtagtgccaacctcactcttctcggatttcttacaaaactggtgatagcctcacctacaatcacgttatttttttagtgccaacctcatctctcaacataatggatatgtaattttgaaatacaaagcatgttaagctttgtgccttaaataaaacttcatttcaatgtaatcttttatattcatttatcaataaagaaacagatttattttcattacttntttaatgtgttatttggttcatgttattatttagttattaatttgatttataaattcatccaaatccttatcagattaatattcttatttattgtgttatcaaaacagtaaaaagtaatcaagattatgtgattaaatgtattcctttctggggcatttgttaaagtaagcttgggttggatgtatgaagtatgcatcaaaagggactgatattgaatttggataagataaaataaacttat

SEQ ID NO: 66458 - DNA, 1278 bp, Cannabis sativa
aaaaaaaaaaaaaaaaacacagagcgaggccttaaattgcaattcaaattcacattgtagttcaagcaacaactactggagcaacccaaactctaaaaaaaaaataataataatatataaaataattctcctaattataaaaaaaaataattacggccctttattatagaaatgaggtgagagaaattaagtaaatactaaaatgcaaaagaaatgttcaatttatttttgtttttaaaatttcaccatgtttttttattatttttttaattaaaataaaaaatatataaattaggcactcgttaaaatttattttaacaaaaaaaaagtagccaacttcattgagaatgtcatttattaacaaatatgattaattagcgaaattttactctcaatatatatgtagttaacttaatgtaagaagctcgtgcaaaattaaaagtgattttatttgcgcttaataaaactcaagaaagcataactaagtttagaaaataaaagtctacaatcattaattacaacactcgtaaaactttcattaataacaatatagaaaatagtaaatataaaattttgagtttctattaaggaattcatttaataaaaatatttgcatcgtattagttagtgtaactatcaaaataactttttttaagtacacatctaatcacttaagattgaaaatgaatgtaagtgtaagtatgagaatcaatttattattttacttaaaagatatacttttatgattcacattagatgttctaaaatgaagattttttaaaatatttaaataattaaactaaaactacttacattaaatgtaaactcttctctattttaaagtttctttaaattttactatgcgtgttctatatttataaaatattattcattgctctaaacatgttttattaatgaaatttttacactacatactgaaattttcaacttttttactatgggatagaattttttcaaaaatactgtatttttttcaaaaaataatgtgtaaattttatactgtgtacagtgttaagttttcatggttgttttttagttgttccactgttgttttaattaatctattttgttgtttgaaagatagtatttttgtaaaaaattcagcataacagtaaaattgtaaacttttgctcaaaatccaatatttttgtaaaaacccctttattaattgtttggagttttaactttactttttatatgaggatatatgtaaatattaatagtatatgtttgaaatgagtaaaatatattaaaatt

SEQ ID NO: 66459 - DNA, 910 bp, Cannabis sativa
aaagcttatgccagaaggtcgaagcagtgtcttcataccagaaccccttgtgaagttgtaatagaccatatgcactcttaatgatgttggcattagtttggttcggtagccaaggctcacccaaaacaaaaatagattgaccgttccccacacaccatctcgtaccattacgaactagctcttgtgattcaagtattctttgccaaacaaaacttggattggaaccaagttggggggacagaaaattaccatttgagaaatacctggccttgaaaacttttgaagccaatgactcgggtctggtgaggagtctccaaccttgcttacccagcatcgccaaattaaaatcatgcaagtcacgaaagcctaaaccaccccctttcttatttttgctgagtttatcccatgacatccagtgtatacctttgcgtagatcctttgatgtttgccaccaaaatttggtcatcattcgctcaatgtctctactaatttccaagggaagtaagaacacactcattgcataagttagtagggcttgaagaattattttcaccaaaatttcctttttcgctcttgacaaaaacttgccttcccatccttgtatttgtccacagactttttctttaaaatatcccaagaccacagtcttatttcgagacattgtactagggagacccaaataaaggcttccttctgccgcctcatccatgtgaagaaatgagcatatttggctcttcaaattagcttccatattaacactaaaaaaaattgaagacttagcaaaattaacttgttgtctagagaccaacacgaacttgcggagtaacccttgtatacgggctgcttcctccattgtagcttagcaataaagatacctattgtcggggaagagcatatgtgatactcttgg

SEQ ID NO: 66460 - DNA, 727 bp, Cannabis sativa
ttaacctcatcttgaagcccttgggcgcgctctttgcctagcaacctcctcttttgttgaacatgttggatgtttggattaaagttgagtgcacgagtcatcacggaggggtcaatcctgaccatgtctccatgtgaccatgcaaaaagttttaggtttgcccttacaaatcttatcaatattgatttaattttttggcttaaagcctttcccaatcttcagtcttcttgttgggaaagtgggatcaacctccacttcttccaactcttctacaggtctaaagcttcctattgggtggccaaagtgaggatttatgcatgtctccccactttgggctagacttcattgctttttgttgggctattcttcagagctcttggtgagcatcctctccttcttggctttagagaggaccaagttgtgacagtgacgggcagactgttggtttcccctcacacatcctctctgatgccttgttaggaatttaaggcataagttgtagatggatgttattgccttcacgtcattgagggctagtcagcttatcatggcgttgaaggccgatgtaatgttgattacgatgaactgagccatcaaagtttttggtggttggattttctccaactatgaagggtaatctgatataaccgataggtgcgatgccttggccaaagaagccatacatcacttgattatagggtgtcaggtcggtgagttggagccccat

SEQ ID NO: 66461 - DNA, 661 bp, Cannabis sativa
aaaggttgaagaaaagtcagggatgaaaaatagagaggcattctttcttgcttcaacattctacgagtgttcaatataatcatatcgctatttctctaaaataccagaacaaaggttataaaggttgcattacctgttctaggtcattcgcttaatttataagatcagatgacatttagagttaattattcgagaccacgattttccaaattatacagtaccgtaaataattttttcttactcaccaacttatgaagcaaatcaggttgctcttcaaaaaggtcaggcaaatgctttttcatagcctcctctagtttagaggcatctctcccagggacaccataccacatctttggagcaccccaatgcaaatagtttaaggagtataaatggtgatcttcaacatgctgctcatgaaaaaaatatacgtgtaaccaaaaaaaaaaatcagacactcttcttcacataaaagaaataaatgaaagccaatgtaagcaaaaaagttgcagataattagaattttttttttaaaaaaaaattattattattattattattttcttcaatgagtattgtgataaaaattggaaattgcacctcgccaggcccttctctcactctttaaaaaaaatgaaatagtaggagggaaaattcactaagg

SEQ ID NO: 66462 - DNA, 1365 bp, Cannabis sativa
tatgtaaattttcttatatatacatacacagcatgcatgatgacatgttatgaattataatatttacttagttgtatacatataaatatatgtgcatagatatatataatatatacacgtaaaatcatgcatatattttgttattaatatatctatcataaaaaataaattaagtaacgtacgaatatatacgtatgcatggttaaaaaaattatatccatacatataattaagttataattgttactttataattatatttatgtttttttttttctattttagagagataataaaataattttcctttgattatgcatgcatgcaatgaactttcatttattttcaaaatgagatacaaataaatacaagatataaaatcgtaccagagatcaaagtctttttgatcatatatatttcagacatatttattaattatatattagtggtatattaataataataataataataatacacaaactacctaacgaattttttatcgacacaaatattgatatttgtatgtaataataattaattagtattatttatacatatacatgcatgtaaaaaaattcaacattgaaccaatataatatagttatattttttttgccagcatgcttattataattaatttaattattactgcatcataattaattaataaccttattacagaacccaagttgaacatcatatataataatattgatgatgattaactaataattaatttaataactatatatcaattaaaaaaaaaccactccccaccgcccaccatttttcactcttaacctacctctttttttttatatatatatttatttacttttattaattttctttaaaaataattaattaaaagagtaatttgtagcataaaaaagtttaattctcgattgtagataattaaatacttaactttaattttttacggtaataatatttaaactatattttaaaatttttgtaagtacctaattattaagtgttgttttcttattagtatatttaaattaattttcaaataaaaaaaataataatttaatggtttggattaataaaaaattgtcacatgtctaatgacttgacacttaacagttatgtaacgtcaaaaatatatataatttaagtattattaatgtaaaaaattaaatttaaatatttatgatctgcaatcgaaaattaaacttaatcataaattaatctaatcaaaatatattaaagaattatatatatgaatatagcttgatttagttttttgtttgagtttgaatcatcaaaagatgcctcttcatgtcggtaataatataatttatatctgttaattcaattttatttatttatttattatga

SEQ ID NO: 66463 - DNA, 706 bp, Cannabis sativa
tggatttaatagaaattgtacattaaatcataaacatgaaagatacatgtaaacttctaatcttctattaataaaaaatatgattatatagaaatgaattttatttaggggataaaatctcaacaaactcccacttgcactaacataaaataagaagtgtatttcaattaattcttcgtcttgatattcaaatcaagtgtagtgtatttgactataccaaaataataagaactgtaaggctgtggtaagaaactactttctcaccattacttcctttatgttcgtaaatattatgcaacattatttttctacatgcattactcctctaggtatattgaattcttcactgcttattaagtgcatttgaatgtgcagaagacacatctctaattctatccaaaatggaatagagataaaagttaagaactttctccagtttgaataactttacagtattttttcaaagcaacaaagttgtttagcttcactgatggaactaagttattatagatgggttttacatccttctagaataatttctccaccccagagtaaccaccatctctgatattaagttctgagttggtgtagatataaagattctaatatagacccctatcatctaacatataggtcacttttagaattcttacttgattgtctctcaatgttccttgtttgattacatctttgatggatctcactc

SEQ ID NO: 66464 - DNA, 599 bp, Cannabis sativa
ttattttatttaaataaatattataaaaaattattaactaattatagagtgaaatttcattgtggtgctagacactatgatgccaactaacaatatagcaatgctcttaatttttttttttttttttttttttgagctagctttgctaaaagtagtgctcatttttagtgagaggttgatagcaaaatggcgttttgccagttgtgtaggacttggccttactactcactagtcagtccaggatgtgataacagcaagagaaaggctttttgtctttcttttttattctttttaatggcaaaagcatttgtgaactacgatcccatgggcccaattcaagtattgtgatgctgttagtcagtgggcctaacatagcaaagtccaaaagtattgtaaactgcgacattatggacctaacataaacagcccagattctagtaacatatgaaagggcctgaccgaggcctctattgtttatgttatagcaagattggaagtgcacaagtgcacactttttttttattattattattattattttgagaaaacttattttatggcaaaaattcaaaaagggttaacaagtatgaaaaaaaaaa

SEQ ID NO: 66465 - DNA, 1404 bp, Cannabis sativa
ttattaagaagaacaacataatggcattattgtgaaactcatattaattaattaaacagcacaaagtcttcacctttaaactattattaccttccgaaaatggttcatcaacaaaaccatgaaaaaattggtacatctaaatgaactaccaaatcctattttaaaagttttggtttatacctcttgggttacacttattgtcatgattattatcagttcaatcttcttaacaacatcattcattcaccaaaccaaaataactgacatttttcttaggaaactttttggtttctaaggaaaactcaaaacaaaacaaaaatggtatcttcttctaagctcttctaagatactcatttgcatctctttggacccaaatgagaggcaatcacagttcttgctcatccaaatgatgatattgttgctgttcatagtcttagtgagtatttgaatttcatgtatacatataaatatatatatatatatatatatagatattaattcctaggagagccaaaagctaaaaacaaaccagagatcacaaacatgaataacttagtcctttttttattagctatagtatgtctcagtcttcacattacataatcaagaagaacaccataatggcattattgtgaaacttatatcaattaagcaaacacaaactcttctttcttctaaactcttaacaaaaccaatgaaaaaaattggtacaacaaaatgaagtataacaaacctcattactcatcaagctgaagaagctcagctttcaactgctcaatcttaagccccattgatctcctcaatgcagctttctcactctccgaaacttttgccaaaagcccttcaaacaagtccaaaacttccttaactgccgcgcgagcacactcggcctcttcattgaaataaacagtctctttggattccatagccatttcaatctcatcccttgcttctgcaaacttgagatttatcaagtccacctctttgttctggtccaactcaccaccacccgacccaccactgtaatttctcagattctgccgagttgagagctgggtcgagccgtttgagagaatggaatggaggaaacggtggatgtttgagattaaagaggtgggtgtacggccgggcttcgatgggtctgtggcgcgttgtggtgagtcggttgtgaacgagttgatggaaaatgaagaagtgggttttgatatttgattaagagggtgttcgaaaatccatttacggactgaaatctgtgaaatcctatgcattttcgtagccatctttttttttctcagaccaatttacagagaacaaaacaggaagaagaagaagaagaaggttagcttatgctattctttttctgggcttttaatatggcccaaattgagcttggacttctttttt

SEQ ID NO: 66466 - DNA, 685 bp, Cannabis sativa
tcatattttaataaaatacaaataattgctccacttaaacatacccatccaaaaaactattaaaccacatcaaaactcttctaatcaatgtattacatcatataatcattcaatttcaaaattaaattactaatttcaaaaatcaaacaattaatttcatcataattttatgaaaaaaaaaatctaaaactttaaacacaaaattttctcacataaatatatctctaaaactgaaacaaatcaataaatcgataaaaatatacaattatgatgaaacaatatctactcactaaagatttcaattaactaaaaaaatacttcgcacttctatttcaactagccttcatacagattctaaacgcattaattatagatcactaactatacaagctaaaacagtaaagaatcatcaactcgtattttaataaaacaattaaaacgttaatgtaaactcaaaataaaaatcttacaatgtgttatataaatgaaaccttcaaacaattaggtaaaaagaaaaagaaaaaagctttcataaaatattccaaatgaaaaaaagaacaaatcaatggtatatctttaccatgtgtacaatgcatgttgtcttacatatattccaagttgagagatatgggtaagaatgttaataaactagaaaataaaagtcaaattgtcaatacatgtaaaa

SEQ ID NO: 66467 - DNA, 2697 bp, Cannabis sativa
taaataaattatttataataatatgaaataagataatatatttataattttactatatattagaattatatttttaaataactatttattatagtattaaaataaaattaaattagtcgcgcgaagagcgactatattacctaattattatatagtttgtaaattcaatttttccattaattctactctccttatttagattttgatcgatatgttatttattaataatttttaatatatgggttaaaaagttaaaatttacaatactttttataatatcaatatgttaaattttaaaaattattatataagaaatataaattgatactttatttataaaattactttcataaaattaggacaatatttataactaatacttaattggactaatttggatattcgcatgtgttagtcactccttttatcatttctcaattaaggatggttaataatgccacgatgttgtgttgtgagttgcaagagtaaaaaaaaaaaaaaaaagttaagtccctccaacagaatctgttattgccagttgtcaaaatcacgtggtgtttcctctccaccaattacgcaaacaataacccctacctcgcttttctcatttctccacgtggcatcatcccatttgccactgccttcacagctggacatattctcctttcctatatatatatatagcttttcactctattctcaattcaatccaatataattaaaaaacgacaatggttggcgttttccggcgatctctatctttcccgaacaaaatccccagcagaacaccatcaaagccgtcaatatctcatcacatcagatccatcagtcttccatgcagatctcatccgttgatttcccagctcagggacggcgttgctgagcttcactgctgggtaacccaaccggaatgtcggacctccgtttggctgaccaacgggttgacccgactgagagacctccacgactgtctccacgatattcttcagcttccacagacccaagaatctctccgccgattacccagctccgtcgtagagaatcttctagaagatttcctccgcttcgtagacgtgtacggtattttccagacctcgattctggctatcaaggaagaacaatcagcggcgcaagtgggtttacgaaagagagacgagttaaaggtttctctttacgtcaaagctcgaaagagactggttaaagaaatgggaaagcttatcacggcggtaagattcattaacggtagatcggcaccgccgttagtttgcgttggcgacgccgaattatccaacgccattggtgacgtcgttgaggtgacggtgacggtttctttggtgctgtttaacgtgatagcgacgtcgtttggatcaaaaaagtcaagtaattggatgggactgagaaggttgaagaagaagaagaagaagaaaggtgggatttttgttgaagatgaagggattgtggagtttgaagaagtggaggcagagtgtgggttggtggggttgaggaagaaaagcgatgaagagattagaaaagcttcgaagaaaatgcaggaacttgaagccattattggtgggattgagatttgcggagaaaggatattcaggggtttgatcaatgctcgagtttctttcctcaacattctcacaatgtagaaacaaaaacaaaattattattattattattttttaaggaaaaaattaaaaatatttttttagagatattaaatttgtgctgtttatttattatttattttttttattacgaaaaaaaaagagttaaatagagattgagtttttgtacagtgataatttttttaatttgtaaaatttatatatattttttttaaatattttaatatttatcatacttcaagatttaagttcacaatattaattattaaatacttcatttttttatagttttttttttgcaaagaaactagaaaaacatttcattcaatgaagaaaatttttggtgagcatatgaagacttacctcctagaaattaagaaaacctatacatttgttatcaagatctagcaagaacatgagccgattgatttaacaatttaggaacccaatgtacactaacagctaaagaatctacatgttccatcaacttagaaaaaaacaaagctcaagtttcactgaagtggagacgcagaattgatagtaattgaaaaaaataatatatgattcattaataaataaatctcagaccgaaccactttagaaaggagattttcgcaaaaatactgaattttaaataaaaatttacaattttattgtcatacggaatttttttacatttttttttttataaaacaaacgtaaaacaaaaaaaaaaaacaattaaaaacaatagtacaaaacttctcttttctttttcaaatgcatgcaagttatgtctattgacataatttgagagtattctctggtttttctgaattctgttattttgtgaggtttgtgatcgtgtacaatggcgtcatctagtggtactgtgaaacaaattgaagagttgtgtgcccaagttaatattgatgatgaggaggaagtagaattagcttatgatgaagtggaacaaaacgtggaggatgtcgattaccggtgggcgattgtgggaacttttttaactaaaagaggtattgatttcgatgttgaaaaactgtgtttttgcaaatgtcagttgtatata

SEQ ID NO: 66468 - DNA, 1210 bp, Cannabis sativa
cgaggaagatggaccagtcttctttcctttagctttccctttcccggccattttcgccctttttgccatagctccggtgagacaccgaaagggagagaagagcgagagagagattcttgtttttttcggcctttagaatcttgtactgcctgtaataacagtagtaaactttctgaatttgacatttggcacaataggctagggcacccctccaagtccattgtgcattctgtactcaaatcatgtaatatttcaattgataataaagattctaatgttgtttgccctgcttgctgtctaggaaagatccacagattgccttttcccaaagttagcacaactgtttataatgctcccctccaacatgttgtctctgacttatggggaccctcacatactgtttctaacagtggctacaggtactatatccatttcatggatgtatattccaggtttttctgaatctatatgctcaaggataagtctgaaacactaaaagtgtttcaaatgtttaaggctgaggcagaattacagttaggcacacaaatcaaaatggttcaaacagattggggtggggagtttagaacctttcctaagtttctacaacaatttgggatcctacatagacacccttgtccaaccacacaagaacaaaatgggctagctgagagaaagcataggcacatagttgaaaatggcttaaccttgcttgctcaagcttctatgcctttaaaattttgggatgaggcatttaggacagctgtgttcattcacaatcgacttcctacacctgtccttcacaaaaagactcccttagagacagtgtttcacaaagaaccagactatacatggttcaaaacctatggatgtcagtgttttccaaacatcagaccctacaacaaacacaaaatgcagtttaggtctgaaccctacacattcctaggttatagtctaaatcataaaggctataaatgccttgcatcaagtggtaggatgtatatctcaagagatgtcatctttgatgaacatcaattcccattttccaaaaccagtcacacactagaacccattattcctcaagattggcacatttctgttcaaattccaacacctagaaactctgtttcttgccctggtgactcaaacaatatcagtgactctttctctcatcctaccacaccctccagtacctcacccaaatcaccaaatc

SEQ ID NO: 66469 - DNA, 1812 bp, Cannabis sativa
caaattcaaagaaagttcatttttgaggacccgaagctgccggtgcctgggcacccagcgcccaggttgacaatttttcaatttaggtgacttccaagtatcagattaacaacctaactcgtgcattttattcatcttcatcaaaaataaggaaacaagcgccttcacgaaaaaagcaacacttcctcggtgccaaaatcaaggcctagcacccaggttgaaacttggggcagtcttagcgcccaggttgatattttgtcaacctgggccattgctgatgatgtttttcgagaactcttttaggaatattctttgttttcagcaaagaataaaatttaactatttttgaggaccaaacaaaacttctgggagggcaaaattgggacctagcactgaagttgacacctgacactgggcccagtgcccaggttgacatattgtcaacctgagccatttctaatcagtttctcaaaaaaatgtttcgggcatttttttcgtcataaaaaataacgaagatacaagcaaactcagggaaaaacaacaaccacaggggcatcaaacttgagcctaacgcccaggttgaccaggtgctgggcctagcacctaggttgatcacaatgaacctggtgtgctatcttcgatcattcaaatgccatttcttctttgagcattatctctggaatggtaaaaaatagagtaagaggcctcgtcctcaagctctagaaccttagaattatcaaaatgacatcccagaagctccgaaacaagccccaacacccaggttaacataaggcctggtgcgctgggttctatttatccgattcggattcttgtctcaaccgttcgtctagttttcaacaataactgagaaccatgaagttagaaaagttgaagtcacaacttctcatttctcatttccaacatggtaaaattactcggaaatgggtagtttcgagtctcccatttcgcagaacaacaacatctccgagaattggtgactaattttgccaaaacacaaaaatagattaagtgatgtcaaaatatcacttaggtattaaaaaatacatctccaagacgtttttccactcacccagtgtctaggttgacatcatatgttgacctgggcgctggatgtcaacctggacgctgagcccaaaacaaccttcaataaaatggtcaacaaggttgattttctagcgctcagattgacatctaaaaacttttacaaaatataaaatccaaaataatatttatctattattaattagaagaaaaaaaaatctaaataatctcctttaaaaatttagatataaaatggtctactttcattaattacactaaaattttactagagaagaaacaaattttctttttggaaagaaaattgaagtgagaagtttcacacaaaaaaaagactaaattatatttataaaaaatatttataattttaagaataatatagtaattttgcaatataaaaattttatttgcttcctagttccttttttttttaaggaatttgcttcctagttcctacattacatactaaaaattatgggaagaaatatatatatattttcattctattttcctcagtatcaaccaaacatagggttaaaatttgttatggagtagcagggtatggagaaagagccacaattataaataatttgggtataaattaataataataataagataatttatgcccaaattattatactgccatcatctcttgtgagatctgacataattttcacatagggctaaaattatataaaataaataagtagtgggagtcctaacattatc

SEQ ID NO: 66470 - DNA, 746 bp, Cannabis sativa
gttcgccgagtggagggacaaagagatggaagtgttaagggctcatcatacagagattgaaaatcggagtcggcaagctactgtggtgatatgaaaagcctaccaaactgtcgggcaacaacccccgagtgtcatccccctaggtgagacataccacgatccagcaatgaatacttcccagactataaatggtcagccgccaaatccccaatcacaagttctgcttgtgggactagcggtaggtgggcgaaccttgtctagtaattcatcaggagaagtcatacctgatagttccaacaaggctaacggtgccattcaacctgtcaaccaagcaaatcaatcacagagacagccaggcacttctgtattcgataggttggggacgactcatgacctaagaagtgatctgaatagaaggagaggagtagacgatcagatggtcatgacgatagtacagcccggaacccgtgctcaaattctcgctcagaaagatactaacgtgattcaaatcgaccagaatgccgagcaggttagtctagttattcacacacagctagatgaactaaagaatatgttccaaggcatggccagacagagaaacaatgatctcgagtttgaccgagcatgcggaacccctttctctcccgagatcaatctcctggcgttgccccacaagtttaaaatgccaacctagaaaatgtacacaggaagagaagatcctatttccaacctcaagtatttcgaga

SEQ ID NO: 66471 - DNA, 560 bp, Cannabis sativa
tttggagggttttactctcaaaatttaaacttaaaaagttaagtgcaagtagagtaatagttgaaagagtttaacagcaaaaaactcaaaaaaaatattaaactaatttattttaaaaaaaaattgtatggttattcaatttttttttttttcacattattaatgttattttatcaattataacattttttgtttttataatctttttaagaataataattttaattatttttacttcaacattcatttttttttacacatatagctcttaattatatgaagagtactactattaatttcttcttacaattttttaataaattttcatgacgaaatatttttaaaatttttttttataacaatattcgttatacttacaatatcatcctaaatttttttttttttaaatttttgaatattttacaatatcgaaaatatgtttaaaaaattttaaacgggcatagtaaataggaataggaatatgaggaattagattttcgataaggtaaactaattgaatttttctaaatatttacataaataatattataactataata

SEQ ID NO: 66472 - DNA, 505 bp, Cannabis sativa
gccttatatcaggcctagcatcgggcctacattgggctagtatcttcaacctttatttttttccaacaacaaaaatacatcaagcttgtatcaggcttgcatcgaaccaggccaaaaatctagatttgcccccaaaacacttattcgaccatttcaaccttaaatctaatccaaactcaaaatcacatacctttaaccctaaatctaaataaacatatcaataatttcatatattttaactctaaatcatataaaaaaaaatatacttacttttgacgatattgcgagtggagaatttgtggtcaatcgttaggtctttggatcgttgtggtcgtggagagaagggactgaggttgtgggttgtgggtcaagtttttttaagtgagttcaaagagtaggagagaaaaaagaaaaagaaagagggtcgcgtatttaaaatgagagatataaaattagattttataattgttaacatattctatataataatatgagttaagtttag

SEQ ID NO: 66473 - DNA, 720 bp, Cannabis sativa
atttgccaatcccaacaacaacaacaagagtacaactacagttatagtcctttggagttgacaccttttttcgacagaactgtgattgtggactcgaaagggattgatgcaatcatagccaaacagcttcgagaattagatggaggacctcacaatagaagcttaataccatgggagatggaagtgcaagcaggtatagttaggggcactttccaattgacaagagagaacataaacaaattgagacaattgttgaaggcttatgataaccttcttcacttatctaccttttgcctaacattttcatatatacttgtctgtttggttaaggcaaaaggattgcacaaagatggccaaaaaataatttttggctttgctgtggatgctaggtctcgctttgagcctcctttgcccgaaacatacttgggaaactgtgttgtaggaaagtttacagatgcatatgcaaaagatttggctggggaagatggtcttttcctcgctgtaaaagccattagtaatgccataagaagtttagagacgaagaaggagactattttgcatggactagaaaatttggttcctaggtttttaaagtcgcatgaaggtaaacgtagttatgatggatcatactccatagctggttcacctaagtttgagccttacaatactgattttggatggggaaggcccaaaaagtcggatgtggtttcaattgataaa

SEQ ID NO: 66474 - DNA, 2759 bp, Cannabis sativa
gggcaacgaaactaggaacgagacgtaagacccgactctagacccaaacatcaacctaggacccagcttgtgacccaacacccgaaatggaaccaaatcggcactcgagatcgggatccggatctggacctagggcttggactaaacccgtagtcagtgtctagatctgggacccagccccagacccgaacccagacccggacctgaacctagtcctacacacaaacctagacaagaacccgtaccctgtgacctaaaattggaatcaaaatctgatgtagatcaggacttggaaacgggtaagaaacaaagacttggacctggacctcgaaccataactagacctggacctagacccggaactgtaactagaccaggacccgtactcccaacccaaacctggactcgggacaggaacttggacccaaactcagacctaaacatggaaccagactcaagacacaaaactgggacggggacctagaactgcaccccaatctcggtcttgaacccaaacttgaacttgggacccgagatctaaaccagaaccagatcgggacacgtgacagggatccagatctgtgactcaaaccaggacccgaactcggaccaagacccaaatcggaccctgacccaaacccgggacccgaaactggagcctgaacaaaaaccgcctgacaaggaccctcgaacaagactaggaccgtgaccaggacccagacccagatcgagacctgaactcgggctcagaaacggtcatttacccagaccagggccgagacccgaacccaaaacccagacccggacccaggcctagacctgagacctgatcccaaatccaaactcaaacctagataggaattcgaatacgagcctagactcgaacccaaatcaagatccacactgggatcgaaacttaggacctagatctggaccgagaccctaacccaaactttgacttagacccgcacccgggacccgaacttggacctagactcgaacacatgcccaaactgggattcagacctgaacccagacctggaccaaaactcggaccaggactcagatcccgacccagacctggacccaaacccgaatctagacactgaatcgaaatcgaaactaggactaggacccatactcgaacatgtacccagaccgggaccaaggccctagacctggatggggaacctagacgtgggcctcaaaacccaaacccagattggacctcaggactcggaccagatgctggacctagactcgaaccctgatctagacgcaaaccgagatcagaaaccgaacccgaactcgaaccaagacttgaaccctgatcgggtcctggacttggaccgggacctaggactcggacctggatgggggacctggaccgaggacacgggcatcagaactgggaccgagaccaaggacctgacctcggacctagaccctgacataggacccagactaggacctgggaaccgaagtgaaacgagactgggacccgagaccgtgatccaaatcttgacccagggcttggacctgacccgtagtcagtgtctggatttgggacccataaccggacacaaacccagacccggactcaaacccagacccggactcggacccaaacccttacctagacaaatacctgtacccctgacctgaacacggacacggacccagaccccaggcttagtcttagacccagacccgaacacggacacggaccgagaccccacatctgaatcaaaatgagacagggacccaagatttggatctggatcttgacctacgacctggggcatggacctaacccgtagtcggtgtctagatcttgcaatcgtaccaagacccgaacctggaactttttcaaaaccaggacccaaacactaactcagacccgaaacccaaaattagaacaagaaccgaaatcaagaccctagaataggaattggacctcaaccaaaaacttggtctaaatgcagaaccgaacacggtcccggacccaggctgggatcgatacccggaccccgacccgaacccagacctagacttgcgccaagagctgcaacccagaacccgaacccaggacccgtgactcgggaactagaccagaacccaaacccagaccctgaacaagaccaagacctctacccaaacacagattgaaacccagacccagacctagatctagaccaaaactcaaacacagacccagacacataccagaactcgaactcaaacccgggactcgaacccagaccaagatcaggactaagacctagacctggactaggatcgaaacctaaacctggactgggactagaacctagactgggaccgggaccgggaccgagactaggacccgcgacccgatattcggacctaggacttaagaactgaaccgtgagcaagacccagaccaggccaagacccaacacaaggacaagtaccaaacacagaccgggacctacacacagactaggaccctaacccagaccaggacctaggaacctgacctgaatcggggacccgtaccaatgactcaggacccaagacctaaacctagacccaaacctggacctgagacccgaactacgacccaagacatgagctaaaactcaaggcccatacccataccgagagtagaacccaggaccgagacccagacccgaatcaagacccgaacctagaaccaaactcaagacctgaacccggacccaaacccagagcagaacctggtccgggacctagacctt

SEQ ID NO: 66475 - DNA, 884 bp, Cannabis sativa
acccttgattttaaggggaactccgaaatcaattgttgtgttctttttctttatttttctgctgtttttcgtttagcttttctttggtttttcgggttgtatgttgtgtgtgttgtaggttcaaacaaactgctattggaggaaagaaaaggcagcagcaagtttggttaggaagctctaaaatcgaagcttggaaaggaagaagaatgagattaaaaggagaaagactcggttggttttttctgctatatattgcagcaagaataaataaggaagaagggggatgctgcgtttcaaggcttgaaggtggtgttgctgttcgaagagaaaggaagaagaagaagggtgcggctgctagggttttctaagcaaagaaaagagaagaagaagaagagaggttgaatgggcatttcggctgctaggttttgaagaagagaaagtgtttgctagggtttttagcaaaagaaaaagaggcttatatattgccattaatggcagtatggttttgaaaaggatggcaggtttttgaaaagggaatattcccttgtgatccgctcaaagggttaaagacgagtttacccttggtttatgactgttggggtgttgggtgtaggggcagtttcggatgttataatttcctacacaatcaaaatatattaataagaaaattaattgtggttgcaaaagtaggcattctttttttctagtttattaattactatatactgaatttttttactttatttttctttttaaaaaaggtattaatatttttctttactttttgacaatgattttttaaaatttcatgtgacgttagtttccttttttttttcctataattatttaggctttaaatagtcttatttcgtgtttttttccca

SEQ ID NO: 66476 - DNA, 3284 bp, Cannabis sativa
  modified_base (33)..(53): a, c, t, g, unknown or other
  modified_base (288)..(288): a, c, t, g, unknown or other
  modified_base (1224)..(1232): a, c, t, g, unknown or other
tatatttatatatttttaaaatacatttataannnnnnnnnnnnnnnnnnnnntatttaaaaatatatattaattgatttaatatacatttaacgcatgagattaatgaaagaaaaatcttaactttaaaatattaattccgatcttcctaaatgctaataaaattttcaatgcgtattgaataaattttattttttaacggttttattataagatcatgaaaattaagtaggactaaactaatgtttattatgtaggttagagttatattttttatatatatatatntatatatattttttaatgaaatcaacttaaaaggtagctaaaatagattagagggatccaatccaatctaataaaaaatcactcagtgcatctaatagttggaactgatctaatccaatacattcattgaatcggatcaaatcgaatgacttaattcgattcgattggatcggatgacaaaatccaatatccaataaataattggattggatcaattgggtccaaatctattagatgtgtccaataaacagctcaacataaaaaaatactaagcaccactgatatcttttaacatttttttccacacacctatcgaagaaacctccaatatatatattaccattttgtaataataatagttgagataaaattatatttatgtaatatgcatgtatatatatatataataattattaccgaacaagaatctgtcaaggctgctatttggcatgtattcgtagacaagaagaagttgtggtccactgttgcaacagccaagaagtctcaccaaattccggtgatgaacattgcttataagcctcacttcactctcaaaatcagcttttcctctttctgtttttcctattgctagttttttcactgctacgatttttccattcttcaaactcccctgtttatttaattaatttcaatcaatttaagaaacaaaaaaatcataaatgctataataagaattgatcatatatttataagttagagtaatttgcggcataaatacttaaatttaattccgagttgcaaataaatatataagtttaatttttggcagtaataatgcttaagttataattctagaacttttgtaagtacctactgttaagttttaagtaaattatcaccgagcaattcctaattggtacaagtcattaaatttttatttttttaaaaagaatttaatttaaatataccaataannnnnnnnnacgtggataatgacttaatatttaatggttaggtacctacagagttctaaaaatataacttgccaaaaattaaatttaagtatttatttgcaattgagatttaaacttaagtatttataccgtaaattactcttataagttatcattttcaccttgtaaacatcgccaaaaccaccttcgccaagtttagtttgttcactgaaatttttggttgcatgtttcaaatcattgtacttaaaatttactggaccttgtaattccgtacttccaataatgttacctgaacgagagtgtaatatgcttaattcaatttctaaggaattaatcttgtttaaaaaaattgaaaataaatacatcaaattattatatataaatattaaaaatggtattattaatggtttagtatgtattattacctctggcaagtggctgtgactttttgaaatatcttttaaaccaaatgaaaattccaagtatgatgaagagtactagagcacctacaccacttactactccaattatgaccttcttttttgaactatttcctgttattaataatcaatacatataataataaattagagtattactatctaacctcgtgatcaggctacctcaagtgattataggtgggtgtgtgtgttggaggtccctgggttcgagtcccaagtaaaatatgattgtaatatataaacggttaaataaaaaaaatttagagtattactatttagtataaattgttagaaggatgctttatgattaattggcgatattcctaaaagttattactttaagttatatgagattcaatactttattgtagcaacagtgatatataggactggccatgaaacgaagtggaccacaagaaagaaatttatttttgagcccttatgttagaaaaaatatagtacttttcaaagtcagtaaaaaaatatataattttaaaaaaggaaaacaaaaatcttgaatccctaggttaggtggaccctaggcacatatgccaggccgaactggtgatataacaccaaaataatactatgcaccgataattcttaagctactaagctaacttagtagtgagagtgagatgagaaaaaaaaagctgtgatgaacctaaaaattttaagttattaattaattgtaaaatactattatactatactaaaaaagcaccaataatctttttaacatttctcaataaattatgatgattcatatgaaaaaagtttaaaacaaattaaattatctaaaagaaatattatgaagagatactatattggtaccactataattgtcgtataattaaatatcaatctctattagatatttaattcaataattgctccaaaaaaaaacaattaatcatttaaaacacgtcactttgttttgtttgtatctaacagcaacattcattatctaaaagtgggtcccctaattttcctttttggtcttaaattattgtaaaatatatatatatatatatagatataaattaaaaaaaaaaaaagagttgacctatatattctaatcttggctgagtcaaaataataattcattgtaaatgtggtaattaatttagccacttaagactaagtttgcatggcagctgacttatatatcttgagttagttaattctgttaaggacttatgtgacagagtgttaattatattatttattaataattaaaataaacaaaacattagttaattaattaagaaaacaaataactaaccattcaagtagggagctagattggtggtctgattatcatcaaagaatgaagcatttgagtaccttagaaaacagcctgcatcgatggccttaccatccaagtcaggaaggcaatgttggaggttggcataggccacttttaggcaatcaaggcagccacttctactaactgtgtgcgcgcattgcgccacgccataaactgtcaagtttcggtcccctgctacactcacaggcacttgcctcttttcggccgcgaaatacccattgatcttgggtgtcgcggcttgaagagctaataagacatcgtcgacagtgg

SEQ ID NO: 66477 - DNA, 913 bp, Cannabis sativa
atatccttggcaatctttgtgttttgacttttctctattatttaaagaaaaagttaataacactatcaatactaattataagaaaaaaattacgttctatacccattttattttacttattttaatgaaaatgtaccacgtcgttgccaccaccacctactagactcaccctatcaccccgccaccaccaccaccacccacacctccactccaaacccattttgttaaggagatttgtcctttttattaaggagaattttcaaaaatatttttcataggaaatttcgtaatatacaatcactcatcaaataattacatataaactaacatgaacacatctaaatcatccaaacatcattttaaatttatattttcatgaaaataaatcattaccataactctgagaccaattattataattcattttaccaaaatataaatttactaacatgtatattgattatagaactataatctaacatgttgaatataaacttcttaaaacaataaaataaacacattttaaagttatagaaaatcttacattggtggcaccaaaatataatgtctccttcctttagatatctaactcttaatccttgctgtcacagagtataatcaagatctaaacattgatcttcttgtattgttggaattctttacaatcttctacaaaggcctgaatattggcttgaattgtatgggcaatattcctcaacttactaagggttcgaaaatttcaaaggaagaagaagtgggtttcgaaatttgagaagctctctctttattttctaagttgtcaaacaaagtgaaaactaagttaagttatcaggtctgaaaataagaatcatctctttctatttataggatttcatttaggattagaattagaatttatagaattaaaaaaaaa

SEQ ID NO: 66478 - DNA, 560 bp, Cannabis sativa
aaaaaaattgtgattggaattcaactcttttattaacccaatgacaatatattttaacgagttaagaaattatataaaggggattgatttaggacatattttgttctattaaagttgtatgttatcgggtgcgtttataatattttttttaataattttttgtttttctaattaaaaatattttctaaaaatgtattttataaaattattttcatttgcaaattttaaaaacaaaaaaaaatcactttcaaaatttgttttaaaaggatttttttttcttaatcaatattttggactccgatcgcaacttgactttgggattcagatccggtgcatgactcggaccccgcacctcaacccgtacctagaccctgccttcggacccagacccgaccctggacccaaaccaagaactgaatcccggcctcggccaagaccccgaccccgacccttgactcaggcctcatccccagattcggactctgactcggacctggacctggacctcgaccctgtaccgacccccagacccggactaggacctcgtcccttaacctaga

SEQ ID NO: 66479 - DNA, 1022 bp, Cannabis sativa
gagaagttacattctttgagaatttaaagtaataattatctcattttataagataaaaaaaataaactatgagagttacacttttattggacttgcataattgcattgtcataagcaagaacaattaagattatagtggatccaacttgtgaaatgagtcataaattagaagagcaattttagactcaaataaaatgaatcaatgtgtggattcaaaaattatgaaaagataacaaaattggagaaacaattttgaatcttaaataatcaaagtggtgaacaaaattgataagaattttattaagtttggtataattttggactaatctcaacgaagagataatcttaaaattatgggtaaaaataatcacattattttgtaagtggtaatgtgagtttgatatttagtttttgagaaaactaaaaatatcaaatggtatttttcaaagtgaccttaaaagtcattttaattaagagaaaaagaaaaatacacaaaagtggtattttgaaaaagtatcatgtcatctcaaaagattcatgataatttatgttgagattaaatggaaagactttattttaaagtgaatttaaaattttactttatgttaaaaatgtgggggtgagccacaaatttaatcaaagtgtgttgagacattattgattaatttatttaattttgaattgaaattataaatcaatttcagctatgtgcatatgagaaaattttgacatattttggtttcaaattttggtgaaaatattttcaagaattaaaaaaaaaaaaaattatagaaaagtggtcttctatattttacaattaagatattatcttgataataaaatgtaaaagtgtgggggtgcatactccaatatgagaaagtttagacatacttggtgtctaaaactaaaatgtgtattttcgaaacatgcttgttatctcaaaataaagtgtaatttagacatgtttggtgtctaaattagtgtttaattggtatcaaaattattgagaatttgagttgtgt

SEQ ID NO: 66480 - DNA, 859 bp, Cannabis sativa
aatatgaatataggagctggaaatttataccaattggcaatagatgaataacagtagtgatagtgtaattttcttcaacttgatttggtgtgatttgattatttagaaatgtcactgaagcttgaaactttaattctgatctggggatttttggtaatttgagattatcgtccttaataatgtgaaatactcaatttttttttagttcctttaggataaagagatcttacttgattatattatcttctgtttttggtgtcattttaattttttgtgatatgtttttacaggtgaacgttcctaagaccaagaagacttactgcaagagcaaggagtgcaagaagcacacccttcacaaggtgactcaatacaagaagggaaaggatagtcttgccgcccagggtaagcgtcgttatgacaggaaacaatccggttacggaggtcagaccaagccagtctttcacaagaaggtaaaattgaaaatcttcatgttaaatactcttgatttttgtgagtgaagttaatgatggtaaacgaatgtgctctaattgatgatttacaatgttaaggggaagataatgtatctgttttgtgaacataatctaccgttgattctgctcgcactcttaaaattttatgtcctatgatgctatattgtttagttttattagttttcctgttgaaatactatatataatgtagcatttgggtggtatggaatagaaatgtgccctaaccaatggtttacaatgtataatcttttgagagaacatgatgattagtcactgatctttctcacccactatactaactaatgtttatacattttgattactgtgtatttgttcagcttcatttt

SEQ ID NO: 66481 - DNA, 951 bp, Cannabis sativa
cataacttgaccctgcaatctaatatgttagaacgaattaaggctgctcaattaactgacccagaattagtgaagatcagggaagaggtttcagctggtcaagccagagatttgacggtgtcagatagtgggatgctgttatttaagaccatggtttgtgttccaaatagtgcggaacttagaaatgaaattcttgaagaggctcataccactccatactccttgcatgctggcaccactaagatgtatcaagatcttaaaccctttttctggtggagcgggatgaagaaaaatgtggtagaattcgtattgcaatgcctaacctgtcagtagatcaagtctgaacatcagagatcgacaggtttgttacagcctttgacacttcctgagtggaagtggaaagatatcacaattgactttgtggttggattatctagaacgacaggtttatttgattcaatttgggttatggtagatcgattcagaaagtctgcgcatcttctaccagctaaaataacctttacagtggatcagtatgcagatttgtacgtcaaggagatagtaagattacatggtgtgccatagagatccgaagtttacttctaaattttggcaaattttacagcgggctatggctaccaaactgaaattcaatacaactttccatcctcagactgatggacagtctgaaaggacaattcaaatactagaagatatgttacaagcctgtgtcatggattttgagggcttctagagtaagtacttaccagtgatggagttcttgtacaatagcagttatcaaagtacaataggaatggctctctatgaatagttatatggcagaatgtgtaaatctcctatacactgagatgagacaggggaaaagaaatacttaggtccataatcagtacaacggactaatgaagtaatcgagaagattaaagccagaat

SEQ ID NO: 66482 - DNA, 1073 bp, Cannabis sativa
ggtagaggcggtttatcatatatcttaaaagttacagggcgtaacagccaaggatcttcaattactctaacagaattgccattaccaatcctctatcgataccctttttgaataaccttcttcccccaaaccaaacttcgccaaacaaatgacgcatgattcccactttttgcctccaccaccccaccatttgggtaatagcttgctttcaacactcggctacataaagaatccggaaaccgtatgcaccgccaaacttacttagctagaagagcttggtactaacaaaatatcttaaatgactatgatatacattctcatgtaaaaaaaattaagattataactataatttcaaaaacacaaagagggtgacattatgaaatatacgtaaatcttttagaacaataataaaaaatgagaaaaaaaaaagtatgtgatacggtttgaactgtaattattaaatttaaaaactttaaattgcaacgtattgtacagtttggcaaaaaaaatgtaatccacaattacaccattaaaacatttcaaatcacattttgtatgtagtacgcaaagttgtaaagtgcgagcaatttgtacaatgcggacagtttaataaacattgttcgtgtttgatatcaaagtttaacttgatggattttatttgagtgaatacgaaattagaggaatcacaaattcaattatttaaaaaatttgtccacaaataaatttaaaagtgggaaccaactaatcatatatcttccacttaaattataccaaatataaatttagtattacatttgtcattcctaaaaacccaaaataaaaataaaaataacacattgttttggttttacatagagaatgaaacaacaaaaatgattattttagctgaaactaatgttaaatttaaatatgtgtaattggatttcaagaagaagagaaatttacttgttacttctttaaaatttgaaggatctctttttagaaataaataaaataagaatttaattatggctcattattttagggaaatttgattttttatgcttacatttgtttaaatttttttttctaaa

SEQ ID NO: 66483 - DNA, 775 bp, Cannabis sativa
gacactactccattagtatgaggccttttgggaaggtgcccaaaaataaaaccgtgagggcttaggcccaaagcggacaatatcatactgcccaacacttttgagatgtattttagtcggaaataaatattgtatcttaattgatttataatgaaaattattacctaattcaaaagaaaccaagtaataatcgcctaaattagtcaagatttttacctaaaatcaacttagtaacaatcaactaaaataagtttttcagattcatagtatcaaaatcaagcaacttcgaagagaaaccatttatttagtcaaaaaaaacaactaagcgtggctacaatttttattatattttatttttgatttctttacaggtatatagaaaaagtcgtgtcctatataatgttcgttgactatgatttgggagtaaatgtagagtcaaaatgttttttttttgtaattaaatgtgaaaatgaacattcgtttataattgattatttttattatcacacagttcagcttgtttaatttagtacttatttatacaacaataaaatataattgaaggcaactgcaacatggatgaaaaatatattattctgagtgtttttttttttttttttaaataaagaaaatgtatataagatggatctataaatcaaaactagtgaaatgcttgggatcatttaatatttatcataaaagtgacatataacagctctaagagcaacccatcagctcctctaaaagagcatatcttctttagaatttaaaaaat

SEQ ID NO: 66484 - DNA, 1089 bp, Cannabis sativa
tttcggttttctattaaaaaaaaattaggattttctgtttttaaatttatagttattgaaggttattttttttctccggctaagccagccgattttttttgagcttaggtgcggcttggttgaggttgtgttttgctactatcattaatcttatctttgtgacatgcttttgagtgtgttagccttgtttgtgtaacatgattttaagtattttagttttgtttgtgtgacatgattttgttttgttttattttattattagttattctttgttcatcatgactcatcatttaaattgctattagtagttcagaataacaagatttttgtgattgaagtcaattacataccttatacattagttgagtgttcaagctacaaggttgaacctgcaacaatttttgttgttttgtcttttaagtagtgtatgaaatagaatataagagcatctccaaggagatattaaatttggtattacactattactaaatttggtgtcaaaaaatatttccactccaaccacaacactaaaatctataccaaaaaatatattttattattatattaataaaatataagatattttaatattaaacaatatatataaaaataaattagctattaaatattaataataataataataaaaaagatacagttgctacagtgctacttcatatatgcagtgcactgtagcaaagactgcataaatcacttcaaaataatgctaccttggagaagattaaccactgcatcctcaaatttgatagcttcttggagttgctctaagtattcttaaaattaattgtgatgctgtaatctttttcatatagttttattttaactttttttttatgtcaaatgaataggaattagatgactgattatttagtttgtttttttaattctaattttagttgtgtctccaacaagagagatgtctcgattggattgcacactattattttttattaaaaaaataaatgaagtattttccttaaaaaaataaagaatgaatgtagttaaataaatttaataaatatcaacaataataaacttgtggaatcaataatttaatatatatatata

SEQ ID NO: 66485 - DNA, 783 bp, Cannabis sativa
  modified_base (65)..(65): a, c, t, g, unknown or other
  modified_base (269)..(287): a, c, t, g, unknown or other
cgctcttccgatctctgatctatattaataagtaaatctgattagattgaaatgagttttatttngggcataaaacccaacaggaacaagggggacgaccaaattgagaaaggaatagaattatatctatcattcattctgtaaaaaaattactgtattctgtatacaatttatcaatctcttattaagatggactcgtggactatgaagagttaaatttaaaaccacgtaaaaaattctcttgtcctttattattattattattattnnnnnnnnnnnnnnnnnnnttattattattattaattactgtccatttaattccagagtatattaattacaaaaaaggcttatttagtaggtaacaaaaatctgtgttaacactttggtgctttcattgagagccttgtaataaaaactcagaaaataccctccttgaaaataaattcaaatcatcaatccatggcagacgatactcctcgagacaaagagaatcatccaagagagacaacttaacgtcctggaaaagagcatcagaattctcacaagacaaatgcaactgagactccatgctttaggagaaatggtggagaatttgaacaaaccagggatgaaatcccagagagatgaagcgagaatgactatgatcccacaaggtatgttccatcagtggaattggaaaataggcaactttgatagtgactggatgagtcaaatcaaagaaacgtagaactggagcgtgaggcagcggccgcaagggctgcacgtggtgatgtccctccaaac

SEQ ID NO: 66486 - DNA, 1440 bp, Cannabis sativa
ataacataatatgaggaagagtgtgtctaataatatttgttgtgtacattaggttaggtgtagtatgtagaagtagtacaactaattcaataaaaaaaattgtttgatgattaggtgcctctagaaatattttaagaatatagaataattaagcaaaatgacttattattattaaatattattatcaatattattaaggaatatatggtggtaaatattagtaattagtagtacacaacacgtacaagttatattgaacaaataatgccgtagcctttagttttctaattaatttatttattttctactatgattattactattattgcaattgataaggaattaaggtattttatcataaattagctaaatattatattttatgggagttattagcttatataaaaaatttcaagttaataataaattgcactcatataaataatacaagtatatccatttcaaaaataaataaataaaataataagtatactaaaatatatatttcaactttaattttcatcataaattattaatttttttttttaaaaaaaacgatcgagatagtagttgtataactacattcatgaatttggaaattgaggcaatagacggtaaattttgacacttaaaaacaatcttcagtttaatttttgtttgtataattatacttgtaagtatttaagattatttataaatttataaaaaaattaaataatttataataatattaaaaataaaatttaaataattacttacttagttactacacttataaaaaaaaatataattatacataacaaaatatgtaaatacaaacaagaaaagtattttttacaattaatacaataaaaaatattaatatataataattaattaaaatatataatcaacactaaaaatcctttttcagataagagaaaaggcatacatttatgatttggttaattagtaatttttttttaaaaaaaaaaaattcaattgggctctgatatctaagaataagaagaaatattataattatgtgaataaatatatataaggaattatggataaataaatagggtgtggtgaccaaagtagcagaatgttaatgatgggaaatggcagaaggagcacagaaaggtgggaataatggaataaaggaatgatggaaattcctgccaccatttcttattttttgtcaacaacaatcattatttattattattcatttttacccaatccaaccatgcatataacatataccatctctaatttattaaaaaaaaaaaaactaaaattattacatttattaattaattcaatctctgttctgcatttcctgatcatatcatctgaaattcttgcagaacaatagtaacaaaaagttttcatttttttttttactttttgggtaaagaacaaatctttttattatacttctgctaataacgtaca

SEQ ID NO: 66487 - DNA, 2153 bp, Cannabis sativa
caactataaataaactataagacaacaaaaaaaaaattattatttttgctgaaaagttatttttataaatagaaaaattcaaataataaaaatgaaaattttttatgttaactaatattttttttgtaattttttttaaaattttaatttattatgtaaattttcttatatttatgaagatatatttcaacttatcttgtttatttattaaaaaagaatcattgcttcccaacattaattcaaatcattcattcaaaatatgtacatatatttattaagagttatataatacatatatatacatttccattatttatataatatatacaagatcgtgttgtttatatttaggtaattatacagtatttatgtaattagaggtaattagaaaatatagtcccataaaaattaggtgtaattatataatgtaattataaaatattattatttttagatagttaatatattttttaaacaaatagttaatattattaattgtataaattactaactctactaataccgttaaaaaaaccgttaaataaccacattatatatataaaaatatatatgtacatatataaataccgtgtgcaaattggtggcatgacaagtaattaattttgaatagtaattgaatatatgtatgtatatatatgagtgaatatttaatagttaatataattatgatagttgtattttttttgttatatcagtcgggtaaaaattttatttttagacttaaattaattatatacataaataaattacttttttaattaaaatatttaataaaacttttttcaaaattagcatttataattttttttattttaaggaaataaataaaataaagttaatatcaacaagtaatttattaattactttgaataaattttttaattaattataagagtctaataatgatagaatataaccatatacataatgtaatcattaataaaacctctcaaatatatattttgatacatgcattaatttaattaaacttttcatagttatatcttcggtgacaaggcaccatcatgatatataaatatatatttatatttatttagatttatccatctcaattgattggtgactaaaggatagaaaacctatttgggtcaacggctaccaaacatactaacgaccatgagtacaacactaaaacgtttctctatattttatatattttatatatatgtatatggtattttccttttagaattttcttaatattgaagttttatgtaagaaattttaaacacgtatttagacaggctctttctttttagtttctctttctcattttcaatgactatttaatttaatctcttttatattattttcatttttcatatatgtcatggtattaggaatattttctcaatatctcttttgtgcataatcaacgttaataattccttaaaaaacattaataattaattccttacaaaaaatttaataattatcaagtgatttatgttaattatagccaatgtatataattgataagtttaatatcgttaaaataaataaataaatgaagagagagagtagtcaaaataagaggagacgtaccatacatgctttaccgcccaaaaccaaatcgattttctttcatttctttttcttctttctttttatttatttattatttattttgaaagggagtatcgatctttctttctttttggataaataattgatctttcttttttttttttttggaactattcattcaaataatggatctttcttttaatgatgctaataaattgcacgtaaaactaaataacattttgaagaacttgtttcttagagaatgaccaactcaatttttaatcaaggtcaaaatcaatagttatttttatcactaaaaaaattacttttaacaacataaatattttgtagctaaatgtgatttttaatcacaacaaatagttatttattactaaaacatagtatttaaatacaagttgtcactaattaattagttttagtcaaaacaaatattacgaataaaaacacatttaatcacaacaaattatgatttttgaaattaatacttttagccacaaatttttttttcggtctataaatagtcacaacttaatttttaatttacttttaattacaaattctat

SEQ ID NO: 66488 - DNA, 1078 bp, Cannabis sativa
tacattatcaaaattttactttataaacaatttttatattatactattacccatcaagtttatttttaataagctaattaggatttttgctctgaattttgacatgtactaaattatgcttcttgaacttttctgatagttaaaaatctccctaaactattgaaaaatctccctaaactattgtgataattgttgaatttaaggatttttgtctaatttcattcaatttaactaattcagtgattgtccatgaactaaatcatgctcctcgtactttgatatctatcaaattatgtctctcgaactttgacatgtgtcaaatgatgcttcctgaactttcattcatggtagacttttcttactaaaattagacaaaagtttaatacaacagtctcaatagtttaggaaatttttttaacgatctttaaagttcagggatttagtacatgtcaaagttcagaaccaaaaattctaattagcctttttaatatatcttatttattattgtaaaataaataagtaattctattgtttattttaaaataaaatttaaaagtaattctattgtttactttaaagaaaaattaagttaaaaatactgagtgtcagaaagctaatatacaatgaagtttttgattgatttgagttgggttggagtaaattgattgattttattaattattttatgatgaaatcttgatatttaacagtgatgttctgatcaagaattggaaagattctgaaaattcagttttgcccacgtacaagtacttgattgcagctggcctaaggatatgggttttcaggtaaaataatttctgagtctcaaatcaagttgctaaaaataaaaaactaattaattagacagtacaataacattatggattttcatacaccattatctgaaaaataaaattgttcatttagtcaaagttgcaaggcataaatggttttgatcacttttctaggcagctcttagaacttaggtggcgttcggttggaggtaattaaatggaatggaatggaaatgaaacaatttttatttcattcctttgtttggttgcattttcaagtattg

SEQ ID NO: 66489 - DNA, 715 bp, Cannabis sativa
  modified_base (53)..(71): a, c, t, g, unknown or other
tgtgaaccatgcaacataaaacacgatttctgatctttattaattaataaatnnnnnnnnnnnnnnnnnnnttttatttagggcacaaaactgaacagttcacattgatgagcggtttcgcatttgcttccttagcatactgttcttgcgattttttagaatctccaccaatatggagtcctccaataatcgttaagatattgcaaggagttcgtgaaccactcgcattgtttgtgtcatcattatcatccgctttggggatgattttctccgtttttcttgtacttaccgaattttccttgtctgatcaattcttcaatctcgtcctataggaaccagcattctacagtggtatggccaatgtccttatggtacttgcataacttcttcggatctcttttgttgcaatttcctctaattgggggaggctttctaaagactccatttttctcctcaatcacgtaaatatgatcgtgagggactgctagttcattgtaattgacaaagcgcggtccccctctcctctttggagatgtttccttcttagatggggacttggcaagctttggactccgctgcctctaggggctgcgtcttctcgagcttctactctgggattctttcctcttggacttcgagatcatgaccgtggtacgggtgactcgcgcttctccttcacccattctagttcagctagagaattctcgattctctt

SEQ ID NO: 66490 - DNA, 679 bp, Cannabis sativa
ttcaagaacatgtaaaagattgttaagcacaagaggtggccagttgtttgtgtgaataaaagattggccaatacgtttgatggaaagacctgaaccatctccaacataaatttgatctgctccttcatatttagtggtgatgttgaggttttggacagtaggagtacagtgattggatgcaccagaatctagataccagttgttgtcatctaattgagttgtttgagcaacattttcttaggcattgggagggttgggactgaactcgatttgaggtagttgagaatctgtaaaagatcttatcaaatctataaaagcaatcaagaatagtgtgcccaagcttatggcaaagctggcactgaactcgatttgaggtagttgagaatttgcctcgtctactgaaaccagaaacaccacggccattacagtttggaaaagggaaaggattagcatagttacctccattgttaacacctcaattgttgaatcagcgaccattcctctagccgatccagaagaggatgaaggagggattcaagtttgattagggaatctgctggtgcgatttagatgattttgataggcaatattagcttcagagtaaagttccatctcagttgtagcgagattaacccttagatcattttcttgatcaagatcatgttggaaatattttacc

SEQ ID NO: 66491 - DNA, 2136 bp, Cannabis sativa
gttggctttttctcctcctcctcctcctttgttttctaccaataagcccaataacattgtgggatggcctttcgatgatctaacacgctttgaagaccaaaactacttgttttcagactatgatcaatatcccctcttatttctcaatacttataacctccacactttaccaccgccgtccgatcaacataataatcacaatcatcaacggttcgaagttgatcgctccgctacgccatcctcatccacggccactgccattaacagtgatctgactatggtggagaagaagcttaatcataatgctagtgagcgtgatcgaagaaagaaagtcaaccatatgtattctgctcttcgttccctacttccaccttcagatcatacggtatatatattcatttcaattataatttttcatgtccctttaaattaatcattactactcatttccattataacggtcttttttttttctattagaaaaaattgagcattccggccacagtgtctcgtgtgctaaaatacgtaccagagctacaggaagaagtggagagtctagttcttaaaaaggaagagctattgtcaaaaataaattcaatgcagcaagggaaaacaattactgctactactactgctaatcaagagattaagaaagtaaaaaacataggtccaaactcattatcctctatttctgcaactcaactcagtgagaaagaaattgctgttcaaatattgtcttataaagccgacaacgacctcttgtctgaaatgttgcataattatgaaaatgaaggcctttcattactccatgcctcttcatttgagtccattggaggaaggctcttccataatttacatcttcaggtatattatatatccctctttctatatggtatacatataataattttttcgattatggaatatcgattgattagtctagatatgattgatgtatcaaaatttactttatttccttttatttatatacactctgtgtatgtattctaataaacatgttctcatatacgttttaatttcaaaatatatacaggctgaggtatcatattgtatggaaagtgggactaccatagatgccaatcttttatctcttcacgacaataaggagaagttattggttgtgcaataactcttctagactttggatgtgtatgtaaactgaaggggatctctgtatcatatgtagtcttttagtttgttaagttttgttaattagaagctgttaaaaattaaagtggttgttttagttatctaactatatatataccggtgtattgatcttctcctatataaataacaggagtgttaatcactctattttacactctctttaacactatacattcttgcactctttatatattctaatgataagtttaattttttaagcaatatgcttatttataccaaataattagcataattttattacatttgtaccatttaaattaaatatgttttttatcttttaattttttatcagttaaacaaaataatcattatatatttttgttcaatataataataaattattatttctataaaagtttacttcaaaaaccctagtttgttgagaagaccaacaagagcttgactcatattaaagtacacaaggaagctaagagttgaacataggctcaagattgcacaagaactctctctcaaatggcataggccactagtaccatctttttgtacaaaaatatagcactcctcacccctttagaatggcaaagggggtcttgtccaaatgtgtttctccaacaccaagtaacataaaacctttgaaagaagcaactcccaaggtgaatctcaagcaatgcgactagtgccatcattttgcacaaaaagatggcactactcgcccaaagaaatagaggaggagaaacatggcaaaatatgtctttcaacattaagactcataaaacaagtgaaaaaagccaccaaaagtggtggagaataccaaaacgcaatcagcagtattatctttgtgacccaaaagatggcactgctctcctatatgaaaaccattggacactttgttaaatgtgtctttccattatcaagacaaataaagcaaatgagaaaagccaccaagttgtggtgggtggctat

SEQ ID NO: 66492 - DNA, 890 bp, Cannabis sativa
  modified_base (26)..(40): a, c, t, g, unknown or other
aatcactgaaatagtaaaattgaatnnnnnnnnnnnnnnntccttaaatttaaccatctcaatagtttggagaatttctaaaggctaaaaaaattcaggaacacgatttagttatgtgaaagttcggaaggaaaaattactaattagtctaaaaaaaattaaatagagattcggatttccctttttttcatctatgtaaaacactcccctttttagctttcccccttgcaccttttctctccgtcttttcgaactcactgctcttcctcgacgattcactctctccgtcatcaacgttagctggtgtttcgatttcccggcgttctccagccatttcttcccttcgctattcggtttcacattcaggttagtactctcggtcccttttatgttgcattatggaaatacatttgaaaatcctctcgaaaatacactaggatttcataaacttaactcaatcttaaaagcgatttttgtgaattttgggtcaaataaatacgttaatgtatcattccatacttaattgagtacctaaaatatatcttaatcataatcgattatcatggtgtttggaattgatctttgagttggcgaatggtatattttttttttttgaaataattcactcttggatttattgaagagatggtagagtctcttgcaacaaccataaatttagtgcatcaaattagggtttcattgatatgcaatactaattgccttgagatagtcgtgaggtgttatatatgtttctttttaattgatctctgtgtgtatgcaaatattccttggtgggatttttctttcagttgttaaaattgggacattcaagatcaagaatcaaactcacacaaaaaaactcacctcagccaaaaaaaaaaaaaaaaaaa

SEQ ID NO: 66493 - DNA, 847 bp, Cannabis sativa
atatttaaaattccgtgaaaccatatttttgttgtttttgtgcatttgtgaaattaaccctatataaaatattgaattacaaaagcaacactattgaaagagtttaacatgttctctgaaaaaaaaaaatgtttgacaagtcctctttttttttttatgtggtgttagtctggatataaattttgtacaaaatttgattcaaaaaattgaataaatattatgttgggcttaaattttacaattatgtttcaatacactaaaagtaaaataaattttattttaataaaacattaaatttttatttgaagtatataaaaattatattaaatacataaataaaaatataattatattaatgagtggcaaaagataaataaaaaatgatatttattgtagtgtaaaatttagctataatatattttgtgttaaatttgataatcttaacatgtatggtttgagcacttgcatctacatatgacctcaaatcgcataataatacacaatgtggttactttacaacaaatcaaatagtttagtaatattcatgacactaccaacaatatttaaacataaacaacataattgtttattattattattattattattattattatgaacataaacaacatcaaatccaaacaatacaacaaaagtttaaagtttcaataatacaattaaacttttctctcaaaaaataaaatataatacaattaaacttttaattttccaatacaacctaattttgaacacagagaaaagcttaaagtcattgttaattaatattcccacaaaaataataaagttcaacagcaccattaaaatacagagagagaagtcaatcatc

SEQ ID NO: 66494 - DNA, 773 bp, Cannabis sativa
  modified_base (32)..(51): a, c, t, g, unknown or other
  modified_base (417)..(422): a, c, t, g, unknown or other
tttgatatatgtatgaatgttaaattattaannnnnnnnnnnnnnnnnnnnatatataaatatcaaaaaattattattcatgcatgaggttgtgacttgtaattgtacagagaattaagataacttagccataaataaaacagtcagcaacatattcatgtttaagaatctctaatcaatggttgctagtacggttcactgatgcctgttatttagtgcaagcaatctcgatttgagttactgatgtagatggacatctcagtgaatgtgttgtatataatagagattatatatgacatgattgatatgaataaagttttcttcatcaaacttaccgtttactataaagacctaattcatatcataaagataatcaattgtagaagtcatcctgaactcatgttcatgttattagtnnnnnnattcactcgttaaagtttcttagagaagatgattcttgcaacttctgttttagaaatctaataatgtggatagctaggaacatgatctacaattatagaatcatgactttcctaacagatcgaatgttggttcccttttaagtgttaattctagaactgataaagttgtgtacagattaagattggatctaaattatactttcactagtgaattaacggtattaaaggataaagatgtaattagaaaggtaaaacagtaatttaaccaaaactaattacgaactaacacaagaggggataatcactagaattgattatatcaatagacactccagtaaaattcaataaata

SEQ ID NO: 66495 - DNA, 1780 bp, Cannabis sativa
cagtcaactctagctctttgcttccagtagacttcatccttatggagcaatccatctaactcagataggagataagcagcatgagttaaagattggggagtaggcttggtatcgttcaagactctatggagctcagcttgagttcgagaattttgaagctggagaggatactgagatctactccaagtcttaatatccgagagacagatggattgcctatctagtaaattttgaagaggagatgaaaacgaagaagtaggaagagtccaagacgattgaataagggtgacaaaagaagggtcagtgagccaatggttttccatatgaaaacgagatgacttacggttatgtgaaccgatatcatcaaacttaactttaagggccctatggtcagagccacaaaatcccaaatggaagagagcgggatgagggaaaagattttgccaaagttgattagaagtacaccagtcaagatgctctaaagattggccatgtcgccaagtaaatttaggaccagaatgatgaagagggatgtgattaaacttatccagaaacgagtgaaaatgatgcatagcataaggaggtggagaattagtcgaattcctatcactatcagaaagatagtcattaaaattaccaataaccaaccaaggcaaaagaggagcagtatcaaataaatgattaagtagagtccaagtaacaactttttgataagaataaggagagccataataccccgaaaagtgccagttcatatcattaaaattatttataatacaatctatgtgattaagggagtaagaagtaacatttacatcaatgcaattgttccaaaaaagtaaaagacctccccctaaaccttgcctaggcacttctaaaacattatcaaaatgaagtttgtgcttgaggtgcagtccacggcctgaaggcagcttagtctccatgacaaacaacaacattggctggtgttgcttgacaagtagggagagattacggaatgctcaaggactccctaaacctcgagaattccaactacaaagactcatttttctcggcggggccgcgtagcagcactcgccgttggctcatcatctgacattgaaggaaccacagcatcttcagaaacaactgcccgtgctcttttcagcatactacggatagaatctccaacttggacagtttgacgcgtgaaaggccgcctggttccagaggaaaggcctggagaagctgtagggcgtggttcactgataaccacccctttgcttccacggctgcgaggaagagggctgggaggagacacatcaatagtttttcctttgtcaatgtgggttgtaacagaatcagtcataattggtgggggaatggtagagtgggccaaagatgaaggcagagaaattgaaggatgggtgaaaccaacagatacagcagctggatgtgatgctggatggaaacaggggaatccacacggaagaattggtcaacggcttgctgtaagctttggtcatcagtcttggtgcgaggaaagtactcctcataaggaatagaattagatagctcaaataggttccgtttatgctgggcagatgttgtggcgcggagagattccttgtactccaaggcaggaggaacagcgaaattatcgcaacgcagaaggtacttggcacattttttgtaggtgtgatcaacaagaccacaaaagtcacagaaattggggagactttcgtacttgaaactgatccatttaggatcattgatgccacggaagcgtatagtcataccc

SEQ ID NO: 66496 - DNA, 742 bp, Cannabis sativa
aagattaaattataaataaacttattgttataaaattattttgatagagttataaaataacttgtaaatacaacaaatagtatcttaaacatcatacaagttatattaaaagaaaaaacaaaaaaatcacacattaaatttagacaaaattaaatatactagccaattccatcaattactaaaaaattatttttttatataataattaaatgtaactaaattgtagtttttatatacttattttattattttatagaacacatttgatgtattttaaaactacttattataatgaaactacatagtatcttaaatttataaaaaatataaaataaaaaaaaagttatattaattttgctaataagttatataataatttattatatttttaatgtaatttattagtttcaaatatatttggaggtaacataaagtagctatataatatatatatgtataaataatataaattcatttaataatataatataacttaaaaataaaattatagttgtaaaagtaactaattagtaggtaaacagcaatatgattttaaaagtaattaattggtaggtaacaaaaatgtaaatgagataatattatctcaaagtaaaacttattaaaaagaaatcaattagtatcatagtactttactttttaacgatataacttttaaatacaaaattaatcttttttgggtagattagtcacaataaaaaaaaatacttttagtatggtacat

SEQ ID NO: 66497 - DNA, 684 bp, Cannabis sativa
aaaatgtgtataattattatttttttcaatccaaactagttacaatttttaagaattcaaaatcaaaacgagactaattaaatctttaaacttataaagtcaaatcaaaccaatccacttacgaatagattggtttgattcgaaatcataatttgtatttcataattgttctatttttttataactttttactcttattttttttatagtcgtgtacattatagttgtttaagacatcttgtaaaattctgaaaaattcaatataatttataatatagaaagaaatatttaaacattcgattttacacgagtatgaaataaaacaaccacatatacaacacatagtttaaattttattttaagcgtgctaatttttttaaatttctcaaaattttacagaatattttaattatttataatgtataatatcataaaaaaaattgaattaaaaaaatgtttggattagattaaaaaatttaaatgatgcattgtaaaattttattatttatttttattgattaataattaatgaggataatgataagtttgtccgcacactttttccactttcttctcagtttgaacttttgaagaaagcgctgacaaattcctcttccacacgatttatttatttatttattgaaaagatttgtatttgtatttgtattttttattttatttttt

SEQ ID NO: 66498 - DNA, 785 bp, Cannabis sativa
tctcccaagctttgcccgaatctctagcaatatgagggcctccaacaatgacttgcaaatgtccatctaccggtggaggtagtaaatctaggttattctcgttcctctgaccctgatcggtcttgacatacttctgcaatgtgggttgtttttccttatcaagaattcaatttctcgcttccggttgttgcattcattagtgtcgtggccgtagtttccgtggaatcgacaaaactttgtcatgtctctcttgcagacatctttcttcatgggcccggacttcatatatggggccaaggactgagttgccatgtaaacattttctatgtcttcagtcaagatagtgaatgcagtctactttgcttgattctcccaagagcttgttcggatttgccgacgaactttcccttcttcccactcccttgcttgtggttgttgttgggctgtttaccacttgagttagaattatttgggtaatgggggagttgggcggacgttccagtagaaggagctttcgacttgccaggctttcgctcaccttccgctcgttgaatggcttcttcgagcttgatgaagccttcggcacggtcaagaaaatcactcattgagtctaccagcccgttcatccttatatccttccaaagttcaccgagtacttcaatgcccccagtattgcaaacaaatttccatcttcagttacccgtgaaagtttggtcgcctccatcacgaatctgctgatgtatgctcggagaggttcgcccggtctttgcttaacttcgaccagg

SEQ ID NO: 66499 - DNA, 3244 bp, Cannabis sativa
atacatactggatctaaaatattggatggatccgatccgatccgatccgatccgatccaaaaagtattaggtctaaatattagataaactaaaattaaacaaataaatttatatgaaatacatccaatggataaaaccgatctattggatgacgaaattaattagatcggatcggatggtaaaatctaatatccaatatatgattggatcggatctggataggcctaaaaacattggatgtgatccaataaatacccttatttcatatattggatggtgtaattgtcatcacatgcataagtgaatgtaatgagaattacattgttgcttttaataaaataatacattttaactaaacaaagtaattataaaaaatgactttagtacccttgcataactaatttactaaattaaagtaggaatatttttgacaatatatatttttatattcttctactaaaccaaatacaaatgaaatttgattacaattttcattccaacaataaattatcaatctttattatcatttttattttatttctacgtcatcttagcacatacacaatcaattaaaataataagaaggagaaaatgaataaaaacaaaaaggaataccccttttcctactctataatgtctttctttatacatgtctccacaatatactctaataaatgatcatatagccaaatcaagcaaatgtttaattaaaagaaaaagatacattaggttccacgcttttcaaacaaacaaacaaaatatatgtatatatataggtttcacgtgtacataataatgtattatatgtatagtacaaaattaatcacacttttgccaagtgcatggttctagtggtaaaaggtaaaatatgatattaatagttatgcatatatagaataaacttagtgattgtgtgttttgtgttttgttatgatttgattttttgctactgtaattagtcttgtctttgtaatatggtttttaatattttaattttatttttgtattttgtaatatggttttgaatgttttagttttgtctgtgtgatataattttatattatttgttttgttattggttttttttgttcttctatgacacgtcatcaaatcgctattagtagttagaaataacaagttttctacgactgaaggaattgttaggagtacagttatgtatcttgcacaatagttgaatgctcaagctacgaaattagattaataagtatgttgtaatagtttctactgttgtgtcttttaagcgatagatgaaactaaatataagtatttttaaggttaactgtgatggtgcaatctttttaatatgatttaatttttaatttttcaattaaacgatctgataattagacggttgattatttgacttatttttctaattctaattataatcgtatctccaatgaaaaaataatgtcctaattaaattgtagaatattattttaattgattactattaataacataacatgaactttttttttaaaaaaaaaacatatgcagctaaagaataattgttcaaaaaaaaaaaaagctaaaaaataataataaagtaagttaagtaaaatgttcattttgttctcagaaatatcgaaatatctctttcatataaacaaaagtgacacaagttctattccttttataatttgatcaaaatcaaaatgtaagccataaattttcttttaggacaaataacttttttttttcctcttcaattatcgttcgtacttgtagatcagaatttatttctcttataatttttttgtgtggtaaaaacaatcccctcaactatagcacctattaaaaacttgcttatcttgctgccacgtattgtccttttttttaaggaataatttgcccatgtggtgatagacatatttacagtaatacatttaatcaactaaaatttaatatattctttaaatttattagaccactatttgtatatgatttttttgttttgattcttaaataggatattatagcatacaaaagtatgcggcaaaagagattttgcaatgattatgatagttcgtatgagattttcgctataaaacaaattgaaaggtaaataagaaataagatgatgactaagtataatcacctaatctaaaaaaaaaagtaaaaattgtatgaattatattatgttgatgagacatgttttctcagtcttatttttttctccttcgtaatttttgactttttgcatagtgttaattaatgctgatgaccatattaaatgagtgaaattcactataattaggtaataaaagaaagaaataaaaaaaaaaaaaaaagattttggtacattgacaaacaatagaaattttgttttaaataataataatttaatgtgctcaccagaccagagggatccaataatggtagatagagagaggagaaattaatagaaagtagatagaactgttaaagagctcttttcaaaagaagaaaaaaaagatagaagctggacagctggcaagggaagattaatgtgcaggtattttcatggatatattggtttggtggcatcaacttataaattcattttcttcaattaaatgttttaagatattattattttataaaaatccatattattttatactactgtgggtccatttttcactatatatacgactattactactacggtttataattaaatacacaaatcaatttataaatatattattgaaagcacaaatttggatacctgatattccgatagaataatttgaggttggattgtgattattgctgtaagtttatgcgtctccggctaagtccgcatttatttgtgttctttaaaaaaataagtcgtgttgtgtcatgttacaaaaaaaaatatagctagtgtcgtgtcgtgttatatttttaaaagaaagatctgacatgatccgtaggcaggcccagccctaggcataggcggactaggcctgtgtgcctagggcccacccagcccaggggcccaaaattttttttcctcttttaaaattatacatttttttttaccgattttgaaaaatactacattttttctaacataagggcccaaaattttttttttcccctatggcccactttattttagggccggccctgcccgtaggtttagtattttcatactgtgctcggagtcgtgttgactcgtatttcttaacaggccagttaatttaatttcacatactgatttaaattcggataatttacatgtacatacgtc

SEQ ID NO: 66500 - DNA, 862 bp, Cannabis sativa
ttttccctactttggtaacctcggcgtggaagtgctggaggtagcttcccagactttcttctctcttttgcttcacattggtgatacttgtgacaggcataatgttatcatatgcggtctgatgttgctggaggaattcgtctgagagttgcttccaagacgtgatcgttcctggttccaacctcttgaaccacttatacacggctccttctaatgtgaccacgaagcattgacaccttgccttacatgtcacttttttcatcttcattagctcattaaatgcgccaagatggtactttgggttggtggtaccatcatacggcaccctatgtggttccttgaagttcagtggtagtggctccatttgaacctcccttgagagaggggattcctcatcaaactcctcatcaccatccaagtctctccgcgtggtgatggccattctccgatgtaggtcttgcatttctgcctccaactcctttatccttttgttcgtcctcctttgtgtcttgtgtgtggtttgcattaggccttgcccttggggggccctcatgtgaggtgccccctagtatgaggcctctttagtgaagtctctttctttggctatagggtgtttccctcaacgtaatctccttataatgggtaggttcgagttgtctcaactggctcattgggctcctgtcttacgacaagccccatccgtgctcatctcttggagtgttattagtggatgataaggaatcacctttgttggcccatgtagttgagatctcgttctctactttgtggcttttatgacgtaaatgtgaggcttgggttttgcctttgagtattctattcaacactttttgcataccagcca

SEQ ID NO: 66501 - DNA, 834 bp, Cannabis sativa
gtcaatttatattttttatataatgattcctttttttaattttttatgataattgaattatcaactttgctaatatttgaaaagataagtgcatgtgtaattcttaatttctcatctcaaccactctagaacttattttataatcatttgaggcaaaatcaatacattacacatgattttgagatatgatttaggtgattttgttggatcgattgaacctttcaagcctaccccatttgtcaattccctagtgttatccaatttgagcctaaatgttaaaatcttatttttctttagaccatatacaataacctttgagcctaaattttttttaccttattcatcctttttcatgccatagtatatcaatgatttttgtatttctaaaggagtgtggatgttgttaaaaaataatatttggttatgtatgagttaagaaaacaaaattgaaaagcaattcccctaaaataaatacttgcaacaatataattgtgggagaattaataagtttaagttgaaataaaaagagtgcaagattgaattattcaagggaatgagtgaggaatacaaatgtgaatacttggagaggaagatatatgcatatgctatggtgtgatttgagcttaaaaacaaccttcttacccaccttaacctctagcccatcattatgagcctataaagtcctattgatctttaaattatgtgtgatatgattagtggagaatgagtttgataattaagcatctggagtggaatttcgttgaaatacatatgtatttagagatgagtattaatggttacatgcatgatttgatttggatattataatgaaat

SEQ ID NO: 66502 - DNA, 1173 bp, Cannabis sativa
  modified_base (186)..(188): a, c, t, g, unknown or other
  modified_base (272)..(288): a, c, t, g, unknown or other
aagctgatagccctataaatagtgatgcatattcactgggcaaagggtcgaaggatttttacttgagagatattgtctaaaaattcatattaagagataatgttgtaagagctataagaaaagaatctttctccttcttcttgagtgaatacaaataacgaggattaggctattaccgaactgttnnngggtgaacctctataaaattcttgtgtctttatattgctttattttatttcaatcgttataaactacttgttgcttactaaatnnnnnnnnnnnnnnnnngctaaaagcgaggtcaacatttggcaacttgggttttcaatcagaggttaaggcctttatataggaagccttaaaccctaggcttacaattcgaatcccttaacaattttttagttagttagatatttacaaaagaaaaaaatgtggaccatccgatcgaccctcagcctttgcaactccagactctagagaatatattctatatattaagaagttggtcatgtaggccaaccttagtatattcctcctctctactcgaagggacagaatgtggttagctttatccctcatctaaagggtaggaatggatttgtaagtgggtactctctggaagtgttagtggcaaacttgcttgccaaaatgtattagtataaaccttgagatcactcaaaaaggtgatagagaacagtctggataccagtccacaaaggaaagactgattgaacctattacaacaccattgtcacctcctcaacccgatactttgagatcacctgtatagaagagacaaggggaggtgagaaacctgacaaagtgaccaagtacaaacaaaattatggccaaccgtacccaagggtacttgccagataaattacatcgtacaaggctgggtatcagtgaagttccatctcaagtataccaacttagacaaatgaagagcgtaagtcatacatttgactataatagactcaatattaagtttcatacagagtttctaaagaaacaagatatgaaaaaaaggttgtacatgcctacaaggcctctacaaaacccttatcaaggtcaaaagagaacgaaaactcaattgcccacttggaacctagcccttggccagctagggttcctaaacttaaagaggactggccaaggatccgtgacccaacc

SEQ ID NO: 66503 - DNA, 2173 bp, Cannabis sativa
  modified_base (2001)..(2001): a, c, t, g, unknown or other
ttacaatataaaaaataatattcaaacattttattttacactcgtataaaataaaatagtcacgtgtaaaatacaatgtttgaatgcaattttcggcgtgttaaatttttctaaatttcttaaaattttgctagatatcttaaataattataatttatataactatgaaaaaaaattaactaaaaaattattcaaatactaaaatagataaagatgtatggtacattcgttttaaaagttgcattataaaattttattatatatataaaaatattataacacgtgtaatcattattaagagtcctatttttttaactcttattttattattaatattattataataagaaaaaaaaaatcactataaaagattcaatctcactcactatcaatcctagtcaatcaatatagaacaaacaaaaatcaaacacaagcactaacttattgggagagtaggaaaagtatttaatttattttgacaaaagaataataaaaaaaacaaaatatcttatttattgaattttattttaaaaggataatattttttatgaaccgactgccaagaaagacctaattattttataacctcaaaaaaaaggtgataagcttgaaatagtattgtcacataaatctataataaaacaaaattatatatttcctcaaagatctccattaattcaaagaattattatgggacattatttagtaccattataaaatagtattttataattaattttttataattattataaaaatgaaatagataattgatattaaatttaactaataacatttgttatattataatattattacaaattacaagagtgttatactttttagtatttcttatattaaaatgttattataaaacttttatataataattattatttatatagataattattagaggaaaattgttaaaaagtattactggtgtttaatactttcttcagtgttatactactattagtgtaattaagtatcgggtctcatataacataaaaaaaataacttttcaaaaatattactaaccaattataaaacgccacttataaaaaataaaatcttaaacactaataatacctcataaaatcaaaaaaaaaaaataatacctcataatagtcttattggagtagtcaattactaattatataaaacttttaagatttattcaactattaattataattagacctagttattatcaatccttctcataataataattagtacacaaactttgacttatatatagaaattaaagcattgctataaaaggtgcctaccattttataattataattaattagtaataatatttaataatagtaattaaattatgtgagatttatatttaattatactaatattaatatcacactttaagattatttttaataaataatgtacatttatttaagattaaatttagtctaaactatatcataaaactatatttagtttaatttttgcatttatgcttcaatacacttaatataaattaagtataaaaatcaatattactactaatactcattgaacaatactttatttatattatttaataatttataaatatattattttagtatttagtgtaagctaaaacttttgcatatactatcttttgtattaaatatgacacataataatttagcaaaatattctaaaaaaaaataataatactatcacatttatagctttttattgaaaatactctaatcttttttaacattatttctaatatatttatccaaaaacttgaatgggttttgatgacaaaaaaaaaaaaataattaaaaatatattacttcaaaaaaaattgtagctagtgagagaggttatagattgattgtatgaattatatatacatgaaaaaaaaattaaaattataaatcaagagagaggaaaagattagatataagaaattgataatggaactatagtgtagatatatatacctaatatttaaatatttatataaatatatanatatttatatatttatatatgtttattaccttaaggagagtctttgtttgaaaggatgaaaccgaatgaaattccaacgaacagactgagtaataatccagtacaacccaaagaaaagctcactcaaaaacataccaatccaataacccaataatctataattataattaat

SEQ ID NO: 66504 - DNA, 567 bp, Cannabis sativa
ttgttatttttatttttaatattgagaatattgagaatattgagagtatgcttaattttaatatttttaaattttatatttttttcttcaaatttttaactttaaatatttttttttaaaaaaaattaataagtagttttcttttaatatataaaattttaaaaaatatataacaaaaataaaactataatataattaagtatatgtgtaaatgcacctaacaataatttagtatatatatataatagatatcttgattcttcgtattgacatgatactatgatatggcttatttttgtttttttcaaattttaattttaaactaaatagatcaagtgacgtgataacaaaaacattcttgtccaaaaaaaaatgtcttgtatttatttcaataaatttgataatttatattacaaaattattgatcaatattagtaaaacccaataaaataatttaactatttttggtaaattaatttgacatacggattttattgcttattaatcaatgaataatttgtcaaatttggcgtgacccccctttcttggtttagccaagtaatggat

SEQ ID NO: 66505 - DNA, 572 bp, Cannabis sativa
catgaacagttacaaatgattgaacccaacggaataactgttgccctatacacctataaatagggacagacctcagggtaaaagggacggctaatttcaaggagaaagagcaaggaattattattactgatattattgtattatatattccaatcattatctctaataagatggactcgtggactataaagaattaacttcaaaattacgttaaaaaccttcttgtgttcatttattatcgtaattaaatctgtggtatatttattataaaaaaacttatatatttggttaacaaaaatctatgttaacagtaactatttgagtaggattagtaactaattggttactggtttagttcttgagcttactacctctagaaatacacatacattgtaattgtttcattctagttaataatgagaatcattctacatattctcacaatctctatatctaataatactaactataaataatgataatttttctcattatttattattgacacttgataaataacttgtcatgaccgctttagtgatttgaattagtaaaggcaattaacactaatt

SEQ ID NO: 66506 - DNA, 641 bp, Cannabis sativa
taagaaaatgacacgtgaataataactaaacatttaatggtcatgtgcaattttaaaaatataacttaagtattattaccgctaaaaaatatactaaaatatttatttataattaaaaattaaacttatatcataaagttcttttttaaaaataagtgtacatttcttgttgaacatatcaaactttatttattgcatattaaaaatatattacactcttactttgtaatatatataatataatatatatatatatattacactgctatatatcgtaaattacttcaaaacaaaaaattaatgatcattaaatttcttttattttaatataactatatatgttacttatgtcgtgcatatatttaaggtatttgtaacttccttcaattaaatcacacccaacaacatcataatctcataggcatgtccttgtctgttctgatatttaaaaaaaaatgtggttacgtaaaaaaaatgaaaaaaaaaatatcgaactgctacttaatttttatattggatgagttgaaaataatatcaaaccgcctaatcaattcgaattaagcaattaacctgatcaccaacccaattaattattttaaatacaatgttcaaactaatatattttttatagtagttgattt

SEQ ID NO: 66507 - DNA, 1356 bp, Cannabis sativa
aaacaggttccaaatacaaaattataatcagattctaataaaacatttcatttaacaatgcaaaaagtaatcaaagttatagcagataaaaaaatatatatcagaaaaaaaagaaccagttaaaaacttaaaaattaggtaaaaaacttacctaaaacattgataaataaaatttaaacagaaccggttccaaataaaaactataataagattctaatattacttttccttaaacagtaaaaaaaataatgaaagtcacaaatgacaaaacataacagaaaaaaaaactgattaaaaaaccagttaaaaacataaacaaaacaaacaatcataaaattaaaaagaaactagttaaaaaaaaaatacattaagattttaataataattttcttttaaaaatgcaaaaaagtaatcaaagacataaataacaaaaaaaatcagtaaaaaaactagtaaaaaaacttaaaaaccagttaaaaacttaaaaccaaaacaataacacatataatttttttttaaaaaaaaaaaatcagttccaataaaaaaattaaattaagattctaatattaatttttttctaaaattgcaggtatgaaacaaatcatgcgtgtcatcaaatatggggggtcaatggagaaaaaatacaaattatgatgactacataatgactagaattttaattctaaccaattcatcactagcaaacttgatggagctgataaaaacagagataaattgcaaaagaagcagcatagacatatcctaccagatatcaccgggaacaacaccaatgaagctactgactgacaattccctcaaattctagattgagctaagaaaaacacagactagagtaactgattctgcactatgcatcacaactacagaagaaatagctatacaaacagtggaaaattaatcttctaaacaaccaatacaagagcaaacaaagacagtggagaaactggtcctacaaatacacaatgaaccattcaaccagcaatatgatattgaggacaagattcaaatcatgataatagtcagataaaaattcccccaaacatgtttgcgatggctgaagaagttgcaaattttataatagagcaatcaaatgaagcaacaaaaaagagaagggatgaagaaatggagatcatcacaaattacatggtgcttgagattgaagaaggacaaatatacaatgacaagaacatactgaaaacaacaatcagattctatgcaatgataaagaactttcaaatcagaatgaagaggtccgaaccaagagaatacatggttacatgtgttgacgaaaattgtaactggtttttgtgcgcttcaaagttgaaacaaacacaa

SEQ ID NO: 66508 - DNA, 674 bp, Cannabis sativa
aacatagtcttatgatttagggtcatttgctatatttttttgaaaagaggacataaactaacatactcctatgatttggggccatttactataattttccatgttttttatgcagatccagatcgaaagatgagtacaaagatatcaccatttaaactgctgaattgatgaaaaattaaaataaagttcaactatgttttattttataacttatcttaagtttttcttcacattaagaataaccactatatgagtacgttaatatattaagattaacgtatttttttttaataataatttacatatcatacgtttataaacacagtacccacattatacttttttaaaataaattgctcaaataattatattactttatttaccaattcttttttttatttaaaaaaaccttaaataaaactaagaatacgtggctcgcccacgtaacatctacctagtatatatataaatatatatatatatatatatttatctcactcatttaatcaagactaaaagcaataaaaaaaataaaattcattactgctatttattattatttttttttttttttgagactttgcatatttttttttctatcattttgtattaggttcaataaaatttaataaaataatttgaatttttttggtattttgtaagatatataactg

SEQ ID NO: 66509 - DNA, 745 bp, Cannabis sativa
aatttgattaatttattatgtaatgataacaatacaattctcttatatattatgtgtgtttcttcaaaaaaattaaaatgaaaaaaagtattagctaggcttgaaattttatatacaaaataaagacatataaatatatataaatatatatatatatatatattaaatttactatagtttaattgataagtgtttattagtattttaatttaaataaaacaaaatgttaagtttgatatgtgacttgtttgtatttacctaaaggcctagctatttactagttaaattaataaatagttagtatttgaattttcataaaagaaaaccttaagttcgaattgtgtcttgtttatttaccaaaaataaagataatcaaaatgatattcttcttataaatttgatcaattcgaaaattttaaacttaatttaagcatgaaatattaaaattttgtagtagcatttaatattttctaatatttataagcttctgaaaagtatttaaagtgacacatttgatgcttaaatttattttagtatttatcacttgatatattaaaaaataatctctactacaaaaatacatatttgtgtcgctcctctcaaaatcgatgcaattaattagtatagagttttagcgtcagtttaaaatagacgttaatttgcgtcaattagaactctttctcgtctgatttaaaagctcacaaatagcctttcctgtcaactttaaaagctcacaaagagtaat

SEQ ID NO: 66510 - DNA, 1366 bp, Cannabis sativa
aaggaaaagaagaatgcaaaaggcgagcttgagagatatatagtaagattggtggcaaaaggatatagtcaaagggaaggcgtcaactataatgaggtatttgctccagttgcttgtcctaaaattgttagactaataatttctttagaagcccaaaatatatgaaagatccaccaaatagatgtaaagtctgctttcttaaatggtttccctgatgaagaagtctacatcgagcaaccatcaggctatgaagtaaaaggacatgaaggaaaagttttgaattgaagaaggctaaaatggcgtaaagcaagcgccgagacttggaatgctcaaattgacatgcacttccaagacaagaatttcaccaattgtccatatgagcatgcactctatatcaaaattgagaatgaagcactactacaatttggccttttagtgacactatatagtgacccattgaaaagtacgggtcactaaagagtagggagtgatttttagtgacatgcacaattagactctaaaaatacgatgttagtcccttataatatggggtgtcactaaagactaaaatcaaaatttttttaacttttattaatgtaaaaaatattggtatatagtgacgtgccaagtgtgaatgggtaaatatatcctcacccttttggcacgtcactatatctaattctaattttttttttatacaaaaaagtacagctataataaataaaaaaaataaaaaataaaaaaatattttataatggtaaaacttagttattttcgccagtactcgctctttcttaatcaattaagagtctcaatcaattaaaacaatgtactaggttctttatcagctaatataaaaatttaaataataaaatataaaataaatatagtaataaaaaaataaattgattcttctttttcggtctctttttataataacaaaatataaaataaataataaagatgataaatataatataataataaaactgtatcattttgaaaacaataaaaaaaattctctcaaacgttatctctcttctcgtttcttctttgccgtctgaagactcagaactgaagcaaggcttcaacgtttaactcaccaccagccgacgatgaagtagctctactagcagacaacagacgagctccaccagtggaggacgcacccttcggaaacctcgagccaagctttttcctcaccggacgatggaactttgcaagtcaccttctagtttctctgccgcacaaaacaggccacgaagagcttaattgtctcactcgtttatctctctgtggttagccattttaaaaatgaccttctatattaatttttcgattgtctttatttctctctctctctctc

SEQ ID NO: 66511 - DNA, 1651 bp, Cannabis sativa
  modified_base (1401)..(1406): a, c, t, g, unknown or other
ttttttttgatagtagtttacaacaataatgttgaaaataagtttgaaattttttgaaataaactgaaatatcataaactttattttctacccaaaactatttgaaatatttatatattgtaactataataaatacctctatataaaaaaaaaaataggagaatcccatatacttttttgtttcaaattttcggtttgggtttttccggtggtttctatacaggttgctatacgaattttagttgcgattcaagttactccgttaattgctataggggtttctatgtggaattctgtaaaaatataaaaaaatatatatattgaaatgaaaaataaaaaaaccccaaaaaaatattctaatatataattttaagtgtaaaaattgactaaaaaattttaataaaaaattataattatcactcctcaattttaaaatatgtaagcttctatacaagttaataatacattaatatgtaagattctttcttcccttaaaaaaataaattatgtgatgcacatcctttatacctcatcatcatcccttatattaataatatgaaagattcaattgatgtaaaattattttttgtttggattatgtgatattaatgaggcatggaagaaaggatgagacatttgacatcaaaggggaccatctcatctcatctcataatttttcacaacttatcttccctccaaataaatccaactaaactaatttgccacgttttcaaaatgcacacaatttcaagaaaaaagttaaaaaacaattgaagagtgttaattcactccccaaaaatagaaagaatcttaaatataattcaaaaagtgttaattcattcacatagaaataatgtctttacgtgtcattagtttggtatggattttcaatttttttaaattaaaccagtatagttttttaaaattcaaaccaaaccaaatgattaattaaataatcaaatcaaattaaactaaacaattcaaaaataaattggtttagttccagccatagtttatatttcgtaattgttttatttttttacaataattattcattttttcgatttttttttacttttgtttataacacataaataacaataaaaaaattatcataataatataaactcaacattattatttacctaaatttgtttcaaatatcaacaattcgtcaaaaagacacaaattaagtatatataataagtatacggattaatttggtttgaactgttacggagatttctaaaatcatgatcgaacaagagaatttaaaacggtctggattgatcaaatcatttacaccaaaattatttggtccggtctcaaatgatttagtctgaattggttggagtttggaactgcggattgcgaattatataaagagaaatgctaaagggnnnnnntggtgcctaacaccctcctatgtgtcagtatcgctattggtccaactaagtattgggtcccacatagtttaatataatagcttttagggaatatcgctagccaatcgcgacgtaacatatcaagaaaatgctaagcactactggtaactaatagcaatgctcttatataaatacccctaatttaacttcttttggaaattaaaacttatgctcatttttctatacataataattgtaactatatt

SEQ ID NO: 66512 - DNA, 910 bp, Cannabis sativa
  modified_base (400)..(403): a, c, t, g, unknown or other
ttaaaatcagaggagtgccattttaaaaaaaaaatgagaggagattgcaaatacatcgagtattttatatttcttttacttttctgtatatgtattttatatttccttaaaataatttaaatttaaatatttgaaaaagtaccttttttttttaaaatacctatttttggaaggggaattttcaaaaataccctttttatattttatttataattttacagtctaattttattaattacaaaaatactcttgtaaagttttaaaattacaaaaatacactttatttagcaaaaaataaaaaaaaaactaaaaaataacatgaaatcaacctcacaacaactataaactaactataaaaacaactaaaaagaaaatctcataacaactataatacaactannnntaaactataaaataactaaaaaaatagtttagtatttttacagaagagatatttttgtaaataaaaaaattcaaagagtaaaaataaaaaaatttccgtgttaatttatttttgtaagttttttcaaatttgtgacgtatcatgtaaatttttctttttggaatgaggagctatgatatatatgtttggactttagattacaccctagaaaaaattatacagtttttatataatatgcaaaaatgtaaactttattttttttaaaaaaaagtattatgggaaaattcagaaaaaaataataatataagcaatattaaaaaaaattctacatactgttttccattaaaaaaaattcgataaaatcatttgtgaaaaaaatcatatttttttttttgaaaaagcactattaacaacccaagcccaactccaaagactttaacatacatatcatgtccaagctattccactttaaccatcgttccctttagcttaactcagcccatcttt

SEQ ID NO: 66513 - DNA, 532 bp, Cannabis sativa
tctacctccacatagcattgctccgtcaagctttctcccattgcgaaaaattgctactgctgcttcccgtaagagtctaggtcgtgtctcagtcccagtgtggctgatcatcctctcaaaccaactatcgatcatcgctctttacagggtattagtagttgtttccagctattgtttccctcccaagggcaggttcttacgtgttactcatccgtctgccactggaaacaccacttttctttaaacttgtatgtgttaagtcaataaaagttgactgcaaatagcctggacaacgactaagcaatctatcgcgaacgccaccttcctccattaagcaataaaatgctaaaagcactagtggtgtctaacaccctccaaagtgtcaaattgttatttgtgcaattaagtatggatctcatacaatttaatacaataatttttatggaacatagctaatcaatcacaaaatgccgcctctaagtggtgttagcaccactggtacctaatagcttaacgatgcttatagactatg

SEQ ID NO: 66514 - DNA, 1032 bp, Cannabis sativa
aaatatttttttacaactaatatttataaatatttttttattttttatttacaaaaaatttaatttacaagtaatttattaattattttagctaattttaaattaatcttaactgtttaacaatgtaatcattatgattacatatttaatataactattatgacatattccataaatatacatcaacaataaaagtaaacgatatatatgtgaatataataaatacttacatatatctatattatattgctttaaataaaatagggcacgaatttatttagtttagcaaattaaatttacatacgtctacagtaacaagaagtcagtttttatttttgttaatgggagacgattatgaaaatcaagagtaaataatatctatttttgtacaagagaatcaatcttaggcaaatgtgataacataaattaatttagttttttgtgagtatttagtaaataaatcggatatattagacggtataattttgtgtgtatgaatataagagcttatgattagataagctggtgaacgatgttaatgaattgctagcttaatatttatcctgcaaatagaacgagacttgtcaaggttataattagcttagtaaaagtggtgtgatttattagcatggtggaataaggcttgtgaaatgatggttataacttataagcttagtgaaggtccatgcatggtgtgatttaaactattggagaagaaaatatatttcattgaatggttgtgtgtaagaattaagaaatgagtgataagatgggatggttttgcagattatttatttattttttttcataaagaatagagaagaatgatgaaatgtgaatatgatctagctttaaagagatatatttttctaagctctcgagttgttattgttgagaattatggggttctatttcaaaaccaattggttgtgattttgctggatagtagacaaggacaatggaaatctcgttaatccattcatgcacatcactaatcagatgacgagacatttggctaccttaagagagtca

SEQ ID NO: 66515 - DNA, 797 bp, Cannabis sativa
agacatgaaaatgtgtcgagatttagtgtcgggaatttaaaatttcccaaaatacccctaaatcccattttatgttggttggtgagggaagggcaaaatagtcttttgccaagagtttcttttgtcttttagcaatatttattttatgtttatttcagcttatactttagataaattagtagttaataccaaagttattacatttatcatttatttttcataaaaatcaaaagaaaaattaagaatcaagctctcttctctctcttcactccttctttctctcgagccctaagtgaaccagcagcttagtggagttcctcagctggttttgtggttagtagttagcctttggtgtttcctttgaaggtaattctctttaggatgtgttttccatagttatcttaagctttaagtaattatttattgcatggattgaatattagaattctgagctgtggattatgttttctttagtttagttaggtttcatatgtttgttttagcgtgttttgattgtttgggtttgagtttggacaagatttgagatagaactcaaactttgatctatattggtgaaatttgattttgaggatctgtagttgttttgttgcttgggttttgttctttatagtcaatatagcaggtctggaaagtttggtttgaattggggatgatttggttgagatatggaagttttggtcattcctgcactgaatcggaattctggttcagcggggcgtgtaggaaccggaattttggttggctcccaggaatcccccagaaccggaattccagtt

SEQ ID NO: 66516 - DNA, 687 bp, Cannabis sativa
tggctactattcattctaattacaggtatcatctgatgtgcaagggcttaaagataataaatctttgctttgcagatgatttgatcctgttcattaagggttccaagctttcagttgtggctcttacataggtgcttgatgatttttgcactacctcagacttacatgttaactcaagtaaatcccaaatttattttggaggcctaaaaaccaaggagaaacaagctattattgacgattttcaactagtagagggtacttttcctctcaaatatttaggagtccctctaaggctggcaaagtggaaagctgaggattgtgggatcattgtcaaaaaggttaagcaaagattacacacttggtcaagcaggcatctctcctttcctggtaaggttcaattaattcactctattttacttggccttcaaaattattggatgagcatctatgttcttcctcatagcattactaaggatgttggaaactttgtcgaggatttccttgggtatgaatggtaccaggagtaagattcacattgcatcttgagagaaagtttgccatccgaaggcttacagaggcattggctttaaaaatggagtcaagtgaaaccaggctactcttgcaaagtatatttgggaaattttaacaaagcaagatcttctttaggttaaatggatagataacatc

SEQ ID NO: 66517 - DNA, 963 bp, Cannabis sativa
ggaaagattttgaggtaaacactattgtttgatacttattcccacaactaagtgtccaaacacagttggagactacagaccaatagcatgttggaatgtgttgtataaagttgctacaaagatgatttgttcaaggctcaagttagtactagcagatttgatttcaccgaatcagagtggatttgttcaagggagattcattggccataacataatggtccgtcgggatctaataagacattatggaagaaaattagctaaggcaaattgtatgataaagttggatttgcaaaaagcatacgatacagtggaatgggacttcattgaagaaatgcttttggctttcatgtttccagctagctttgtcaacttaataatggtttgtgttagaactcctaaattctctctgatgttcaatggatccatgcatggtttctttgaggaaaagagagggctgagacaaggtgacccaatgtctcttctcctgtttgttttgggattggaatatttgtctaggataatgaagaaagtagggcttaaacaagaattcaagttccatgagagatgtggtgagctgaagcttaatcatcttagttttgcagatgatgtcttgttattttgcaatggagattacaagagcatttattacatgctacaaggccttgaactattctcacaaatatctggtctgaagccttatcccaataagactgttgtatattgtaacaacatgggtgatacaaatatccaaagaatattggatgcctctggattttaaaacaggatgtcccatttgaatatttgggcattcccatctgcccaaaaacgatttcagtaaaggagtgctctatcctagttgaaaaagatgcttgtcaggattcgaacatggagtacgaagaattggtcttttgcttgaagagttgtgctcattaattcagtcctgatggcaatccattcttattg

SEQ ID NO: 66518 - DNA, 676 bp, Cannabis sativa
taatagggatttttatgtataattacgtgaaaatacaaaaaaaaaaaaaaaaaaaactacttttaactgtaaaaatgaaaaagctacttttttttaactctaataaataaaaataataaaaaattaaataaaaaatataaatataaaaatttcttaatcaaaaaattaacctgtaaaattcctaaaaacagaaagtgagccataacaggtgcattgtagtagatggcctcatcagccctcgaaacaatttcgtacgaatagcgtcacattgtgttaatagataagatcaaaattcaaaatagtaaggaaaaagaaaaaagaagattaaaactaaaagaaacttttctttttatcaaactgtattagcaaatagatttacacggttttctttgacacatttccaaatctaggcaaagcatctataaacaaataaaaaaggtgatttatttttttttttggaatgacttcctatattattttatttttttttttttatttttttttattttaatagtttaggttactttagtaattgtttcctaagttgcgatgtaaatataagttgcgatatagattgttcttgatatgtgtatatccttataaatagaaaaacataataaaaactcgtttaaatgtaaaagtgaaaaaaacgctactttttatttagggtaaattg

SEQ ID NO: 66519 - DNA, 711 bp, Cannabis sativa
tatattgaaacaagttttatttagggcataaaacccaacaattcttcctcagggtcaattctctcagagttcctcttagacagaccccttccttagtttggtctagtttgagtctgtgctccttgggattcttttctcagtcaatatattgtctcttcttccacgactagttcatcatgttgagtattcatgatcctcttttaatgtttgagactaatgtccacatgtcatgtccatatttatggctcaaattatgggcataacaccttccttcctctcacactaaggtggcattaatggtaggtcaaaaatagccaaatacaggtacaatggttctctctcaattagcttggacaaaattggagctagttaaatattcttttagtttctggaaggcatcatcatactcgattgtccactcaaaattgttacttctacacaaaacattaaagaatggaatgtgtttgttggttgactaagaaatgaatcaactgagtgttacaattcttctagtcaagctttgaacatccttgtatttttggggggaaggcatatctaggagggcttgtatcatcttcgaattagcttcaattcctctagagttaataatgaacctagatattttcctaaagaaactctaaaggtgcattttttggggttcaacttcattccatactttttgatgacgggaaaagcctcttccagatcatc

SEQ ID NO: 66520 - DNA, 914 bp, Cannabis sativa
  modified_base (46)..(62): a, c, t, g, unknown or other
  modified_base (226)..(227): a, c, t, g, unknown or other
  modified_base (850)..(852): a, c, t, g, unknown or other
aaacatataaattcaaatttttctatataatttttatttttaaatnnnnnnnnnnnnnnnnnaaaattaataaagaatattctgttaaatgataggatattctgctaaagttaacgtagaaacctaattaaaagtatcgttaaaccaaaaattatgttatatagtcatattttatatagaatagatatgaggagcttatgtcttcttttattttatatatatatanntataaatatatatatatatatggctccacatttgaaaattgcaagggagggtaatctatctttgcttattttataaaaacaaaaatagttatttatgtttgggttattacataataaatgaagatataggtacttatttctttttttaaaaaaaaaaaaaaattatttattttattttacaatatatatttgatttaataattataaatatatatatttttaaaccaaaaaaaaatgttaatatacgtataaaatttatattttttaatttgtaaactgttatttttattgtaattattattttaattctaataaattaaataaaaataaactaaataattatctaaataaatttaatattgacgacataaatatgtttttttttttttgaataacgacataaaatatgttttaagtctactaataatagagtaaatttttaaatttttagcacttaaatagttaataattttttggcaacaaaaatacttaacgttgctgttaatgcagatttttgttaaccaaatttgagcctcacgattatgattcacgaacacagaaataataaaagctatagaaaataaaaatatggaaaccgagttttttatgtggttttgcagttnnnattctgcatagtccacgagtcaatgttattcagacttttgagtattttttttagggcctctt

SEQ ID NO: 66521 - DNA, 1072 bp, Cannabis sativa
ggtcgggtctgggtctaagtttgggtgtggatctgggtctgggttcgggtcccagtctgggtccaggtttgggtctcgggtctagggtctgggtcctagtcccgatcccggatccagtcctggtcttgggtctcgggtccagtcttgggtccccgtcccgattcgggtcttagtttgggtcccgagtctcggtccgaatttgggtctgggtctcgggttcaggtccgggtcagggtccaagtcccgagtcagggtctgggtctgggtcccggtcccgatcccggtcttggtcccagtctgggtcagggtccaagtctccaaggcatccgagtcttgaattaagttttttttaaaaaaataaattaaaatcgggtcggatcagattcgatgcagaaaaaaattaggcggggcagagcggatctgatccaagatccaataagtactcgaaggtttcggatcagaggtgatccgtcggattagagctccaacccgctccaactaaattgatctttttgacatgcctaaaaaaataaataaataaataaacatagaaattttcatattgaatatcattccttttttaaatgcaatagagctcataataatatataaaaaagtataaacactccattttttgtttcgcatcatataaacagacacaacatagaaatgcacattacaacaatgttacatacttgaagatcattcattcatacacccatcttgtttagcagaaaaaaaaaatcaatgaaaaagcataaagaactaaaattgacacccccaacatgaccatttctctcaaattactaatagtatgttatagtaaaagaaaataaaaaacacaacttttgatatttaatctccataaccacttgtcttccctaaccaccaacccatcatatcattgttcatcattttgtaatttgtatttgccaaaacatgttcacttttagatttggaacatataaaaggtaaagttgaacaagtagggtcccaaacatgaaacatttggagattcattcttaaaaacgatatagaaactattagtccatttaccgttgcaatttgtcaa

SEQ ID NO: 66522 - DNA, 1646 bp, Cannabis sativa
taggttgttaatggtaaaataaattccaacaattgggacatgtgagtgagagaggcctaattgaacttgataaacaaggcctgttcagggacaagttgaatggaaaattggagttttgtgaagaatgtgtattaggtaaaagttgtagggtaaagttccctactggcatgcatatcaccaaagaaccactcaactatgtgcactcagatttgtggggtccatctaggacacaaactcttggaggtgctaattacttcatgagtatcattgatgacttcagtaggaaggtttgggttttcatgttgagaaacaaaagtcaagctttggaaacattcagcaattggagaaagctcatggaaaaccaaacaggtagaaaactgaaggtgttaaggacagacaatggattagaatattgttcagatgaattcaaggattattgtgccaagactggaatcaagagacacaaatctgtgatcaagacacctcaacagaatggcttggctgagagaatgaacagaaccattctagaaagagttagatgtatgttgaagggtgcaggattgcagaaacacttttggggtgaagctgtgaagaaaacatgctatttaatcaacaggtgtccctctgttgcattaaatttcaaaacacctcaagagatatggactggaaacaagcctaactatgatcatctaaaggtttttggttgtcttgcctatgctcatgttagacaagacaaactagaacctagggctttgaaatgcttgttccttggctatccagatggtgtgaaaggctataagctttggtgcttggaggatggttataaaaagtgcatcatcggtagagatgtagtgttcaaggaaaatgaaatggcaatgaaacctggacagaattcaactttgaatgaaagggtacaagttcaagtggatccaaatgaagcaagtcaagacattgacacaccagaagcatctctaccagaaactggagaaggacaaattgaatctgatgatgacactcatgccaatcaagaatatctgaagagctaccaacttgcaagggacagagaaaggaggcaaacaaaggctccagacagacttggttatgcagattactctgcttcaaaatgcactgcttttgtctttgctgctgcagaagaaattgacaatgttgaacccctcagctacactgaagcagttcaaggcgaagctagagaaaaatggctaatggctatcaatgaagaaatggactcactaatcaagaataagacatggattgtagtaaagagaccaaaaggacaaagagtcataggctgcaaatggatattcagagaaaaagagagtgacagtggaactggcaaggtcaaatacaaggcaagactcgtggcaaagggattcagtcaaaaagaaggcatagattacaatgatatgttctccccagttgtcaaataaacatcaatcagaattatgatggctctggctgcaaaatttgactatgaggtggatcaaatggatgtcaaaatagcatttttacatgttatgttagatgaagagatttatatggcaattcgagaaggtttagaagttgaaaactctgaagataaagtctttctactcaagaagtcactatacggcctcaagcaagctcca

SEQ ID NO: 66523 - DNA, 1391 bp, Cannabis sativa
aggagatcatatcttcctacaagtatctctaatgaaatggattaaatgctttgggaaaaagggcaagttatgccctagatttataggaccttttgagattcttaagaaagttggattggtagcttatcgtctagccttgcctccaaccttgttagcaatgcataatatatttgacatctctatgctaagaaaatacgtttcagacccaacacatgtcctgagttatgaaactctagagctggaaccaaatttgtcatatgaagagcagccagtgcaaacccttgacagaaaggataaagcccttcaaaataagacaagatctttggccaagataccctggagaaatagcaaggtggaggaagctccctgggagttggagttcgatatgagggctcagtatctagagttattcaagttagattttggggatgagattcttttaaccgaggaataattgtaatgactccttagttttattttgagaattagcagataattatggtttatttttagaaatagtcttttaattattatttttatgattatggagatacatttaaattctaggtgtattaattatgatatatataaaatttaagtttttttatatttttatgcacagtaaaagtggaatgagcttggcctataaaattacttagttatggtttaagtcttagaattagcggataatatagtagatgttaggttattttaattagtatcaattttagattaaatttagtatatttttaatttaattttactcgtgtttcgagcaattctacgtttgttatctttatttttacagatttaaaataaaagaagattaaaaaaatatcagaggaaagagatgagaaaaaatataaaagatcgcataaaaggataagaaggcagatggagcatgccttgcacgtgacaaagctgccttgaagacggtagaaaaggcccgcccctatacagtagccaaaaaacatatgttttctcaacatgggatttttggcttcctaattcaaagttgaataggattttcagcatgtgcaattttctatccttttagtccctcaatgactatataaggagtgaactttagttgattcgttaagtaattcggaaggaaataaacagaagaataggaagtatgaattttagagatcaactacaatactggaggcatttgtaacgtctccgcttcaagcctctattcggcctttacacccacaaaatgatgtctcttatacacgagtacgttactctggcttcttcatggactgatgactgactcgaaaaaccaacacgagtgtttccagtatgctttttcctcactcacacgcttcctaggaaatcttcctaggaggtcacccatcctaaaattactcaaagtcaagcacgct

SEQ ID NO: 66524 - DNA, 2173 bp, Cannabis sativa
  modified_base (47)..(80): a, c, t, g, unknown or other
ctttatatgtgtttatttacaatgctttagaaattcatattaggatnnnnnnnnnnnnnnnnnnnnnnnnnnnnnnnnnnctggtaaaatatttccaacaaagctccgaccgaacagaatctttatgctttggccattgacaatcagcctaatccgtacaaataaccagggactccagctgtataagaccattttttttagttcggcccatggtcctttgttcagtacaatatggaccaagcggcctttaaacttggttatttttcattttgttttaagataactagctggtcgggtagcctttaatcccgaacttattatgctttgttatctttttattgaaatgaatattttcccttgttttagtaatttcacatgcaaactgctattcttcgagcttgttatttacctttgtttcgtacaagaatagttgccccccaagtgaccgagcagacttatgactctggtcacttgtattgcacaaggttattttttatctgttcagctttttgagttcaagtagaccctttgtacacattttaatattaaatccataacttccgataaagaaaagtaattgacacaattagaatgatgataaatatctttattcatttattggtctgaataattttattaccgtagtaacttacatttatcaaattacgaaagctattacatgatctaactgatcttctttagctaattaaaacataaaaaaattgtattttttagactgttcttttagaaatggtcatccgacctgagtgccagtcattttatctaaacctttaagcgaggtccgcttagaaggccacgtacttaagagtagatgttcgagcatcatgcacttggagggggtcatcagaccttatgcacttactggtagtttttttctcaaatgttccccattccaataccttggtaccagaacaagctccatattctcgtcatgttgtcccaacttgtatgttccaaagtctgtgactttcactacttgatacggtccttcccagttaggtctgagtacgccaatcgtgctgtctttcaagtttaaaagcactcttctaaggaccatatctcctacaaagaattttcttaccttcacttacttgatcaaatactgagccaccttttattgatgagctactagctctaggtttgctgaggttcgttttacttcaattttgtcaagtgattctgccaggagggcatgattagcttcttggttgtagggtagtctccagtggcacggaggttctaactctatgggcaacattgcttcataaccataagccatagcgaatggtgtctgcctggttggtatttgctttgttgttcggtacgaccacaatactttacgtagttcctccagccaattccctttggcttctttgagccacttttcatggtgtctttgagtgtcttattgattacctcgacctgaccatttgtttgagggtgtgccattgcggagaaactttttatgattctatgtgtcgcacaaaaatcagtaaacatctagctatcaaactgtttgccattgtccgaaacaatctcgtggggaagttggaaccgacatatgatgtttttcaccacaaagtctaaaaaaaatttagatgtgatcgttgctaagggttcggcctctgtccactttgtgaaataatctattgtgacaactgcatattgtaccctgcctttacctttgggcaactttccgatcaggactattccccatatagcaaaaggcaaaggaatttgcatttgtattagctcattgggtggtgcacgggggatttttgaaaatctctggcatttatcacatttctttacataggcctttgaatcttccatcatggttgcccaaaaatatccttaccttagtattttctgtgatagactctgtcccgctgcataatggccacataatcaatcatgaacctctgacaggagccatgtagcctcttcttttgttacacatctaagtaatggcatggagaaacctcttctatacatcacaccttcaagtatgatataccgtgtagcttttctcatcattttctgagcttcgttcctgtcatttgaaagttctccaatgttgagataagctgttatgggtgtcatctagtttggtgttgtatctatcatttcaatttcttccacacaatttatg

SEQ ID NO: 66525 - DNA, 1135 bp, Cannabis sativa
attaaggtgacaagcaccatacaagataattatactgttattggtgtatttccatatcagtttctacaaaatttaatttaataaatgatataaaaaactgctaatcaattattgggtaacacatcagtatgatattgagcactttaagatgtcacatagcaataatagtacaataaattatttacaaaagaaaattgtacaaatatcattcataaaaaataaaaagagaaaaagaaaaagaaaaagaaaaacacaatcgagactaataaaggtatgtacatatttactaacgaaattttggatgtgatatttaagtttgggggtaaactgaaattggacctcagataagttttcttctctttaaatttttgttttatattggggacagtgtgatgtatatatatattaataacaagggacagtgtgatatttaagtttgggggtgaactgaaattttttcttgcttagtttttctctagttttatgttattgtcatggtaagccttagtgattaaagaaataccatccattgttatttatctgatttaacttgttagtgttgtgtgctttttttttagtgtagcgtaatagtattttataattaattaatagcttaatagcttaaaggatttgggttcgaacccatgacctcttcctttttcccatctctccctcaccactaagctagccttagtggctcaaattagtaccgtgtatttaatttgattatttttatgcttaattttatttttttgtgggaaaagttgaatattaatttgtaaatgtgactagttagattttgttatacatgtttgattggttatatgattgataagttggattggatagaacttgcattacttagcttttgagacaaaatttttgatcatgtgtgttgttaggtccttttttggcaatttagttgtcaaaatataatttaattaatgtgcattttattgagtattcaatttgtctttatcaactctggaccctttttctaaggggagttgtgtttagttcctgtaaactatttggttcaaaagttagcatgtttctttagttattgttggttttcgattgtgttactcaaggggagtagttatttgttatggctaactttaacttgcaggtactt

SEQ ID NO: 66526 - DNA, 1163 bp, Cannabis sativa
attttttcccatatttgcaagtttatttttaaaaaatgtcatatttagtgtaattaagtttttatgccatatatatcaaaacttatccttattttcccatatttttgtaaatagcccttttatattttagcaacttgagactctttaacatacaattccaaagaaaagagagtgtaaattggctttatttaagaataattcttgttctttttttcttgaccatctctttttaaaagtcgcaactatagcaactgtgttttagcaaagcgaagcttagccagttttttagttatgatcattcctttcttgaccactagtttaatctttattgctttactttcattctctttatttttgacgtttggtcaagcaaagtatagtttcaaggatactttaattgcaggagaagtaaatatctatctaattgtttcattatactgctgtatatcaaataattaaattttgactggcagataaaaaaaaaaatcaatcatcaagatcttatttctctgtcagtaagtagaattatattaatttgtttagatattattaacattgttaaggtgtagtgtttgttagttaaagttagttagtgagctgttatttttagttaggaagttgttatgtaacaaacttcttatctttggtttagactctgtttttctcgtgtattatactgctctgttcttctgcaatggaggttaatgagatttcattcattttctgtctcaattgttcaatttatgttagacatacatacataatttatgtagatacaaattggtgggtacttacagacttatttcactaaagatctttttttttcttgtttcgttttattaagcaactttaattttaattattattttatgttgtggacttgtggtgccccaaacagggttgtgatgcatcgatattgttggacaatacggcaactatagtgagcgagaaagaagctgccccaaacaataactctgttaggggttatgatgttgtggacaatattaagactgcagtcgagaatgtgtgtcccggagttgtttcttgtgctgatattcttaccattgcagctgaacaatctgtcgctttggtatgtatatctataatatatacacacaactctcaaatcttatcatctattatatagatgggttcttatatat

SEQ ID NO: 66527 - DNA, 937 bp, Cannabis sativa
taaaatccctacaaaacttcagcaaaacttgtattttctctattaggccattttcttcaccaaaacccgaataaaactaataaactccactaacaactccaaattaccaagtggacacacaaacacatattatcacaagatgaaaggaaaagaactatatataagtaaaatacacacatagattaagctaaaaaccatgacaaataactctttattcaagtgttatcaatgagaaatcccaactctttggttgggaaggtgttaaggaatactaactctaccatcatggaaagccaaaaaaggttcttctttgcaatctatctggagggggcaaggagacagtggtattaggttctcggtggagggtgggttcaggtgagaacatcaatgtgatgaaggaccgttggctacctagaccgttgagttttaagcctttcataaaacttgagatttcgattgatattaaagtggtttattttatattaacaaatggagattgggatgttggttttttaagggtagtctttgatgaggatgatgatgagctcatcttggggatcctgagtggctctcttgacatgaaagataaactaatttggcactattctaatgatggtgaatatagggtgcgtagtggatatactactgctcttaataagaaagtctacgatgagagttctaacatgaaaaacactgagagatggtggaatgatttgtggaacaagtggaacaagagaatacccccaaaagttaaataatttttatggaaattgagctatttgtggctcccaactaatagttttcttttttacaagagaatgaatgtcaataagaaactgttggagatgcaagagagcgaagagagaagaaccaattattcatgcactttaggaattggtcaaataaatttggaaaaaattgtggcctttacaaggag

SEQ ID NO: 66528 - DNA, 1183 bp, Cannabis sativa
tttctaaataagggcccaaaataatttttttttctatggcccactaaaagtcagggccggccatgcccataatgtggctaagtgggcgttcaccagtaatgtaacttgtatggttgatccttcatctataccagacaaaattttatgtaacgatcatgaggtctaattttcgttgtttaatataaactacgtcggttcttccaaaaaaactatataatacaatgaccaagatttggatatgacatgacatgaaaaatatgtccttaaatacaacacgacacgagaagcacgaatagacttagcccaaaaagcacaacatgatacaaaaaaaaaatgattttaaaaaatggaacatccccaaccaaatttttaaaacataaaccttaaattctcaaggaatcaatcgaaggtggctctggtaccacttgttagaattctttatcactcataaaaatatgcaatatcaagattgatttcatataaaaacatattacatattattctaagcatagatttaaataaaatatttgttgattcaaagagaataactcaaatagcgaaagcgtaccttaatgtatagatagtaataattttaactcatctagagataatctttgtggtgattttaaataatgcaccaatacatatgaacgaggattttaatccaatagccttagcaatatttatgtagaaattactattgtattttcctactctgtgttcacatctatattggtcaaatatttaataaaaaaggtataatgtagtagacaaatcggagtagtttcatatgttgttatgtaatacaatagaacctctatctaagagtttctactgtatgtatttacgtatatctctgtgactaagttggaagactttctttttcatttattttattttatttgtttcaatttataagtcatagccttttgagcttacctgtaaaaagttttgtccttagtttatccaaaattgagctttagcctgttttaaaattttcaccacttaattgagcataatgtgttatctttaactactttcattctcaatgtaccttattatgccataaacttttaatcaagtttgggaggggaatgaagtgttttaaatgggaaatattttgaaagtaagagattgaaaaaattgttatgtgaagtgccttttctataaaaaaaaaaaaaaa

SEQ ID NO: 66529 - DNA, 2051 bp, Cannabis sativa
ttttttacataatatatattttacaaaatttgccactaaatactgcattttacaatttttaacttttatttatttatttaataatttatatatatttttaataaaaattagtacctttaatcaccttcaattggcacaaaatacattggaagatatgtgcaattagaaaagaataaattacactcacatgttagtcctagtttaaatggaatgtgatttgtattaaaaggttatatcatgttattgtgtttaatgcttaggtatatttttctgtcaaaaattttacatagcaatttaagtacaacaaaataactatataaaaaattttgccactaatgtttttacataaagaacataattaaatattgttaacacaattttttatcaacagatttaagaagattgtataaaataaaaagattacggtgaactgatttggctaaataaaattgtactaaataaaaaaggacactaggaatttttagtagtccatcacccatgtcgcgatggtaatgaggctatagctactttattgttattattcgatttcagcacgccagaattatgttctcaatagtactgtgtggataatagtacaaaaagaaatttttaggcaaaatctatattgaagcttatgaataaaaggctcttgggagaccaatactataaacttgataataatagtggtggtaatgttcttgagaataatacaccaatgagagcaagaattgagaatatgatctcttattcttgctaactatgtatgtcaatgatgattggtgtcgtactaataggaataaatcaaggaaaagatgaagagagaaggtgaagagagaaggtaccaaggatgatgtgttctaagtagtcgttgtccccctcaaatcctagtttatcactgcctttatatagacttagggtttgttagtgatccccaacaagtcggggtatttcactttaaatcccatatttttctctaaaataatgaataaaaagatgaataaagatttgtaaaatatctcttattcttaggcaaatatcctactgtcattgggattgtcatcaaaattggttattttttttgtcttgaacttgcttatgtggcattgtgctttgggaatggcaagattagagagagatgaccatgggatggcatactaggataaggcatatagagagtcacaagtgttgtgtcacaactctcctaacatctcattgtggctcacacttagtaaaacaaattaaatcttaaagtaaagtgtgcaaacctatcttacaatttgattttaagcccaataacttcagaattgtgctatgaccatgagacacacttaaatttgtcttgaaaatatctttctgttgatggtaagaactcatcaatgaaataacaaacgacttaaaaatgatatataaagatcttgatagaaaaatacttgaaataaaaatctcactacctttgatctctagaaatattattgtattatttacctaataaagagtccccattacaatgagtttaatgaccctatttatagtgagcccttgacactttacaacttcaccagatctcaaaaccatagaatgttaagtcattttcaccacctatctcaggtggcgtgatgtgtctgacatcctaagttacactaaaattgcctcttttattcgtacttcggatgaaatgaactttatctccattatccatactcattgtactatcgctatctcacctgcaatttccttgcttagatgaccctaatctcgatctcttctactcacttttatatttgtgaggttatgtgcacgctgaaggtggtaatatcgagtttaagcgctcataccatgtgtgtgaggagggaaaaggaggtcgaaggtagtgtaggataccgggcgcgcggggagcaggcaagcgcgtggagctccccttagtctgtggagctcctcttggtaaacttttgagcataacattaatgactctaaatattacacttagtaattttggggggtcaacactgttggaaattattttaccaggatctagatttaataacaagtat

SEQ ID NO: 66530 - DNA, 1954 bp, Cannabis sativa
ctttctcttttataaagcttatcttttttttttgaaggaacgataagttcattactgggaaaacaaattgggcattacaggggaaatgccctcccctacataaacaccaggtgatagtgcagaacttctcacacttttggccaacccatcgacaaaacccaagttcgaacgattaacataactgaaactacaaagtttaaaactattaattaaatctaaaatagctagggagatattaaaaaactgccaatcaggcacacattttcttcttgccaaagcctgaattgctgttaaacaatcggagcacaccacaattttttctgttgtcctttgcttgatccaagaggtggccatccaaattgctttcgtttccgcttccagagcagagccagctgcagctctttccaccttgtacatccaggaaccatttgttacgttgattaaaactgcagccaacccagccgaaccttcagaccaggctacatcagtggcaagcaccacatcataatcccttgtgaagttacatggggattgagggagaggcgtagaaattggctctaccctctcagtcatactcaaaaaatcaccatagttctttctaacacgcattatttataagggtaaactcggctgaccacctttgaatatgataccattcctcaatctccatatttcttcaaagacacacgccatgtgcattaagaaattggggcgactgtcaatcgggatagtcttcaacacaaattccacaaactctatcattgacgatccggggaaattacctaccatcaaaggaaagataccagaaatccatagagccctggagacttcgcagtctctaaatatatggaggcaggtttcttggtgaagaccacatagtaggcactccttatcccccacaaaaggaaacttattcctggttggaatgacttcgtttagaaatctccataaagacactgagagttttgggtgcatctcccctttccaaatctatttccagatgtcctttttaggattcatacggtgtccctgatccacccaataggcactcttcacagagaagactcctcccttattttctttccaaatgacttgatctctgtgatttggtggaagccttgggatttcagtaattctccttccgatggttttcccaaagatttgaaatacaatttcctcgttccagaccgttccattagacagatcagctagagttttgaaggtgaatctatttctcctcaattgttccatcagctggccgaattcttcatggttcaactaaggaatccatggttgtctccatgcgtctatcagacttccatcagctgccatagcaagagatcctttaagaatgacatttcggacatccaacacatttttccacccattagagtcactttgctttggagaaactgtccagaaattctcatatctgcagtacttactaaccaggcaattaacccgcggcctgttttccttctgaaccacagtccaagcgattttggatagtaaagccctattcagatcttggaaccttcttataccaagtcccctccaagatttcgactggcagatgctattccaagccttgtaagcaaggaatctgtccttatctactgatcctatccaccaaaatttcctgaccatggcatccatagcacgacaaatagaaagaggaattttcattgtggacatgtgatagacaggtaaggaagatgttaccgatttaatcaaagtaagtctgcccgcataggacagagtctttgtcttccagccctctaatcgctttctcatgttgttcttaaggaattgatactcctctgatttccttcttttaaacacaaacgggttcccaaggtgcttttcctgaccattgacttgatcaattcccaacgcccgaagaacctctgctttccttactgtattttgtgagaaaagcacacttgactttgtc

SEQ ID NO: 66531 - DNA, 681 bp, Cannabis sativa
cctagcaaactatggaagtggatttggtactctaaggttcatccacgattgagccttatgatttggagagctgtgtctgactctttgcccacgggaaacagaattttgacatcggactttaatttatgccccatatgtcaatcggcagctgaaactccgatgcatttattttgcaggtgtccgtttgcggttggcatatggttctcttctcctttgcctctgagaatggatgatatccctggcacttccttgtccgaggttatcttcaatctcattgagcacctggactcggagggtagaaaccgtatgttatgttgtgttggtattgtgatcaactgcatctggaactacagaaatgcgttaatgcatcccccttttgctgggccaagtcttgataaagttaggagggatatccattgccgtttctttgaattgtcgcatcaggagttgggaaattcgactgcccttgtatctagtctgtctaacccaactttccctgttttgcgctcaaacaaatgtcttctggtggatggttctttcagtattggcaattttggttgtgctatggtggctcttgatcatcaatcttcgctgtggtggtatggacatgcgtcgggcacttgtgattctagtttggaagctgaactggaagctgttatttttgggcttcaatgggcatcg

SEQ ID NO: 66532 - DNA, 1345 bp, Cannabis sativa
taatccacctcctagagataactatctccccactaggtaaagggttccaaatccaaaatcataattataacagggcctatccagtttatcaattactcttgacaccacataagagtgtgtagcctcagagtcaaataatacagtataataggagttgtttataaaaagctaacctgtaacaactaatgaaattgcctcaacatctgcatgtgtgatggtaaatacctgagtaggagtggatatgaactcctcctttggctcttccctcctcaactgagagcagtccctcttaaagtatctcatctgaccacactagaagcaggaattcttgttacattctcctatgtgatgtttcttacaacgaggacatttcgagtacataaattcaccctgacaaccaccactccgaccttgcttcccgcggaacatcttcttttttctagaactgctcagtgtgaaaggagtcttcctctttaaatcaaaaactaaatctctactacttctacccaaaccaaaaggaggaggagcaacgactccactagaaccctaagtccctcaaggctcatgcaaaaattgtattgcaccttttgctcagagagccttctgtactattagtgcatatgtggtagcatcatcggtcataatttttataccatgatagatcttggcattaggacgacctaatttgatttctgttgagaatttagttgaagtttcttgatgaaaaatgttcattatgatgttttaggtaccctaaaaaatttggtaagtttttgcttagaattgaatgagttatgtaagttttaaaattgggcagtggagttttggaccgtataatttaggtagaatttgggggtctatttttaaaacaaactgtctgtttttgagacttttctcaagaccccaatgaagtgttttctcgatacttatggtatttccattctatgtatagacagggaaatttttagttttgagtttaagtcgtcgaaagtgttagggtaacactttttgatttttatagaattgtgacttagggcctccgattaccaataactatttccactcaggttaatcgacactcttgaaattaaaattgaggtcagactagtataacacgcatacatatgtacatgtttatttttccatatgtatgacatataagttagaatgatagttggtatacatatgatggcatcttgataccgtaaatatacgtgtttggaaatttggaaagtatggactaatgctaccaacactagtatgccaatgactgagtgcatgtggtattatagttggttatacttttgaatgtatgaactagtgctaccaacactagtatgccaga

SEQ ID NO: 66533 - DNA, 1083 bp, Cannabis sativa
ccgccgctaatatccccgccgctattgagttaaaatgttgtagtgataacggtttatgtactaaaccatgctacccaaactttgatatctatcaaatcaagtctctccaacattgacatgtattaaataatatcccctaaactttcatcatgttaaatttttttattaaaattagaaaaaaaattcacaattttaataattcaaaagtatttttaacgatctaaaaaattcaagagatatgatttaataaaaaataaaaataaaaaaaagaaaacttaattacccttgttaataaatcaaaaccccatacaatattacacactcaaggcttcggttcttctagatgaatagaaaattataggctctcattacactctttctctactgcttctccaactactcactaataaacaagtttactcttataaatacccattattttcttcctcaactcctactatgccaaagaaaaaaaaaattagaagataataaagaaatggaagtctcatcatcaatccttgcactatgtggtaaattagtttggatagtaatagttgtgacatggatttggagagttgtgaattgggtatggttgaggcccaaaaggcttgaaaagtatctcaaaaaacaaggctttaaagggactccttacagagttctgtttggagacctgaaagaaagctctaaaatgatgaaagaagccaagtccaaacccattaatctctcggacgacgtcgttcctcggattatcccttttctcgatctcacagtcaacaaatacggtatttatttacttacttaattacttaatatttatttacttacttaattacttaagaatgctaattattagtttctgataattatgctatgtaattacttatcttttaatttgctataggcttggtagcagtatttaattaacacttaataattagttaacagtttttttatattatttataaaaataaaatttataagatgtgatattgaaatgcactttttgtagtattgagtattttaaagtattcagaatattagtataaagtatcatacttagtactatttagagatagcatttta

SEQ ID NO: 66534 - DNA, 977 bp, Cannabis sativa
aaatcagcttctagtatattccccttgcttataaaagggaacttttaatgttgtatcaattgcagaaaaagaggcattaatttagtaatatacagagcatttcattctccattttttctctgtttttccttccttttaactaatacgaacccagcatttctcatcttctcaagtgtaatcgataaatttgcttaactaaccatttcaaatactaaaatgtgcaaaataatttaagttaatttaatactcgtttgtggtcgcacagtataattcataatcgtttctgcgaccatagaaaattattttgctaaaaaaaaaaattataaaggctatttttacaaaataatattcagtgcaatcggtgcttgttgaatttcaccctttaagtaaagacctttgtaaacaacaagataagtgttcaaagctcgatgaaccttgttcttttgcatgaaatcgaaaacaacagccatatccttcaccctcttttgaatcatcaaaacttcaggcatgtaattacatgtttcagtggtgtgaacaacataaggcaacccttataaagatgagaaatgctaaaagacaccactggtggctagtaccctcctatatgtcaatatcaatattggttcaattaggtgtcgggtcttagtttaatgtaataatttttagtgagtatcgttaatcaatcgtaaagcaacacattaagaaagttcaaaaaactattgatgcccaataacaacgctctttcaagatttcacaactttcttcttcataaccagttcaagttcaacaccttcatttgggattaatttcacagcaaacccacataataaactcatttgtttggtcctcattttcaacctatttcccaagtacataactgtaaatttcaaaagtcttttccttccaatgactcactactattactacaaccacaactgaaactactactacgtctactactacaatacatacttgaa

SEQ ID NO: 66535 - DNA, 3009 bp, Cannabis sativa
tagaatttttcttatatacttgagtttctaatttttttttacatttgataaaacataataaaaaagaatactataatttttttatcaaattaatgcatattaatttatatttgaaaatatatatatatagaaaataaaatattatataaaataagttcttacatatttgtgattattataaactagattataacattatcattattattataatagatcttaacaactcacagtactttaaaatttataatttaccaaacacttagctcaacttttttccacagttttgctacagctgctttttctcacagcacaactacagctacttttttccacagcacagctgtgccaaactggcccttactccttgaatctcgatgatctaatgtgaatacttgggcaggtcaattggcttcatcttcttccaattttatttaagtccatgcctttgccaaaacatcttccatggtacgacacgggtacttagtgagctctttgtaaagatcggactccatctgaagtgttttgtagaaggttgtaatagcagtatctacgttgcaataaggaatggaaactttctctttgttaaatcttcctatgtagtcccgaagtgattcactccgcttttgcttgatgtggtataggtcgtctgaaagtttatcgagtttcctactgttagcaaattgttcaacaaacacatcagttagttgtgcaaatgaagatattgaattattttgtaaataaatgtaccactgtaggactggccagacaaggctagacccaaactctttacacatgcaagcttcacgcaagtcacgataaattgttgctgtgaaaattctttatttatattgtgcgatgtgatcgtcaggatcagtcgttccatcaaattgtttcatggttgggaaattgaacttctacaacatctccactagggcaattgcgtccacgaaaggagagtcagtaaagttgttgggtaaactctttttgattggtgctggcactcaggggatttgatggatcagggcctccatctccaccatcctacgtgctaaccctaagtcaaaagttttcccaagtggcattgttgttcctgtaattgtagaagtagttagtaatgaataagttgcaattgatataggaaatactcccatatagactggtgaggttgacctaaaaggttgaacgtatcaatgaagttcatgttagttgacatcgggagggtgacgccttcttgttgtcgactgatgtcactctacataaaaccatatgtcatatttgttgtagccggaggtacatgtgggtttattccatgggtttgagatggaatgttgaatgaaatgttattgttgatcataggaactccagttgatgtgtgatgttcttcaattggctgagttcctccgtgttgactcgttgagcctaccattgccgattgtgagaatacggttgattgggccacattcattggagttgattccaataattgcattgtgttgattggaactctgagccttgagctttggtcgagtgaagtggccatgttggcagacattgactccatcttctcttttaacatcttattttcgtcacgaaaggtttgaatttctttttcaagcacctggactcgctcaacattctctcgcacttgagtcatgagttgaacaacttgagtgttgatgttgatctccccttcctctatgtctgccattgttgaatgtctagcttcattgttagattgattgtcagggccccacggtgggtgccacattatggacgtacgaatctataattgaattaattgaaggtgggcaccgataacctgtacataacaaaagggaagtagaccgtaaagtctttgggacaccgggatggtgccgactaaagggattccgacggtcaagtcagtaatgtagttcttaacaagtagaatggaaataaaatagaaagacttagctatgatcgtcgttggaaggttggagattgaagcgaagctgggatgttgagagaataagagttagagtaaatgaaacgcgtagagtgtaggatgtagaatgtagactgtagaagataacaattgtcaaatgatccttccttgagaaggatcgatccttctaatagaacttgttttttagagagtgaaaatgttgcttctcacaagactaggccgtggagtgatgtgacacccgatattccctctacagttaaagagtcgtagactggttctcaattgtagagtgaaccgtttgagatagtttccacatcatacgtttgacttcattgttgagtaagttggactttgataatgggcttgagtatttatgacttgggcttactaacctacttagatttataagttagtagactgaaagtgtgctctttgggatgcgggccttgtgtactatattttgccactacaactagattgaagcctttcataggaaagcctaccattctaatccacattggaactctgtgaagcgtcgcatcttcccattgtcctgactcaggctagacttgaacgattataaatccacccttaaaagtccagggtagtgtgctctggaccatttgaaaatctttatcacaataaaaggagaaaccagcataggtactaatatggtcatgttttaaaacattaactttccaattcatgttagtcttccatatacttccaaatatagttctaatgaacttgtgattgcatctctttttagagaaaattcttacaactattaaaaggctcccaaatcgatgaaccatgtcattatcaaccacccaatcttcatctccttcatcaagagttgtctcagtttctatttattattctgaatcttcataatcctcttttacttggttgtcgtttgtcatattcaatgtatctgtttcctccacatctacaatactagtgcttatagccataaaatcatagacaaagaaatcaaatattaccaaaataagggtctcttgagccatactctctcacacaggatcctaatgaccattttt

SEQ ID NO: 66536 - DNA, 921 bp, Cannabis sativa
gcaaaaattttaattcgacacgtttttcgagaaaattctttaattagcaaagattgcactataattgaaaaagcactgtagtgtgccttagcattagggcgttacagataccctaatacagaatcgtttgttgaatttgtgtctcgtaactattatgaagaacactaattttaaatcgattaacaaattttctgtgaacaactagttatattaccctaatatagagttgatcgttcattttgtgtctcagaactactaagaaaaacactaattttaaattgattagtgattttctcatgtacaactactaatgataccctaatacggaattgatcgttgattttgtgtgtcaaaactactaagaagaacactaatcgatcttatctcgattagtgactttgtcgtgaacaactagtaatgataccttaatacataaaatataggctttcaatattttagtctgctagttgtatgaagcagactgtgtattcaatgtatatttgttctttaatcattaattcaaactataacccttttaatcttgaaaggcgtatattatatacattgtatacacagtctgcttcatacaactatgttgattttgtgtctcataactactaagacaacaataatcgtaaatcgattagtgactgtgttaagataaatcgtagaatttgaaatcaattagtgcacttgtcgtgaacaactattaatgatgccctaatacgaaatcagtggttgatttttatacagtgtttctacagctgttttttcccacaacaaatctctgccaaactggcccttatttgtataaaaatatataatttttgaataactaataaacgtgtgtgttaattcaaaaaaaataattaagttttaattataataattatatatgaattattaataagcgaagtataa

SEQ ID NO: 66537 - DNA, 2023 bp, Cannabis sativa
gaggattgcattggctttaaccaattttttccaaaaccatgagtcagagtctttgtatctacagcagagaagatccttcccttttaaatatttagcctccaaaattttgcagcataaagactgacaacctgtcagaatcttccaaccccacttggccaggaaggccaggttcatttctttagttttctggaaaccaaggcctcctaaagacttaggaagacagagtttatcccaagctctaaggtaaagaccatgattccccttctcaaagccccaccaaaagtccctgaccagaccatcaatctggtttacaagccggtcagagagcttagtagtttgcatggcatacattgggagcgaaagtcttacagacttgatgagcgtagcgcgacccgccttggacaatgtctttgtcttccatccctgaagtttagaagtaagactatcaaggatgaaattgaaatccgcatctttttgtctagatctgaagagaggcaagcctaaatacttagtgaccccttcaggagaatcaatgcccaatgcttccttgatccctctcctcatgccattgggagtattattactaaagaatattgacgttttgagcttattcactttttgacccgaccaagaacaaaacttctccaggcaattccaaaaacctttggcttcattcacattggccctacccaccaggatgagatcatcagcaaagaataggtgcgatagcaccgaccctcccctactgagcctgatacccttcatctcaccatttcgtaggccctcttccaagagtcttgaaagcacttccgcagcacagatgaaaagataaggagatagaggatcgccctggtggaggccacaggacggcaaaatcctgccaacctgacctccattaaggcacacgttgagagaagtggtggagatacactgagaaacccaccgccgaaacttttgagggaaaccaaagcaatcaagagcatggtcaatgaagctccagcttagcctatcataggctttaacaagatcaattttaattgcaaaatatccctctttaccttttttccttttgaaggtgtggataatctcttgaacgatcacattgttatcctggatattcctacccggaacgaaagaagcttgagtagggcatatcagagaaggaaggataggtctaattctgtttgcaactattttggatataaccttataaacgacgttgcatagagaaataggtctgtagtggttaggacgcttcggattctgaactttggggatgagcaccacattcgttgaattgattcctctatgcatattaccttcttcgaaaaaatcgctaactgcctcacaaaagtcatcaccaaccgactcccagtagtgtttaaaaaagagaacggacataccgtccggccccggagccttatggttgctcatggcaaacaacgtacgtttgatttcgtctcaagagggacaaaaggtggtcccctcctgctcctccaacgacagcttagtctggaataactctctacatcccgtagcttgactaatctctgaccccgagtagatgtttgaaaagaactcaatgaattcacgcccaattgactcacggtcagtaatccataaattgtctttactcagaaggctctcaatggcatttcttcttcctctaatagctgctgagaggaagaagaatttagagcatttatctccatcctttagccgatcaattcttgccctctgtttccagtaaattgcttttctagtcaggtgttcattaagtgatcgacgtgtattatattcttcattccagtcccgggcacctgctagtaagctctgtaatctatcaagtttttattccaattctttaatcacctcatccaacttcccaaactgagttctgttccacttgaggagagcaacacgagtcaccccaagtttcttgaacactcgatcaggagcccatgaatgctcaaccgagtcccaagcattggccaccactagcttacttctttcgtccctcgtc

SEQ ID NO: 66538 - DNA, 919 bp, Cannabis sativa
atatacagaataacagagataggggttctaactaactgcattgttgagcctaaattttgattagtagattactttgagatatattttagtatttagtttataaaatgttctacaaattataaaaaaaatggtaaagtacccaaaaaattttaaaaaataaaactacttttttgggtattatagtggatggttcatgccccaagggacaggtatccaaagtaccagcagggtgccctgagcgcagaaagaacaaataaaaaagcactaatcagacaagcaagagaacctgcactcaattcaatgaaacatcacccattacttcactgagattggcccaccaggcctcttttcgacaagaggctagaaatttgttacacagccaactttaaccgctgttacagtagctccttcacacaaacctctattgcataagatttaaagaaaagcttacttaaataaaaaaaatattacgaaaagaaaattaaaattattatttacgtataaaaaattaactttgaacttaacttttaggatcttctatttaaagaaaacccttcaaaaataagcgtatgccatttaaagtgacgagcgcacggtattctttagtaaaaggcgaaagaatagttcgctttgtgctcaacacatggctgcgtgattttaaaactgtaattgccacttactatatagttactctttgacaggaatgcttatgctctttccagtgtgggatagtgttacaaacgtacaatttctaacgtttaaccaggacattcagattagttgagtcacttaatagtgaattattcattggattaaatacactgccccacattagtgttttttttttttttgctgtaaactgcctcacattagttgattaactatttcaagcttaaattggagttcttacttctataga

SEQ ID NO: 66539 - DNA, 926 bp, Cannabis sativa
ttgctcttttctattttacttttaacatagtatttattgtagtagcctaataagttaataactattttttttttaaatatgttttaataatttacagtcatatatgatatatatatatatgtactgtatttatattatatatatttagtaccataaattatatcttggcaatttttacaatgaattctatttacatatacgtttttttagccattattcttaagcgtagtttactttttttatgatacaatttatctttttcttttaaaaaaattgctagaaaatacactattttttgtaagataataaaggagctatatactttcatgtgttaccaccacttggagagaataaaaatctgaagtaatgtattaacattcattattattttgttgaaagtatacaatacaatactattttattcattatttattagaaaatatatataataagaattttacttttacttttacactttaaactaatttttttttttacaaaaattcctataaaaatttcataacaactaatagagcaaggtatatcgtaaacagcagaacaacttaaattacaattaaaatctactcaacaattcatataaaaaccaccgaaacatctcaaatcataaatttaaaaaataaaattaaaaaataatatagagtaattctcttatatgaggggtttagtttttttgtttaatttttacataacttttttttttttgtatttttataaaaatttacataacaactcacgtaccaactaacaaaataatctaaatcgcaattaaaatttatattacaattcacgtgaaaactattagcacaactcaaactataaattaaaaaaaataaaaaaaataatatataaaataatttttcaatataataagtaagaaaaataataaaaaaaaataaaaaaggaaa

SEQ ID NO: 66540 - DNA, 965 bp, Cannabis sativa
taaaagaccttttcacaaaaggcaagaataagaccatttgatacggtagtatataaagcacaaaaatcgtaagaggacaaccagcaagtacaacataaaaaaaaaacacaaaaacttcgttcgaaattaaaacgtatggataagcaagtacacgtcgagaaacaacagaataaaaaagtaaaattgtcattaaataagagcagtgagaacacgaaatagaaaatccactaccccaccttacacaaaaactaaagtcttatgaaaaaagagtactttctctattttcaaaaaactgggggggagtagtggcccgtacaaaatggcttgtacaaaatatggtaaatagggtgttgtataaacgccgacggcataaacttacaaaatttacatataatcccaaaatatgaaaaagtgccgacgtaagcctacaaggtaaatacaaaaaaaaaaaagaggagaagagaccccctacacggagaaactctccctctgctgaaacgtcctctgcattgcaagccacccccgatggttggaaaaagaaggggggcgtatgatctcggataccacctgaggtaactcttgagggaaggaagaagcagatatacaaaaagctgagggggaggcatccgtaggagcagggacttcttcgaagtactcagattgggcagtagactcgatctcgggataataaggcgccgtcgtctgagtcgaacttccttccgatacttcaggctcctccttagccgcttcaactagtgtcaatgtgggaggaaaaatagcgaaaggcacatagccaaaggtggcgcagcatcaatgcgagaaacagcataagttccaaggcccaatgcagcttgctcaaagcagggacaactgcagaccattgaaaaatgcagtggaggaagtgtagtgggttcgaaatcatgaaagctagagaaggggttcaaagaaagaaaagcaggatccaa

SEQ ID NO: 66541 - DNA, 1418 bp, Cannabis sativa
tgatcttactttcagtggatatagtataataaccaaaaatatttttgttattactacgttatctattttctcgatgtggaagtagtggttgcataaaatgttattttattggatttgtaaaaaaaatggtatttttaaagaatagtacaagtttgtgttagtttttaaaatggcatgttttaattattaatagttattcatttttatttgagctcataatagacacttaagctcaagtatatatccaaagccttgcaccatgtagttaaccaagatatagattataaatagaaatttttatttaatttagtgggttgacattatgggaatcatttggttatagttagactttagagtccttgggcgtgtgatagtgcatggcactataattaatatatatatatatatatatataatggtggaattaaattagtcattgataaacttcaatatgtggcaatattgtttgagtaatgcatgggatatgtggcaagtaagctagatgtaggtgttaagcattcaaaattcaaatttaaaaacctagtctcaggagaatatacgtggaggcctttgtatttatagagtaaatagccaacaataaatatatatatatatgcttatattaattatgttttggcaatgcatggagataaacactcctttatcctagtcttgaccgattattaggtgagtggttagagctttatgtggtttagttaattattttcaaatcattacttaagttagtaaagggccaccacatgggttagtaaggtgtgatatagttaagttctaggcttataaatagatctatatttctcttattcctcatccaatgaaattaaacctctcaaacattctccctctcgttcttgccaaactctgctccaaagtcttgttcttccattttattgttctcatttgtttcatctataaccaaaaccttaccccacaaatattatatcattataaactacctcaaactatatccatacacaactataattatctgatatatataaatatatatccttcatcctcccataaatatatatatacatctcctacattatatcaacatcaccactcctacatcatatcaacatcaccactgccaccatttctgtataggtttagtgctcaactagatatcgggaactaaggtatatatccttttataattttgggtttctagtttcaaagttaagatttcatatatatatatatacccttataatatgttctaattactaaatgtaaaatctaggtttgtcataagaaaattattgtttcacaaggatcactcttattgcaattaaggttaggactccacattcgaggtaaggaaattaagtagaaaaaacataagttttctgtatgtaataacattcatagaaagagtgggaatagtaaaagag

SEQ ID NO: 66542 - DNA, 590 bp, Cannabis sativa
aagtagcatcatcaaagctcaaaactgagttttgccatttatgagctaagtttgagctctttaagctcaaacttagctaaccaacaccaagactcacaaaaagaaatcaaactattagcaccattaaacacaaaatcaactctgaaaataaacctgaagcaacttaaacataaacaaaaccataaacaaaattttacttcacaacttagctcaaaacttagaaaacaaaggtatagaggaactagggctcttacctttgaattcacccaagaaaattccttcaaatcttgctgtaatcatcaaaaacaaaagtaaaatggttgagtcctgcttagttttctagagagacagagagagagagagagaaaaagataagggtaagggttttctttttttatcctttttttttatttaccttttgaataaaaagatataatttaaatctcttttgtcttattctccaaaaatattcaacataactaattaaggaattactagaattcactaaaaacaatagttgaaccttagggcaaaatgacaattttacctttacttagctataaagcaacttaaatagcctaggggtaaaa

SEQ ID NO: 66543 - DNA, 1662 bp, Cannabis sativa
gacttattatttgttgatgattatgaatatggtcgtgtaaaaatacgttcatgcttcctcaaattgtttccaattaatattgataagaagatgttcagcccaacttcactcactttctgcaccctttatactcaatgattcatccttatctcttatcgctacctcgtaagtattactattatttctttttatatctttattagtttaactaaaatattttaagaataaaaatattttgttaaatataaggttagttttataaatatatatatataaatattaatattattaatttatttagattaatttaaatatgcattaatattaatattatttattttaggttaatttaatttatagtaatgttggattaaattaaatatatatagatattaacatattatttatattattattattttgaatattaggaatatttttaaactttatatttattttcctcaaaattttaaaattttaaatattatttttttaaaaaaataaaaaaattgattatagtagttcctttaatttataaaatttaaaaatatacataataaaaataaaaattacaaaatataattaagcataacctagctagtatatatatagatgctcatataatttcgtactaattttttcttaaaaaaaattattacttgtagttgtgatgaatcacttcggatattgaagattcgaggtgcttatttatagagggatgtaacaacatttgaaattagtgtagctgagaaacactcatgtttagttcatttggatataagaatcctcagctattagggctattggaaatcactgcaagaatttaaaaagattggataggaacttgatttctgttactgatgatagtaaagatgaagatgcttttgcttattgcatcttcaatgccaaggctaaagcatcttgagattgcttatacaagtgttactactaaaggtgtattcaaaatactcagtagttgcccttattttcaatatttagacatttctgaatgttccaatctcacacattctcgtaatttgttcaacaatttttgccctcgtttaaagattgttgtagacaattttgtgttcactattgttattggttcacgtcgtgacttaacttttaattatgctttggaatactttaatttatggatgtataattttaaaggttttactgtattcgtgaggcattttattaatgtaattaaattttataattttcaatatattagttaatatatttaattatgaagaaattacactgtatatttacttttttattttttatttttatttttacctttcttttgttactcttaatttatacttagtttggttatattatgaaaaaattacactgtatattcattaaactataaaaatagattgataattaaaaaaattaagtaaaactagattaaaaaaatatatattttttgaattaattgcacacttagtgttgatataaaactgatgtggcaactagctaatcagccttatcatcattttgtttgtcacgtgtgacaaaacttaataaaaaatgaccaatttacacactgtgaatagtttaatgattatttttagaaaactaaaaaattcaaaaggcacaataatatataatttatagtttgggggcaaaaattcaaataacctaatt

SEQ ID NO: 66544 - DNA, 1125 bp, Cannabis sativa
ttgttgaagacataaaataacaataatttgttttattttattattagtgaaaaaatattatttttcataaatattaaataatttaatattaaaaaataagcaatttaaaataattgatccaatacttttgcaaattagaatagatttgtactatatccagtacaaatcggatatagtatgaataaaatagtgtatcggattgaatcaacacctctacataccttatattattaaaacttttatattatttaggtatatcaataagaatatgcggtatcccataataatttttctcttaaaaatataaagtagaagtaaaacccaacagtttgcatctatttttctttcaaaacaacttgcatttatttaatagacaagcttacagattttttatagagacaagcctcgacaaaagtagttgaagcaagcatagcaaacatacagagtagatccatagagataagattactagttaagataaaagcacagcatcagttagtactgttaattacttagtctgtcttgaaagagagaatattctcaaaggcagcttcggcggtggatgaggtggtactgggtggggggcatatttttgggcatgcgtgaacctcatacgagcaccaacaacgagggcaaagagatctatcacaggcgcaaccttcactgcagtttgatgggcactttccttttctcgaatcactacgaacacacaccaagttcccagcttcttcgttacactcacaacttacacatttcgttggttcctaaatgtcaaaaaaatattattaattaatgaacacatgtttatatatgcatattaccaaaagtaagccttttggcccttgatggaaaaagaaaaagaaaactcaccaggtggtggacaatactgagaatgaccattaacaaaaagccccacaaagtccacacgagcatgagttgttacagccacaagtgacaacattaacaacaccaggaaagccttgttgaacgccatagatattagatattggtttgtattggaatgagtagtgtgaagtgaaagagtgagactgagacctacagatatttatagccaagacaagaagaacaggcctaggattaggaatatataatcatgcatatacg

SEQ ID NO: 66545 - DNA, 2219 bp, Cannabis sativa
cctagagttggtttaggtggtggtctaatgttgttatggaaggatgatgttgatgtaactttgaatagttttaatgcaaatgtttttgattgttatttggcttttcacaatggtcctagctctcactttactgctttctatggtgcccctaatgttgctcaacgtgtacacacttggactcttctcaaaagattgaaagatgttgccccattgcttccttgggttgtcattggagattttaatgagattctatataaccacaataaaaagggaggtaataggcgctgtgaatctcagatggatgatttcagaactgtattggatgtgtgtaatcttaatgaattgccttttactggggacccttttacttggattaaagggagactcaaagttgataccattcatgagagattggattggtgttttactaatgatagttggaactcatctttccaacctttagtcacatctcacttggattactatgcttcggaccatagagcaattgctgtggatgtgttgcttttgaactctactgctgcaaaaccagtaagaaaaacgcgcttcagatttgagaaaatgtggcttaaggaggaggatgctgctgccattatccgatcgaattggacacctgactgctctggcagtgttgatgttttcatgaataatctctcctcttgcacggatgctttacaacaatggcacactaggaaatttgggaagatgaagaatgatatctctcagctgcagcaaacggttactgcactaaataatgcagcagaccgatccaatgatatggtttctcagcttaagaatactgaagcaatcttggacgatttgttggcacaagaagaagaatattggcatcaacgatcgcgtgtggattggctacaatgtggcgatcaaaatactaaatttttccacgctcatgcaacttcacgcaagaccaaaaacactattaaagcgctcattaatgatcaaggcattactgttaatagcaaggatgctttgacacaagtgatctgttctttttattcttcattatttgcaactgatggtgtccaacctgattcactccagcttgttctaaatgccattcctgagacaattacttccgaaatgaatctatcactcactgcacctttcacaccagaagaagttgttgcggccctcaagtcaatgagccctgataaaagtcctgggagcgatggtatgtccgccatgttctaccaaaattattgggacattgttggaatcacggttacacaaattattcttggagttcttaatgatggtaatgatatgactcaactaaataagtcaataatcactttgattcccaaggtttctaacccatcatccatgagtgattatagacctattagtttgtgtaatgttatttacaagcttatctccaaagtcattgttctccgcttccaaaaagtattaccatttgtcatctctgaaacacaatcagctttcctatccaacagactcatcactgacaacattcttgttgcttttgagcttatccattgtctcagacatgagactcaagggagactaggattttctgctctaaaattggatatgagcaaagcgtttgatcgggtagagtggaaatatcttgaagcagttatgttgaagatgggctttgcttctaaatgggtgtcactaatcatgaattgcatttgcactagctctttctcattttcactaaatggggaagttgtaggccatgttcaaccatcccgagggttgagacagggagatccactatctccttacttgttccttatttgttctgaaggactctctcgacttttgcagtatgaagaagttgttggcaatttagagggtttacggttaactaggctttctccatctgtttcacatctccttttcgctgatgatagtttgttgttttgtcgagctaataaccaatcggtcattgcaatccaaaggactcttgacacatatcatcaagcatcaggtcagatgttaaacaataataaatccgtgatgtccttctctccaaacacagctgatgtcatcaaaaatttctttgctcaaactttgaatatgcctattacgaaatgtcatgaacggtacttgggtttgccttcttattctggtagagacaagcaagaactattcagccatatcaaagaaagggtttggaagcttcttcattcatggaatgaaaaaatattttcgat

SEQ ID NO: 66546 - DNA, 1098 bp, Cannabis sativa
ctttctcagttagactagttggaaattaatcttttctcaacaatgcaacttagatctatttgtggaccaacaattccctcatcttcacatgtcataacccaaagctgtaattaccagtaaattttattatgtcgaacatcgtgtttcccatagtgacaatactccaccataatcttgctcagaattcaagattgtaccctttaaatcatcttcaccaactctgattccaattgtcaagaaaaccttagacacaccaagaatatacaccaagaactagaacaatctactcttaagtctcaaagaaacataataagcaatttggattggttgacttgtctcaacccaatctctaaactatatatggttttattaatcatatggtgtttattacatgtgtctatacaaatgaattacaaagtttttatagacatatctaagtgactaaggtttttactaacataacagtcaacataaaaaaataagctaacctagactaaaataactaagtggcagtctcagctagcagagttatagactcatcaaataaacataaaaaataaaaaaaaataaaaaacataatagactttttgtttagttattatcaagtaactaaagagacacatttaattaaataaatctgggcaagaacccttgtttcctctttttgttctctccgaacacaaagaaaaaaaaaaatataaccatcaaataggtgctaaattttactttctcccattttttctccataatcttgtattttttttttacccaatatcatatatgcactatataagctaatttatttcaaggtttagggttgaaaatatattcttttactgtgtgagttttaggtaagaatatcgttgattttttaagtgttttaactaatttcttagcttggattaaggtttatgttgctttaatatatatttttatgcttttgtattatacattatttttattattataatttttttagtgtgtttataggattttaaaactgtggtagtggtcacgaattggttgttgttgaaaattttgaattctaagtaattttagtgtggaaggatgtatggattactaaatataataatgtgt

SEQ ID NO: 66547 - DNA, 588 bp, Cannabis sativa
tagactgcccacagctgtgttaaataacatttcaccattcgaaatgttactgaaaagaaaaccagattataaatttttaaaaacctttggagttgcttgctatccttgcctcagagcctaccaatcccataaatttcaatatcattcaaccaagtgtgtaaatttgggctatagtgaaagttttaaggcttacaaatgcttaagtagcacaggaagaatatacatttctaggaatgtaatttttaatgaagctgagtttcccttcaaaaccggatttcgaaacacttatcgagcagaacaaagtgttagtgttcaagttccatcatggtcaacattcataaatgcctcatccaatttttctcatgatcagccacaacaaaacatcaactctcaaactgataaagatcctgacttagaagaacctggagcatcatcatctcaatctgtaacctctgctacagatcaaaattctgaacacaactttgatcaaggtgaaataaatgctgttgttgaaccatatgaagaaccgactgcagtgaacactcaggtcactgaaactcagcctagtgcagcacctgacagccaaca

SEQ ID NO: 66548 - DNA, 1822 bp, Cannabis sativa
ttattataatgttaaaatttattagttaaataaaaataatattatcatatatatttaagttgtaaataaatatttaaatttaatttttgacgataataatactgataattttgaaatttttgtaaatatagtgttaataaattgtggctcattaatttttatttttcaaatttttaagtatttacgcaaaaattactcggtatctccctcactatcagcagacgacgaatttctcttcccctctccctcagtcccagcgccttggacgtcttcgtccctgttctctccctttctctgcgactctgtctccacgtctccctctccttcagcaacccactgatggctcccccccaagacccaatctcctcaacgacggctacagttgatatctctgtctttctgtgtgtccatgtttctatattttagtgatttaattttttcatgtgtgttttagtctgagtcaatttttttttttcttttgttgaagtttaaacaaaaagaaaccctaaattcctaattccactgcagtgttgaagtttacgagtttaaactccccaaagcttaaactaggatcggaacactgcatttcctgtttccaatatggtaggtttcttctttccgctctacctctgttttactcccatttccctcaattaactattcattattccattttttctgtctcagttttcaatcgcagctatcaatgataccaactctaaaggccaatgggagcctttagctccaaccaaagaagctcaggcatctctctctctctctcttaagatttaatattgttttttattttggggttgggagttgtataattgctttaacaataaatttggtgtagtttcatatctgaattgcactgaatttgaatatcacgggtaatgtattgagcataaatttgattactctttgtttcgaaaaaataaaataaaaattgattcttctttttaattccattgagttccataagagtaagagtaatgtgaatgataatcataattccttgggccattatatattctgtgtttgacaatatcaggaatttcatctgtcacaaacttatcaagaagggttgcttaaattgcaagctaaagaatacgaaaaagcccgccagctcttagaatctgtcctaaaagacccccttatagcaaatgcccaggtaatactttctttactagaacatttcgaacgggttttcttctctctctctcttatatgtataattttcttttggttatgtaggtggatgggagtgctagtgatggacatctattgcaactcaggtttagatataaagagcaacattttttttttcttattattattgtttatatcttactttacatgtttaaatttgtattattttttcccatccattgtgtctgcatttttctttaaagctactggtatgtaagcaattgactatgtttgttttcatcattgtcattctcatcgatgtagttagatttactactagtaggatatgactgataagtaagttgtattccattttagttacattgtccataggttagtgtgacacagataccgcttgatgtaccctaaccagggacttcaattaacaacagagacaataggcaagatccatagaggaaattgagactggtagattagatctgggtatttgatattgaatgataaaatgataaagaaaacaatagaacaatgtggtattcgacttcaactctcccaagagctactgctcaagtacaatataattctcatgattcttcacattctttctaatctcctatatactacccatccactacccttcattatagtgaca

SEQ ID NO: 66549 - DNA, 1092 bp, Cannabis sativa
tgcataaacacatacacaaaagaaactccttttatccacagccatatacattacaattcactaaaaaacatatatatttgtatatgaaattatgcatactacattacaagagaagcaacacaagtttcctctaaaaaaaaagagagtatataaaagaagcaaaggccaagagcatgagcaatacggggcaaacaaacatcatgacaggccacccaaatcatcataatgtattattcaatctccatatacatatttgtatactcataacattgtagcatttttttttgctaaataaccctaaaccatcaatccattttaaacgataagtacaaagtagctaaaaagaattgtgcgatacacacaatacagtgccataactaaaattacaaccaattgttttaaaaaaagaatattgtcatacatatgtatcaagtacgaaactaaaaactcaaaccatatatatgtagctaagccagcaatagctatctaccaatgtaaattatataatctaaattacattggtaagtaaatgtattataacgtgggtatattaatacgaacttgggaattgaaattcaatatatatgtatatatattgaaatcttaaaaaaaatatatggacaaatttgcctcgttcctaggtgacattgtatttatatgtatttaaaaaatcttatttcaaacgcaatatttatatgtatttaaggatgcaaccttcttttgaaaaaaaacaaaagaataataaaaaaataataataaagtagcacccactgaattttaaatttaaaatctttttacgaataataaaaaagcaagcaccgcatactagcagaggaaagaagatttaaattcctgccttatgcctcttatttacctgcaataataaaataaatggaagcatgatattaaagaaaaataataaagattttttttagataccaaagtgtagtctttctattaaaaaaataataaaaaaaataatctcttgggaattaatgagcaagtatactttgttggcatttctgctttagtcttatatctcaaataaaaaatacaaaaagaaaaataaaattcgtaacagctaaaaaaaaa

SEQ ID NO: 66550 - DNA, 1333 bp, Cannabis sativa
  modified_base (435)..(440): a, c, t, g, unknown or other
  modified_base (777)..(780): a, c, t, g, unknown or other
  modified_base (1077)..(1089): a, c, t, g, unknown or other
attttagatgagttgactactctattcaatgaacattatctttgactctcgcctaccgggacattgtataagttttttaaaaatcttggaaattatttaagatgtgtttgttttatattttcacatgtctttcttacttgctgaatgcttaataatttctgaattttgtatgaatttatattgagcctatgttattttttgttattaattgttgtagtttaattttggatcttcaatcttagtctaacttaacttgatgtatttaatgggacaaatcctaaaggactgtcatccgttagacaaacaaaatagtgctagatctcgatagataagtatttgtatatgcaacatctagttcttcatccattgatgacaacttagattagtgtttacaatatgaaacaatgaatagatttataaaataagaataacttnnnnnntcgcctaccgggacatcgttggattcttattttaattgaaattatcatttagttttttcctcttagcttttttatttagaacttgcttagattgtatatcattggatgaatagtttctaaaatcatctgcttatgatgtcattctattttcctccatgaaattgaacggcacagatgactatattcctgacattctatctcgaaatgatacaaatccttgatcttagaaatctcctacttgtatatgcttaataaaggcaatataaacttagagttagattagtggtggtggtccaagctagaataaaactcaaaatatatttggtataaatttaannnnttgactttaaattttagatttcaaatataaatttcagtttcagttccaagaatgcattaaacattgcagtacaactttcacaagtttaatatccattttctgtcaatggattagaattgtatgtttaagtaatatgagttttttttttattctgtgaccaggatccacttgaactattctaagaactctttattgtaactagacctaagtcatccaaagaccacaacaacaatttaatatatctatggcatttgtatcttgaaagtaggatcatctatattcgaatatggatgtacnnnnnnnnnnnnntatgagttatcgttaaattcttaatacgatcactctagattttaccttatgcaaaaaatttgaaatgtttgagaaatttcatgaatttctagcatgttgaaaacattaaggtaagtggttacagatttcacgaaataataagggtggagaaatatttagtggatatgcagttcaaagatcattaagttgacttttcaattgtatctaaacttacctccctaaaaatttagattgcatattgatg

SEQ ID NO: 66551 - DNA, 623 bp, Cannabis sativa
ttccactacttacccactataataacctaataatcatatttaatttttgtaaaaaaaaaagtaatatataaataatacatcttattggccaattttccacttatttccatttaaatatatatgcatggctaccgctgctccacatagctaaaccacacacatgtatatattgatcattttttatttttattaattttcttaattacgtacttactgtaagttaaacatttaatatactaaattgttgtgtaataaagacataattattaattaataattaaaatcacagaccagtcatgagctaatttaattaaaatgatataattaataattgatgatatttttgtttttttaaaaaagtgatgatataactccacgtaacgtataatagatatatttggaaaggaaaattaaccaaatatatatatattatatagatatatttaaagcaatatctaagccttaaataatggtttgattttttggacaacctgaattaaatgctgtccagccgaaaaataaataaatgctttcaatttaagtcatatataagttaattgttcgtatgtaatatagaaagtccaagtcaaaatgatacatataattttcttaaataatcaatg

SEQ ID NO: 66552 - DNA, 1148 bp, Cannabis sativa
  modified_base (996)..(999): a, c, t, g, unknown or other
atcctggaggttagcagctccttcctgatgcaattcgttccaaaatggggttcctgtacggattccggcttgaagaagtgcaagctattgtccgtcatcaactttcttggttttcgaggcttcttccttgaacctctttatgaaattcttcaaggtctctgtgggtagttgcttgatgttagttaaagcactgacttcgagattgatctttctcgccgcgacaaactgtcttcggaaactaacttgcaacttgttccaagaatccacagatcctgcttccaattttttgaaccattcttctgcagaaccgctcaacattagtggaaagcataaacacttggcgtcattactgaccctcataaccgtcattactcagttgaatcgagacaaatgatcgctagggtctgaatccccagtgtatgctgccatctcgggcatcttaaaaattttggggagctttgcttccaatatgtgttgggcgcatggctctcggtcctcatagtcaaagtccgagtcatcccctttttgcctccgggagacccgagcgatgtctttgcgcagtgtcaccaattctgctaaaatttcttcattcagtgtttccgcagagaccgctggtatatgtttctttttgtccaagtgatcccgcaaatcaccgtgctttttgttgatttggtgtcttaaatcaacgggagggtatcttcggttccctcttcctccttccccgggttcttggtgcacagaaacgctttttcagtcctcttgatcctgagggccaagactccccttttgaagttcgcccctctgcggacctttccctttcgataaatctgagcgaacctttcgcggattcctacaacctttttctttctccctgggataaaggtagggttttttctttaattttctttagagggataccgtataggacttggttccctggacttgtgtttctgagtgcttggggaggactcttccggcgtttcctcgagtcctgcnnnnatggccttagggtgtatatgaatcactgctgtctccatggatttttgcatggtgaccataacctcttgcatctttttattttgttctttttgggctgcgatctcagcttcatgatcagcagccttttgccttaagagcagcagctctgt

SEQ ID NO: 66553 - DNA, 4048 bp, Cannabis sativa
tcattacccgctaactaaggggttgaatctttataaaatcttgtgttcatttactttattgttcttattgtgtaacatgggcaagcatcggtattacattcgactccgttgttggttgaccaaatttgaagtcaataatacatataatttattaattaattcattaattgtaaaaaaaaaaaaaatatgaataagtaaaacatgaattcgagctcaatttgaaaacgaactgacctgtttgaaaaaaacgagctagcatgagaaaaacaaagcatgacgaatctgagcacggtactaaaatgtcgaacctacaagcctaccatttaaaaatgttagcataacacgagataactcatattttaaaaagcacaaaaaattgtgtgaaccaaactaacaagacacacgaatttacaacactagtttgaatatgtatgttaaattaaattaatgcattttgtgcataatatttgatacatattctaatattctgtataatactacttattatatttacttcttactccaaatttatatcccttctgttctagtgttcggcttaaccaaatgaagagcaaaattgtgctttacaagtcataaagttcaaatccgaaacagaatatttacaaagtcttagttacagtacacaacttaaatagatttacagcttccaactacggtgatttttgatgttttgattgcacaaaattttccctttctaggaataatactattattccttattccttattgctctcattttattagccaaatattacaatcatacacttcttgtcagcaccaataactactcttattgctcagagctcaactcccctgagtacagggaaagcctctactctgtcatggtcattcaataacttcagaaggctgcaataagatagggacaattttgaagagctgacatgtgtgtatgcattgcattgcactcttagttctcaagagtgttctgagtcattcttctaactctaaaactgctgggaaggggagtgaatgaactagaacccataaacgtggaagcttctaaccgaatttccatgaaaagaaatatgctgagatgggagctctacttggaagggaacaaataaaaaaaaactaaggtaaaaatttgctccatcccactcctcttctaaaacactcttcctattctggtccatacaatataactacatgttggtcaagggaattattagcaaactcgaattttctgtctctctctatcattaggcttcatagatgacacattgtctctctctgctaggcatctcttgtatggtacaaaccccttcctagaattgcagggttcaacacttactttagtaggaggttcttgggaaaaggaattgacggcttctatgtttgtgtctcctagagtttctatcccactagcagatccttcattagaaccagtacaagacctttccttctgaacttccttatctttggtttttccttctgcgcaagaactcagaaatgtttgctctacgcttgggatgttgtctgcgatgatgtaattgcatggtgtttgatacaaagaccactgaagcatagaagcattgcctttcaccgcattagaatcttctttctgttgctctaacaggttaatagaagcaccacatgccaacagatgacagtcactaacaattccaccaagacacagatcagtgcctaattgatctggtgataattctgaaacaggcatttggtcagtttgtaatgttttggaaccctcaacaccagaaggcgatcctttctcgaggtcagacaacaagactatctttccaaaaatcttaaaacttgttgaagttgaaagtttggtctcttcttcagtgtgtttagtgttcttagcacctgattcacatttctgtatgagatcacagattaaagaaggttgggttagaattctagtgagattgcacatttaattgcataacgaaacagctaaagtgactaataaaaagaaaagaaaaaaatatatcatcataccaagcacaagacattctccatggtcgaacagtcagagaattgattttcaggaagtgagctcttctcttcattggatgatttcgataacaagtgcccattattcttctcgaaaggagacaggattatcgaatgcaaatcagttgtccttgacattgatgaagacctgttattctggtcagaagtagcagagcccactgcatcagagccgtgactggacaaaactgaagtaggagacttcactcctttatctgtatgtacaagacttggagatggagatctttctgattgatgtaaaatagacagattaaaaaggtcaactgatttgcgaggataaggatgcttaggcttctttttaggccttggtggaggaatcgcaattggttgcacagaaccttcaacattccctattgaaccccgaactacctgaattcagcaagaaaaaccatataagcatggataacgatgtaatagtgtaattccacagtctgtgaatatcataacttttcagaagttttattattacaacagtttaagaaatataaatcaagccattgaccttagagaagaacttttgagcatgacttcgaatctgaacagcagttttggtgcctacatgttctaaaaagaaaaaaaataataataaacaaaaagcaatttcacatgataagatggccataaaagaaaatctacaagcaaaaaactgaagctcaccttcaatttgacgccaaccccgaccatacaacttcaaggcatcaagaaacttctgatgctcttcctccgtccatttttctctttgttttgtaattgtgtaaggttttctggccttcacaaaaggattaaacaaagaatagttcataccacaactttcatcaagtacaaccttttaggaacaaatagaaaaggtactcagtagagagttatgagaagattgaaaccttaggtgcactgtcatagatctctgtcaaccccatgtcttcactctgtttggtgtccaaaggaaagagaagacaaaagaaacataccatgttagacctctcttcctacaacataaagctattaaacaaagtactcttgctcataagaacataaggacataagtcggtaattttataaaataatatcaattccaattcaagctggaatagataggtatatgaccttgaaaaaggactgtgaatcactcagtaaagactaagataattatgaaacccattactaaaaaaaagaataaaagatcaattttcaaccacaaactaggcttaacaactctttagattgttccaattcctagctgctaagaagatctctgcagagactaatctatgtaattcttttccttgcattaaaagggtgacccttaagtgttttgatttgttaccaataaacaaggctaacaatgataggctcaatgaacctatcattaaaatattgcaaagtaatagctttgcaggtactattagaaaatgaaaacaaatacaaacatataattttaactaagtatatatactagataaccacaaaacaagaagtatgcatcgtgataattatgctcctcttaccaaagttaacctagaaattgttttagtcatcagccaccaccaatcctaagtgtttcaagaccaattttttttttttcaaaaaaaaatccaattttttttctttctttagatacacaaagcaatgaaaacatcatcaatataaacacatagacatattatgtttccgctacaaataattattttggattagaaacaggacttttaaatacctcaacaaccatagttttcaatttaggctagttagcaaacatgaaatttcaatcttcacaagttaaaatcagctcatttaacttcacatcattgggtttcctaaacagtagtcacttcccaaaagaaaaaaaaatcagaaactcacctcaaagattaatgcaataattgaaaatcagagcagcttgaaaaccagctcccacgaattctcccgataaaaacagatctgtgacaaatctaaaaagggatttttaacaaagatatgttagagagagaga

SEQ ID NO: 66554 - DNA, 876 bp, Cannabis sativa
  modified_base (81)..(81): a, c, t, g, unknown or other
  modified_base (174)..(181): a, c, t, g, unknown or other
  modified_base (546)..(566): a, c, t, g, unknown or other
  modified_base (659)..(659): a, c, t, g, unknown or other
  modified_base (822)..(834): a, c, t, g, unknown or other
atcattatataaaaatatataaaaatttacaaaataattaaaatataataaaataaatacttgaaaaatatctaatttaanttgttctaaaataacaaaattttcaacttaaattatttttcaataatttaattaaataataaatttagtatcttgaactaatcaccttaattnnnnnnnnattccattttaagttgatctaaaattaacaaattttcaacttaaaacaatatttaaagaatatctcaataactaattttctagaaaaatttaacttaattatttattttaaaaaaaatatattcaaattcaagttgatccaaaattagttataaataactaatttatagcttaaatatatttttatgaaatattaaataattaagtatctaaaagaatctaattagttataacttttttatttaattaaatacaagaaaaatacatatagtttatgttgaataagttgcattaaactaagtttatttttcttaaattaatttcaaaataatcaaatgaaaaattaatttcatatatttcaaaatnnnnnnnnnnnnnnnnnnnnnttattaggtcaaactagtttaattaacctagtacaattattcaaatgagccaaatgggccttataacaattagggttgttcatgtgagggagngctgggttcagtatgtcgtaccactactatggccccttaactctcacagaaggcccaaaggagaggaatttaaataaaatctatcacaagtgatcattttatttagcaacctagtccattttaatttcaaaaattaattgggctccctatatgcatctaagcnnnnnnnnnnnnnataggctcacacaggcacactgatttggatggatcctatcat

SEQ ID NO: 66555 - DNA, 1037 bp, Cannabis sativa
tattagggacgatattcattagtcgcccctaaattattgttcttattttttatttcaatttaaaaatttaataggggcaatatttaatattttgaggggtgacttatcacctctaataattggacaataaatattttatgtaaaataattatataaaaagactttgtggaaataattattattaggggtgcctttttaaatttttagggacgacttttgtcgctcctaaaattattttttatttattattagtattattttagtaacatttttattttttaaataattaatatttatgtttttattttacattttataaataatgataattttttttataaggaaatagtgataaaattttaaatactaaaagtctaaaacccatttgaggatttctaaaaaaaaactattaaggataaaaaaggacaaaaactcaaaacccatttcagtgtcgatggagctccccaacccctaaaatccaaagctcttcttctccctcgttcacattagcaaaggtcgattcgattgaaggagatctagagtaaatcagcaaggtaaactccgttcaaattgcttgaactctaagctcaaattgcttctctttgctttcttaattgcttcctctgttcttcattttcaaagcaatggtaccatctcatatttcttaatttgaaatgagatgaaatgaaatattgtggtaatgtatttgtgtgattgaatatcacttgtgtttgaatattatctgattttgtagatctgattcatacttttacagaattggaaacttcttagctcacctcctccaagatctggttcatcatcggcgctttaacaagaggtcagcatattagaattcgtttttaatgtcctttttgttgattgaatcatatatattattgcttatgttatctccttattatttggattttcatttcgaaatcttttttaactaaaatagatagaaaaatataagtagtgttgcatttgatttgaaatcgttaatgagctggttgtagatcctggcaatttttttggag

SEQ ID NO: 66556 - DNA, 948 bp, Cannabis sativa
agggtccttttatgaatatttttctccatcttgctcaattttaattgtcctacttaattatgtgattatattttgagtttggccaatttaaattactaattgatccataatcatataattatattaaactatttttttctagtaattataatctcacaattttattatatgtcatctattaattgaaaacttaaatatactcatgccatcaaattattttctggtattgatatgtgttgccccaagttcttcccaatatatgtggcagtctcaatataaggcacgtgggaaaagtaggcccatcgtctggagatgaacaaaacacttaaccaaatctcccctaggaagaccagtaactatgatccaagggtaagctcccggacatgaggaaacagctccacttcctctccgagaggtgaagggcgaatgaactcctccagaccagcaaggctggaggtgaacaattaatgactttgcatttaatgcagtatagggaaaacatttgggaatacccataagaggacgtgtcagacgtcataaacccgactttgggcaattacacgataatcaagagagttattgacggctccattatgaagaatcacatcaatcaagaagggattaagattaatctcacctaaacccttggcagcctactacgtaggttatgcatgccctattttgtatctttttagaacttgtgcgtgcccatagataagcacttgaagacaagtaaacccgtttcttcttcccaccaatcgctataaaaacccctcaataaaaattagtgaggggatcagaaaagagcgagacaaaaaatattctacgtaagaaatactcacttattagtaacaaagactcatggactacgactcattaatgctcgatccacgtaaaaatatccgcattaattatccctaagcgctcattattacattagatatttgg

SEQ ID NO: 66557 - DNA, 2392 bp, Cannabis sativa
  modified_base (90)..(90): a, c, t, g, unknown or other
  modified_base (341)..(346): a, c, t, g, unknown or other
  modified_base (423)..(430): a, c, t, g, unknown or other
  modified_base (478)..(482): a, c, t, g, unknown or other
atatttttagaactctgtaggtacctaaccgttaaaatattatgtcattatccacgtgtcattttcttattggtatattttaattaattntttttttaaaataaaaaatttaatgacggaccaattaggaattgccacgtggcaatttacttaacaattaacagttaggtacctataaaagttccagatttatgactaccgccaaaaattaaacttaggtatttatttgcaactaggagttaaacttaggtatttatgccgcaaattactctaatataaaataaaatactaaataactataaaaaagaccacttttagtgataactttttagtcacaacannnnnnttttgtgactaaatgtgactttcagtcacaataaaaaattacttgtgatatttagatacaagttttcactaatttannnnnnnncacaacaaatattgtgactaaaaacatatttagtcacaacaaattgtnnnnnttgtgactaatacttttagccaagcactttttagttacaacgtaaaaatgataatttatgattagtgacaacttttttacttttgtagtgaatgaattcccgtcgaggaagcgagtgtcgtcccccaccccgtttaacatctggtgacaaaaaataatctcaatccccatcttgttcctcatttagacggagaattctcacaggcccattcccatgggataaatgtgcatccgctgtgttgaatagggcaattctctaagctctggttttcctttgtagctcttgggttttttgaataaattctatttaaatgaataaataaatagctaatatttattacacattgttgaccccacttttagtcaacgacagtaagtcaattattaagcaattataaatgtaatcaaaataaagaaaaaaccaataagcaataaagaacaccagattttgaagaggttcgacccctttagtacagtaatagcctactcctcttagattgtattaactcgagaacaaagaacacaatgtttcctctctcaaagctcttacaattaaatctctgagtatttctcttagatctctctctaaagcaattatttcgatcccctttctagtgaagctagatcactatataagggtcttaatgcatgagggaaggtttcttttttgcttacaatgtctataataggaaggaacattcattacataaatagaatacacaatatagaggattgagacaacctgccgtatccttctaattcaatcccatgattgtaaggattgtcttagtgcctagactccatgatatcattctgaagtgatcaagtcctgataaatagctcagaaaacaaaactagctctctcctcaggtagtctgccttttaccctactaaggtaagtagacgttgtgcatgtagatgtgctacttgaagtctgtttgggatattcatctccgcccaggtgcaaggaatattagacacgtatcactggtatgtgttggcatgtcgtagtgcaaatactgggataacatttgcccctatgtctacactggacctccgaggtcatacatggactttactcagtctggatccttatctggacaggtggcacgtgttcgacgcgtctgttggtgatccggcgtcactctaaccaagggtcttctcaattttttggctcattaatgctgattgacatatacatcaaaccacgcccaaaaattagcacgttttgacatttaccattcaagtaattgagtgctcaacatatacatttggggggaaaccgagttattcaaattttgatatgattactttgcctcacaaattagcttataaatagggcagaaatccctaatcaaccactgttaacattttttgttcttggagaatcagagtaagaaaatcttttcctctcaaatccttcaaagaatccctaagaaaccccaattagtgtcatccgagcaactctaaagcttcaaatagtgagtaagttcttcatctatttcctcttttatgcttgaatatttgattttttgggttttttttacttaaaatacttgaaagttcttgttctggttctagaaaaaccatagaaaacttacgtttaggaatgtgaaatcttgactctgcataaccacgttgtttaattataactgcgctttgatttcgattccatgacattcagtttcactttcccattcctggcttagtggaaattaacctctaattcaaagttttgaaattcttgattgtaaacctcaatgtcatgcaaaattcctattttggatccttcgataggacctggtcggtataacaaatctgtttgtgttcattatcctggccaaattgtaacgccctaatgctaaggcacgctacagtacttttttcaattatagtgcaatctttgctaat

SEQ ID NO: 66558 - DNA, 1751 bp, Cannabis sativa
aattttttctataaaatatatttttttaaatataaattttcacaaataatgttggaaaaatatgctccaatagatatataaacgaacaaaattatatttcaaaccaaaatattacaataaaaaaaataaaaaattaaataatattacaactctcgacaaaacatacacataaaatataaaatatggatatgaagagaatgttacaactctaaactttaaacaacaaataaaacacaatatataaatagcatatatatatatataagagacgcgagaacagttttaataccacaaccacaagtgataagtaagggaaatacaaaatttaaacaagattttacacatttgttcaaaaacttatttcatcccaccacaaggacttagaggaagagaagaatgaaaatcactttttggatttatcaaaattataacgtttctagcgaggtgctcttgtgttacaaaatgaatctcttaggtctctatttataatgtttagagaatcacacatgaaaattaaaatatcttcaccatattgttgttaccaacactttaattggtatttattgagataaaaacattggacaagaatgatagaaacgtgtttgagaaactcatatacatttatatggacacgcccatgacccgcctaggatttttgcaataagcccactattggggtgaaactacatgtaataatctaattattgggcccccaagaagattttgtgctcgtgcgtagaagtagctggggaataggggaccataagttgtacaacacacgtgtcgccaaaaggttttaccttgcaaagtaaatgtttggaatacccgtctgacaaaaaagtgtacgaagtgcgcacactaccatgatctaacacatgggacaagatctaatcctacgtcagaaagaactgtctctgggcaatccgggttcattttcaaggtagacgtccgcatttcttttggggtggtcggcgtccatgactgaccctttgggtaaccttctaggtatcatttggtcatactttgaacttgggcatcttcagatcccggaggaatggcaagcctttcgtgtctcgaatggcgcaataaggtaggagacacttctgtgtatctaggggtcttggcctgttcccggctcccgaagcttctccatgatctaatccaattgaggggacttggtttatgactacataaagccgtacttttctttttatgtcacgtgtctctccgaaaacacggataacaatacaaatatatcaaaaagtcatcatttgtgctaaatataaaataattttatatttctattggagatgattttaaaagttgtaacttatatataaataaatatatttaaaaaaaatcatattaatttattttcctaaattaatttggagaaattaccaattgtatggtattttacaagttatttctcatttttacgtttttatttcatattttccacttttataaaatatattttacataaaaacttattaatcaaaattttaaattcataagttttcttcctaaaataatcccaagactctccatttcttgcctttcctcttcacgcaatgaccaccagatttgcttacccaaactcacttcaccttctccaccggaccaccgcatcacgaagccaggtcactagagattgctaatcataatctttctcccctttctccaccatttgccaactcattggagattgcataagaagttgatggagattgacgatggggttgcaactt

SEQ ID NO: 66559 - DNA, 1312 bp, Cannabis sativa
  modified_base (827)..(836): a, c, t, g, unknown or other
gaatgttattctactctcaatagtatagatgatctaaagaatggaggccacgataataaatacatgcaagaaattattttaattaatatatttaaaatataatttgtgtaaataaatgccaagagttctatatttgtaataaaagatgttttttgacattttttaattgattgtgtgatcttaatacccatctttagcattaaaaaaattaattaaataataataattcatttttaaaaggattgttaaaaacaaaaaatactcttaaaagagaaaaataatgataatatagagatgtgagataatcttttatttttctaacatcttattaactataatttatggtaattttaatatttaatttcacattataaatagtgtgtaaataatcaatttgttttaaaataataataatactttttttttatataaaaaataataataatatttaattaagtaaaaagtgaagttacatgatgaacttatcatatttatttaaaaataaatataataataatatgataatagttctcctaaaaaaacaaataataattaaagaagtagtggtagattctatttcttctaatctctttattttgtgataattttaacttttaattacaaattatgaataatgttaattaattaatctatttaaaaactaattaattaagtagttgtatgtctattgttaaaaagttaagtaataattgatattaatttaattgtaacttattattaaaagttcaaataacattttataagtgagtaaataccattttggaccttgtattttacaaaaattattaattggaccttctgttttnnnnnnnnnnaaaatagaccctgtatttttcaaaattagacaaataggaccctgaattaataattttttgttaaaataaaacttaataataatctgatctagagatgttatgacaaaactagttacattttttgtatctattcgtgttagaaattgtattaaagttgattatattaaaaaaaataaaattattaaaaattgagttcagagtcctatttttaccatttagcaaaacagatggttcaattgataacttttgcaaaacacagggtcaaaaataaaatatatctttttcatcttcaatatcaagtattttttattgttaaagcatgttgcacttaattcttcattgtgcaaaaatatgatattctttgattaaatatttttcattaaattatttaaatcgaattcttagaacataaatattatattttgcctaaatatagtttctttgattttgtatagtttcattaaattgtaacacat

SEQ ID NO: 66560 - DNA, 977 bp, Cannabis sativa
cggacgggtactcaaagggcctaatctagatgtcgaccaccttggagtgttgtagatgtctaccttttatgcacgccaaatcaccaagtgatggttatgctttttcttagaaagatcaatttttctctcctacatccaagcgcgattgcgcacacctccaccaccttttaccagacgaatattacaaatctctatttttgaaggagaaacctttaggtgacacatggcctctacttttaaaggttaaacctttgaaaggcaactgtccatatagtacaaaatggtccacattgtctagctgcagcacacacaggcacaatggtttccatgggatccaacggtcagctctgattattgcatgtaatttgcgccattagtggaattttaacagaaatcctaggcgggtcatgggcatatccatagccgccccttagcctataaataccctcctatttccataaagaggggtttcatgtccaacatagctaaaactctaccaagtttactcttcgtctcttccacaagaaacttagagtacagagttagggtttcctagaaaaaagttgtaacaacatcaaaaataccctaagaggctaatagattgactcattgactaaggttcattagcacccaaaccacataaaaaaatctccaccccttcaattctagattttattatttctttagttctcaaatatttagtttctaaaaatctcgataaacattttggtgctttcattgagagctgaagaaagacgttaaccactatttttcccatggttttcacacgaaagatggttcctaacaagactcttcagtgtggcctcaagatgttcatggaggaagtaaaccccctctttctagagcacacccaactaagcgatgcgagagccaaggatatatccaatgtgaatgatcaagaggatgacccaaacaaccagcatgaccatgtcggtgatgaaaaagatgctgagatt

SEQ ID NO: 66561 - DNA, 1393 bp, Cannabis sativa
gatgactccactccattcgagccttcctctactaggcctcctcccagataactttcctctgtgctgccaagtcccttaaactctccatggcctcatccatgcccccaaactctaacataatgtacccatggtcaattagagtcttcgagaggcgaccagtctctgcagcaatctggccaaacaagaaaaatgtgtaagtatgggaggtcaggcatcaaaagacaaggtccgagaacactaacagatagacttacctcggtcatggccgcactaatgtcttggatctggtagactgagttcatggaggcacaggccgcatatctcttttccgggagttgggtcagattggagacgaagtggcttgtcaactcagatgcaaaaggagcaagggtaggcccgatgaagcaattgagctagtttttcagggggtccatgtttaaatcccaggcgttcccaaagtactcactgcgagaggaattgtcttaggcttcccttaggacctttttcatggcctccacctccgcgttccccttcgtgtattctgccatagcatagttgtgcttagaaattcggagttgctgcctttcttcatcggcaggaacgggggttagggcaatgctaggaggcacagtatactcctccgcttcaggtgggatccccgagtcagagctaaggcccggagtgtcaattcttttgggtttcttggtagcctcaaccgctaccatcttgcctttgcatttcctgtccagcggggtgagaatctcgccctcttcttcctcgtcaacctccctgtcctcatcaatcaagacaatttagcctaaagggacgctgaaagaggacctcccaagggtgatcgtctggtcccgtgcctgaggcaaggtggggtcgggactgtaggtctaggcaagagttgccaaaagcttgtccatcggcctagctgcttcaagaaacaaacaaataagtgttagaacgatgacgagaaattacacacacaggaacaaagcagtaaaactagtcctacccagaaaatctaattcagccctaccaaagtcctgcactataatgctggcttcgtcatccccaagaaagctgtctgaggggagaaaccagctggaagacagataagctgaatgatccagaaggataggtgcgggaggcccggaccccatccgagaccggcctaggaaatggcctaagttggaaaaataaagcccttggcatgatcaccccatcaggtaggggcattctaaatctaaggagatgttcatcaaattctataggcctatgtcgagaaaaatcttgagcagaagggacatgatgaacaactaagggagacttaccggatccggaattgctggcgtcaggagctccagtgttgggaaccgggagcagt

SEQ ID NO: 66562 - DNA, 512 bp, Cannabis sativa
tcgacacttttctattgaacgattagagatttgaaacgacgtctcgttttgttaggtcaatatgctaaggagttgagtgtgctgtaagtggatatcataattttgttctctaaatttttaatggcacctttatctcatgttcccgcaacattaatactggagttcataacttggttaaacatatttttaggataaacaatgagttatgttagtttgaactttgaagactcaagattgtcttaatgtgattctgatcactttattaaaagcgaaagaaagagaaaatatgttaaaattaagacaaaagatgcaatttaatatatagtcaaatatgattgaaacttgtttaatttaaacatatattcaaatgttgagatgtgggagttagactttattttagaagaagaagatattataaatcggtaggtgattaaatatctccaaaaacatatataacttttcaagagataaaaaattatttttgtgttaggtgttcaaaagtctctaagaat

SEQ ID NO: 66563 - DNA, 1475 bp, Cannabis sativa
taaatataaataatttttttttttgtattatttatttactattatataaaatcattctgtaatttgataatgctggtggggaaaattacatgaaaaattacaattttcccttaactacatttaggcttcattttataaccgacgcaataggtgaaaaaaaaacatatttcagcaatttatgtgtcattttgtaaccgacggtataattttttagtgaaggttttgaaatgccacaaataatttctcgtcatttccaaatcgatgcataagatataaaagaagaatgtatattttgtgacggtttttaaatgaagataattgttttttgcgtcatttgaaaaacaacgctaataaaaaactatttgcgattatggaatatacgtagattttctaaaccgacgcaaattctttaaatgacacttaaaaagtgacaagaattgtattttttgtggtagtgtcaattagatctcaatcttgagatggctatactttaattaagctatttgtattgcttgagttcattgacttgttcattaccatcttactcttaaggtctagcccatacttacatctgggaactcggtagtgaaattgagtgagagtgttaatcatagacttgggtacatctatagcttttataatttattaaaagtgaaatgacaatttattttaactttggttaaagacgataaatgattgagtactcatttatgtaattatatcagtttactgtaatatcatttacaatggactaagtgtttgaagattaaaatacataaaatggtaaaatagcaattttagtctctacttaatgtataccatctataaaaaatcattgatttttcttattgaaacgatagataatttgtagagcatctattttggatgtataaagtagtctatgaaatcaagagttcaattttgagtgtgtagtggaatcacaaggaattaataagttaagaaatttattcgttaaatttcataacaacttattgacaacttaatttcatagatctatagtctctacagttggcgagataatatcatgttaatgtcttaattaattaatttaattaactaattaaaatttgaaaaactaactaggtcaactttgacatattttcattaagttgtattaaattgagaagaattgagaaataaaggcttattttaaaattatgacattttgagagtcaaattagtaaatatattttaattatagtttaatttattattatttataattataaaattaagactagtatttaaagagattaattttaattaatgagtgaataaataaaagataattagattttaagtcatttgaaataagaaaaagcaaacaagtgtgggtccacactagtgtattttatccatagctatattttagtggctaattttttttttttgtttcatttaattaattaattagaaatttaaatgaaaactaataaaaagaattattttaattg

SEQ ID NO: 66564 - DNA, 964 bp, Cannabis sativa
ttttacttaataaaatcttgtagtttttttatgggttttgattaattaatcaaaaaattaattttttaatggttaccgaacaatacgacagtaagtataactctatacattactttttttttttcactctctcacaaaattttattttattattttttcaaaaaaaaaaaaacattgcaacttggtcgcacttagtttatatctttttctctcttttataatttcttactactcacactcaaactaatgcatgcttttttttttttttaattaatcacattttgtaaaagaatcttaattaatttcttttaacttttactaaataagatttttttacttacacacctttagtgatattttttaacactatttatctctcttacaaaaagaactaggagcactcttcttatatctttctctcgctcacatgattaataaaagtactacttattttggatgttttgtagtttattcaaaattaatttatgaatgatatgcatattgcaacaaggacgatatcttgttattttttggttattttgtagctgtctttttgttgttttatagttatttttatgtttttttttaaaataaaaacggttatacattgaaaatgcaagtttaaaatacaacagtttagagaggagctaattcctccaaccaaacacaatttgtgtccaccgaaagagcatacttagctagcgtatgagcataagtattagcagatctaggaacatgggaaatctgcactcttgggaaattggtcacaagattaggtatatcagataaaatacaattgaattcagaaactaaggcccactacaagaaaataagttttcagcgactagattttttgtaaacaaatcaacttagtcactaatagatagattttacgactaatttttagtcacaaatatttttagtcatgagacaatgttttattagaaccaaaaaaatcaatgac

SEQ ID NO: 66565 - DNA, 636 bp, Cannabis sativa
aaaaaaaaaaaaaactaacaaaaagaaaaataagcataaagaagtaattaacgaacctgtcaaaaaatttacaatcgaagaaatatagttgtaaatgatacagtgaatatgtatatgaagaagttgtttaaagaatagtaaaaatggttattaatgatatgttattaattaatatttataaacctatttaaaaattaaaaaaaaataagaaaataaatataggtgttttgtatctacatcttatataaacacttttgtaattattttcttcattgaataagactgaataatcattctctcccaaaaacactcttctctcactaaacctcacatggtatcagagcttttatcgtccatcaatggagtttcttgattcaacaaatggagcggcaacaagattgaacactacttaactccagaactaacaagttcctttgccaaagttttatccccttttttttaagtattcgtcgtcgatcaagtttgatgaacacaattttctcccttgtcgttgtcaagttttagctataataaaaggtagtcgccttcataaatttcttgattctactcaacaagataatctttcaattttttggcttctttcttccaagtctgagaaaaccaccaatcaaatga

SEQ ID NO: 66566 - DNA, 516 bp, Cannabis sativa
aatttagccaaactagaaactatcgatgtaatatcgatgtggtatcgttaaactatcgataaataatcatatggacaacttatttttacaaacttaaaaccaccgataagccataaataaactatcgataacctatttacaaaatataaatccataaaaaaagatcaaaacctaaccaaaattgtcaataaactatggataaagtattgatatcctatcgacaaacaattaaaaaatttgaagaaaaaaaaatagaaagtcacaatcctaactaaaccatcgacaaacaatagaaattctatcaataacctattcgcaaacattaaaaaaaaaattggaaaaacaatcaaactaaagaaaaatttcaatatcaatatataataaaacctatcaataaattattgataacttatcgttaaactattgataaaatatcaactgtcccttggttccataatcgataacctatcgattgttgggttttgtgccctaaataaaactcagatcggaagagcg

SEQ ID NO: 66567 - DNA, 1057 bp, Cannabis sativa
  modified_base (164)..(164): a, c, t, g, unknown or other
atatatatttataagtatatattattcgttagtattgattacttgttatttgttaataatatttattaatatatttaccaaataagaatatcaaaagtataaaaaaaataataagaaatgaatattatatttcacatattaattagtaaaataaataaataaanatttaaagttatctatttcaaaaaaaaaaaattaatgtaaaaaaaataaataataatattaataatttatattataataagaaaatacataagagaataagttatatatatttatatgtaaaggcatatttatgttatacctctacatttttggaaaataaaataaattttttgaaggaaatgtataatttatagaaactaattctaaattaaacacaaactaatatctagcttttttttatatatatttatttatttattacgttactaatgataataacaattattttctggtataatcatttaagaatatgaaaaatagaaggtataaatataaagagaaaaaaatatacgttataattataattatttataaaaatatgatctagatgtaattttttctaaacaatacctattttttcaattctatacttacactacattttatttataaaaatacatccaacaaatttatttataaaaattaagagtgttacatgagcaaatatattgttatactcgaaatttagctgccatctcagtagaggacacgtgtcagaataagggaaatatagatcgatgcaatcactctatatggaataactcattaattacatgagtatcagagtatatttgtaacccgtagacaataagatattaggcgaggaactaatatacaaactagtacttagtatattggcgagaaaccatatgacgctgaatgcgaattggaagacatcaaggacagtacacattgaaaaacgaaagcgacatatatcaattgcgaaagtccttagtgtacaaacttagtgttacagacagatcgactcaagactaagtaagtgaggtgcctgtctcgttatgggaagacctcatataacttcatcccgtta

SEQ ID NO: 66568 - DNA, 1295 bp, Cannabis sativa
atatttgtgtgatgaattatatgaatgttgtattgcttttcttgctgagtctttgtgactcactggtgctttgtggtgtatgtaagggcaacgaatgactaggacaaccatgagatgacaaccttctctggcaaatgtacatatcaatttatctggcttgtgtggtcaagttgtcaggagttattttgggctgtacctgatgtatatttttacctactattatatatagccttttctgtaaaaacttttgtaagagggaatcctcgaaataaagtttttagcgatgtaatcctgttcattgctggttttattttagtgaagtttttttttactattatcacgaattttattaaatagttaatctactattagtaaactatgttttaaaaatacacacgtgtagtcccaagggattagggcattaaataagagctcaaataccatagaaccgagggacaattgtaagagataaaaataatattcatgagttaagaaaataaaaataagaagaaagagctgatcttataatatcacaggtcttaaagagaaacgcacgatttcattaaaaggaagtgaaggaggaaaatagcagacaaaagagcagatctctacataaaaagaaatgcggaacagagcttagaaaggaagagaatgagcgatgagtacggagtgatgagttgcagatgagaatgaggacgtgggaaaatcaaaacaggaaagaagaatgaatcaagcattccttcccgtctataaatagaagacccgatcattctaaaaaggggatgaattcttgatcacactaaactaaccgaaattctgtcagaatacaccctcaaatttgcacttgaatttagagagcaaacaacccagacccgactgagagaattgaaaggaaaattgaataaattgattgagcatgtaatttgactaaatcgaacatggtttaaagaatttaaaatcttaataaaaatttgttgttgagctaattttcagcatcaactgtagtatcctattcctagtttaatgcttaagatcagatgaacatgaagccaactgagtttattagtaaaagtgtatttattgtattgaatgaaataaagtgtacagaattagtttatatagggggagaatatccaaccctagaatacaccaaacccaactagaaaaacccttatcactataaccaaacaccaaaaagtaaatatacaatatttaatatttaatatgccccctcaagatggagtgtacaagtttgtaacattcatcttggaaaataactccttgaagtgagatgg

SEQ ID NO: 66569 - DNA, 788 bp, Cannabis sativa
ctttccaccttcaattagatttagcctccctagcggccttagcagccgcttcctcacaacaaaactttgccaataggtgcagtttagtgtcattctccatcactacgctgctcgggattaatcatgtaagttttgctacctttccactcagataatttagtatacatttactcccagtcttgtggtagtggaggattcataatcacactaccaactccgagcctgataagcttgcaattattcttactggatcacctacaccttctagtacactcgcgaccattgctttttcatgatatctttccaaccaggattaatgataataagcattaccgtacgtgcataaacatatccaacaactttataccaaaacttatcatgcttttctaacaacttacacattttagataagcaaaaaattcaaaccatcaatgaataatctactaataaactaacaagtagcacttactaagccatgagtcgaatgagtcttcgcagccaacgtacatatcaagccagtctttaggatcttcaaacctttgtcgctccgataccatgttgtaacgccctaatccacagggacgccacgtgtgtgctttttcaaacctatttcttactaatctattagtttaggaaaagtgtagcttaaattcaaaccctttccagattttaaattacattaaaactcccatacaaagtacaattataatatggggatcccctgtttataataaaaatttcctttctaacaaatttacaaaactgttattacaaaatcaaggttacat

SEQ ID NO: 66570 - DNA, 1777 bp, Cannabis sativa
  modified_base (1496)..(1498): a, c, t, g, unknown or other
atttagccattatgaaaaattacacatgcatcacatggtcaaaagaagttgtaaattagatcatatattccactcactatggtgttcaattatttgaccaatagcactacttatgatttgggatatttctatggtagggaagcttgttttgttcctatgaaacattttattatatatatcttgattaaatgataattaagggggaggagtatgataacaaatatggagtttagtacatgttcacatatatatcctctcaatttttttatgtattattttattttatttttttgacagtatttttaatttttattaaaaaaaattatataagattcaggttattcttttttacttggagaaaagaaaaataagattccatcatttttttttcttttctaatggtaaacttttttttttttttttttatattttctccttaccaaataaaaaataataatgtaatatgctaaggtttatgataccggattagcaaccataactagtttaattatgtattaatttggaattatattattatataatttaatatgtaaaactatactgataaattgcatgttaagactatgttagtgtcttaggggtattttcgtaattttgattcgagaagagtaaaatcgtaatttttatgatatatagtgcttatggactatattattatatagtatgtatactttatctttctacaagtattaatagacaagtcagtgcaatatagtcacaacaagatattttgagccaaattgagttcggggcccaaaatatattttcggaatttatttgtagtattgatgtattaaatgagaaatttaaaatttattgaactatatatatatatgtgtaatatgcatgataactttgcccttggttatgtgtatatgattatatttgactataaaggtatttcggtcatttgatcatattttgtattttcaacaaaatgaaaaatcaaatttttgctaaatgagaaaatttaaatttctaagttttgaacccctctttggccgaccctccctttctctaccggcccctctattgtaatttcattgaatcttgaagaaaagcttagaattgtggtgtgtcttagcttgaggtaatctctttatccattctcatcttacattttctgtatttgtgaggtttcttaaggtgtttttgatgttttgtaagtgttcatgcatgttgataatttgaggttataattgataaatattttctgtttgagctctaggtaggatgtgtaatgcttataaactatgtcggatgtttttcggattgaaattatggtttgaatataaaaccaaaatacacaatagatatagtccaaaacaactcatggcaacccagcacgcaggccagcgaggttaatatgtacattgctggagaagactgtcacctcatggatgatctaacttttatttacttgcaccacatagcactcgtgactgagtcacaaggacttagcaagaaaagtaatnnnaataatcatatagtttattattcaaatactatcatttatacacaatcagaatcaaaccatcacacattgttcataagatgaaatccaaatcactactggcatctgccacgaataaacatcaatatgcaaatattttgtaatacaaaatcgttataccaataatagaattcatattcatttaatcatataaattatgaatatatgtgttacctcataaagtagccatcttcattacatcacattgtctaatcaagcaagtcgatgctttaatttgataat

SEQ ID NO: 66571 - DNA, 1027 bp, Cannabis sativa
aaggctcaacttttccttctttccgaagcgctttatataattcattggtaaaactcgtaggaaaacatgttctcccgcctaaaattcaatatctctatgcttagcatcagaataacttttctgcttactttgcgaagcaagcatccgagccttgatcttgcctattacctcattggtcccctgaactaactcaagacccatttatctctttttctagtcttgtcccaattaatcgaggaacgatattttctaccatacaacatcttgtaaggagtcatccctattgtactttgatagttgttgtaaaaaagttttatcaaaagaaaatattactccacgaaccttcaaagtccataacattggctcgtaacgaatcttctgatatttaaatcgtcttctcagactgtccattagtctgagggtgaaaagcttcactaaactccagctttgtacccatgactctctgaaaacttacccaaaacattgatatgatcttcaaatctctatctaaaacattggattttagagttccatgaagacgtaatatctcttttacatacaaatccacatactgatccactgtgtaagttgtttttattggaaaaaactgtgttgactttgtgaaactgtccactatgatctataccaaatcatacattctcgtggttctaggtaggccaaccaaaaagtctattataacatcctctcactttcactcaggaagcattaatggttgtagtaaccatacctgtctctgatgttttgccttaatctgttgacatgttaaatacttgatcatatattcaactacgtctttcttcattctgcaccaccagtagtacagtttcaaatcttggtacattttgatggtacttgggtgcagggaataaggtgtagtatgagtgagcctcatcaaatcaagtatttcaagtatttcttttttttcttttttgagctcaccactactcgcaacataaacccaagccttataatgtaacatactattattcgagattgagaaatcctt

SEQ ID NO: 66572 - DNA, 1430 bp, Cannabis sativa
cgtcgttttagaatgatatatttttttttgcaatgtttagataataattgttttttggagaattttttttagatattattttacgagaaaattttagattttttttaaaaaaatatggaaaaaaaaaaaagatacatggttattccagagtcggccctaggctaaggcgtaggtctactcctatcagggacccaaatgaatttttttttttaatatatatatatatatatttttaataatttttaaaaatgtcatttatttttataaaaagggccaaagaaactattttttctagggtctaaattaacttagggccgactttgagttacccccttatggtaactggttacctctctggttagcataagggtacatggttacccattgtttacccaaattttgatgatactgatgtggaaaaaatgataacacgtggcacgaggataccaaggttgaattgatgaaaaatatgtaaatttatgaacgttagtcaagaccgttggtcatgaccgttggaagagagtctgacgatcacctttccccctagcttaaggaaggtgactacccccaggatcgtgactattggaagataagtctgacagtcacctttttccttagcttaagcaaggggactacctccagggtcatgaccgttggaagagaagtcaggcggtcatcttttcccatagcttaagcaaggtgactacccctagggtcatgaccgttagaagagaagtttgatagtcacctttcccctagcttaaacaaggtgactacccccgggggcagtggactagcacccacataaaagaaggaagggcgatagggagaggtgggaggctcgagagacctataatgcattaccatgggataaacgatcaccacacaccacaagagtcaaatcactctaaggggtatatactattacccctacctcaaaggtaatgattcacatgaagttagtgtgcgggtgtacccttagattgttgaaaattattttactagaacttagattactaacatgtatgctgattataattctataatctaacatcctaaatatgaagttcttaaaaactagaaaataaacacattaggattaaaaaatccttacagtgataacaacggaataatatgactcatttcatttagatctctagctcttgattcctatctgtagtagagtattatcaagatctaaactccatacagtgataccaccacaaagatcaacgtgacaaagaccaaaatcgtaatgatcctataatcgaagatgaagaatttgaagagaatagtcctgaagatgttgaagatgattcccaagacacatttgaagatgatcattaagacaagcctactgatggtggtgctctctctctcatgatttgttaaatctaattttttttgtttgtgatttagatttgtgggtt

SEQ ID NO: 66573 - DNA, 1410 bp, Cannabis sativa
tattatttattggcagaataaataataaatcttatttgtggcaaaattgagaaattaattttggaccttaaaatatggcccacacgtatagggatattctacacgtgtagggtgacatataaatgtccataattaatttaattgaattattttattaagttaaaataatatttttttttgaatattataaaaaagttaaaataatattaattaaattcagttaattatttttcaattattaattaaatatattaaatatattattggataataatttaattaagaaagataattatttaaataaaagatctactgatattttgatattcagttattagatatttatatttgaatttgaattcagaatttaatcaaactagatatttatcttttatttaaaataaaggattaaaatagtttatatatagcactatatatagagatacatagtatcataattataggaatatatagtatcataattaagcatccagaaataacaaaaaataaactgaaaggagagaaaacatgattgatattttctcactcctctctctctctctcctcacgccctttcaagtgtatgtgagattaatccttaatctcattacagtatctcatgagttgattacacactgtaatacctaaatttgatcatcttttaagatctaatagtccactctattcctgagtgttgaggttggcttagaagatcaagatgtagatttttcaatcaagttcttggattggatgttcaattgttatacgaaaagaatcaaggataccctaataggcatgaagaggtaattgaatttctttcagtagattagatttaatctatattcattatgttgacactcttggacttatggttcatattagataaaaattgttttatcaaaattctgcttcgatctgcttttataactctgatatggatcataaaaccaacaagcataacacattcaacgaataattttaatctcataattatctaataaggccaattatacattcttttatttctagcaaattctattattgaaaaatcaattaaatattgacaataattttttatatatgtataataaatgcgcaaaccatgattattattttattacacatttttgacattatatattccgaaagaattcataataataacaataataaaattcacaaaaaactcccaaatatcatctagggcatatatataataaaattataaaatgataattaaatgaaaaatagcctattaaattaatcgacaataaatttatcacaattctcacgtatttacaattaacaaaattgacatgtttaaactcacaataggtaataggtgagtacataaacacacaatgaattattcactaatattattatattatcaaaaaaaaaaaaaatcat

SEQ ID NO: 66574 - DNA, 1157 bp, Cannabis sativa
accaaaagtgcaacataaagatagaccaaaccaaactagcacatagcagcaagccagcaaccaaaaaaggtgaatatatatgcatacaaaatgtcaaaagaaaaaaaaaaaaaaaactgatcgcataaaattgataactgacaataaaatattgcagcattgcttccaaattcccaatagcattctacaagagaacttgtcaaggcattcataaagcaacaatagatttttcaaatttatcatggatcctaggaatggtttcaaaatatatcaaaaccagatacttggatccaacaattttaggttcacttttagaaaaaatgatcctaatgggttacacaacaattcacattaactaagaatcaataatgaccagcccatgatatcattccacaactagtcattactgaatctgtgaacacaaaattttaagggtcggatttcattaaaaaaaaaaatatatatacatatatatgtatgtaaaagtatgattaaatttctaagtataaatttttattctaagctaatgtgaagaaaaaagttcaattttttctatatcagtccatgaacaaacttaactgtacaataaaaaagcaacatgatcgactatataacatatcaaaacatccacatgacaaaatatataaggaatgccttttttcaaaatgagctcagtttgtgtcacatctgttactacaaaatgtaactcatcattaactatgtaacatatttatcaaaagagagcataaagcatcgtgatgtgcttatatactcgataaactaatgaaagtttagtttaaaaacaaataaacatggatagtttttttttggtgtctgcaaacatggaaagaggttcatgacaaggttctttatttggaacgatccatctgtttgatcaaaaattatatttgagtgcacatataatatgtactacacatatatgccagatcacatatgattctatatgcaacatgtactactgatgcaacacagtttctcagaaaacaaatagtgtttttgaaacagctacagctacttcatgaaagctatacccttttgctgtttagaccttgtttaggaccacaaccaatgatgcccacaaagcaaagaactcttttcataaacaaaatttggtgagaaacaaagatgaaagctat

SEQ ID NO: 66575 - DNA, 766 bp, Cannabis sativa
taccctattttctgtgacgattttgaacactctcttaatttttgtagcaatggttcccccaaaaaaatatttttaggaccatcttgaataccctatgttgtagtagtgacttgatatcagtacaattaagataaacatggacgatattattcttagatgaagggagatatggctttggttttctggtgtgcaagttctgggggcttcgaaactattggagcttcgtgcttgaatggttggtctctcctcatttgaccgagatcattgaaataagggaggtatttagctggttgaagagctttcaatactcatgggtagtggtggaatgagacagtcttgtgaccatataaattatacacagctcaattgcgatgttgtttggtttcacacttatggttgaggaatgtaatgcttttgaagttttttagtgttaatttactgtttgtaaataatctgctaatagagtagcgtattttctagcacgacaatcttgttgtaatgttgataatgagtttagtatgagaaatgtccctgctgaacttgtttctatcattagattgatttggtgtaagttctgaagatttattaaaaaaaaaaaaactaagtctttctttgtctttactttttttctctaacttttagccattcttctctctctcttttctttttaactctgatcgatatgctagtaactccccatctccctctctttatgaaatcgtgcgacacccctactccgcctagatcatggcaatcaagctcggtc

SEQ ID NO: 66576 - DNA, 832 bp, Cannabis sativa
cgcttttaattccgtgccaaaggtcaaatcagaataccccgaaatgccctttatatcacaaccccgacctgctacattcacatcctccactatcacctccttagtgccattgccccctttgtttttcgaccttttaggaatcacctttctccttttagatggtccctccatctttttcaaagaagcaaagctagtatcataacttatgggaatgtccattagaatcgacattgcagccaagttgttgtccatcagattctgttgagatctagaagcataattactttggtgttgtatcaattccccaacaaaattaatgaagctctcttccctccaagaaccatctctcttcgaacttccttgtccagcattcatcattcccctatccaatctgaaacaattgttctttaagtgattaggggcttccatttcagtaagaatcaaattcgaattatggcctttctcaacttccttacccttccccaatttttcaggaactttatttagggaaagagaggaactaacccgtggcaccatagttagatgcgaattgaattcgagtgaagaatcaccactagcattcggaacatgacccgtaggtagcatcatcaatgaagtaggcgttttttcaggatatccagggggccttaatctgtgttgtattaccacacggatcttgactgaatgaggtagagaactcttgtcgttcattaacttttagccaagaaccgtatcctgactgctgcttccccgatccatcttcaaagagtttaattagttctgcacaagcccgagtatcatgtcccacaaaaccacaattaaaacacataaa

SEQ ID NO: 66577 - DNA, 1155 bp, Cannabis sativa
atcacatctttctagagaatttttctgggtatttctcttattttcatccataatgaagatacaaatacgttgtgcatgcactcatggtagataatgtactaattttgttactttgtctaccatttgatgtactcaactttaattatcgttgatgaaaatggtcattgttaaaaaaatgtgttgatggcaacaatacatgaaatattcaataatacatgaatatcaacaactcgtatgaatgcaagtctttatatcatgccaccattgagaattagtacaatgaatgtacctagataattaaaacatatctcccaaccccgtgatattccttgggacacaaacactacatgttgtattttcttataagctactacgatcaattatatatgccttgccatgtttatttaattattgaggaaggttatcatggccaatttcttatctcttcggcgtgtttgattgggagtttatagagaatgagaatgggaaagataataggaacatatcgtagaattaaagttgattaacatatgagttaaaaaaattacattgtagcatcattaatttacttagtatttttgatgtaagaagtcaaatcaataatactgaaaaaattattatttcattaaaatacctttctaatactttatgaagaaatggaaagattttgtttttttaattccattccattccctatatttaccaccaaccggcctgcttataattttcaccgatcaaaaaaaaattacttataatattttttatgtcccctcgaataaattgtttaaacgtaaagaatttttttgaccgtatatagatgtttgccaaactaatagagttactgtacgtatgtatcataagccaatcacgcgctctaatttttaaagataactcgaaatatatatacatatatgtcagaagatcagtatagacaaattagatctactgcgcaaaaatataaatattctcgatagaataatcttgtatatttcctcatctttattggaaaatacatctatatatatacatatatattgttatatgactttattaaataatctaattctaatcaaatctgcactcgccgacgaaccaaagtctgcacatatatatagtacgattactatatgcaacggttttataaattataataac

SEQ ID NO: 66578 - DNA, 1230 bp, Cannabis sativa
  modified_base (1175)..(1184): a, c, t, g, unknown or other
tctaatacacccttctcacatttgggcttagaaagtgtgggtataacgaatgacttttaagagaccacaagatcgaatgaacatttgaaagaatcccacaaggccaaatatcaagagatttttgggtgtacacatcaagaaatttgtggattttgaaataggtcaaagaccttaacactgaaaattagcacacattggctaaaaggtcccaaatagaggttaaaggggagacagtgaaagtatctgttatcccaattttgtcttccctatgtggtagtgcttacgtggagaaaattagtaccacgtggcaatatagctcactggtaagaagaccaagtaagtacctaagcaaacaaagacgtcgacactcaaataggcatcgaacacaagaccaacttcctcatagaagctggccgacctcccctagctggccccattgccggccagcctctggacaatgccatggctggccagcctgctctctgtaggtgcttggccggcaacaaagggttgtgcatgattctctattcacttctacacgtggagaacaacactttggctgcaaattaggcctaaaagccaaacataatagttgaataatatctagattcaatgacattttggtcttttataatttactaattaaatatacaaatatttaggggttgaagttataatctagggtttaggcctcctatataaaggcattaactctaacttagaaagcctaagctcagttaagcctgaaacttgcctccaagctctaagcctaagtctgaataactcttctattctctacttcctctctcacacgcccatacaagcattctccgcacttgagatttgacaatcccgattctttctttgtatccttaagggtgctattttagatctcatctatagcgatctgaatagtattaacctcagtattaatacaactaaaaggggagtaggtcattacccgcaagcacacggggccaaacctctataacaaatctatgtgtttattactctttcattcttgcttgtgcaactcatggcaagcatcatatctatacggccgtggtgttagttaatcattttttgaggtcaacagtttggtgctttcatggagagcgtgcatatcgtatctaatcaccattcttggcatacataaatgttgggttttatgcccnnnnnnnnnntccatttcaatgtaatctttatctttaaaatatcaataaagaaaca

SEQ ID NO: 66579 - DNA, 1088 bp, Cannabis sativa
ttctgggcctcagactggactagttggcccataagtaagtacgaggaaaggaacccacttttaaggcccatacagcccatttcttgaataatggaaggggatgacccatttacaatttacaccgggttttaaaagttttttttacttaaatatgacagtaagttaggccatttttatggcatttttttattttaaattatttttatagtatttgtcatatttatgtaaatctaaatttcaaaactcatatttaatctttatataaatttgctcaccagaaatctttgatcaataaactagttttttattatgaaactaatttcttcatcaataaattagttttgattatatagaagtaaaatttatacactgaattattaaatttttaatccattcggcgacgattggtcagagcaaaactcaccaaagaatattcataaagaaattgtttttttttttataataaactatttttttttcaatagaaaactgaataaaatttatatacgagttcttaagtttattatggtatttctttttatttatgataatttatctcatattttaatatatttctttaaaaaaaatatttaatacaattaaatttgcatgctatatatactaattttttttttacatgttctattttaaattacatgattaagtgaaagcatcaatattttctggtcttattctctgagacaaaactttaagattggcttatcatgggctatatgtaattgttgccactaatgtaatatcattccttcaatggtaatataactgaatacatgttgttcaatatgtaccatgtgactgtttgttatgagagaaaatataagtaaattgtttattaactttatatgaaaaagaattatgatgccaactttcttcatatactattttaacacctatcaaccatttcttcttattattttttttaaatcgaagtgtaaatttttattcaaacaatttctgttacaataaaacgtaaagcaataggaacatcatgctcactaaaaatacaatcaggcaaaaaggaaaattctctagcaatacaatgagcagccttataagcatatcgttta

SEQ ID NO: 66580 - DNA, 1001 bp, Cannabis sativa
cgaattgataatgacaaaagtagcgtaaacgtaactttaggtatttaatccgctaaaagaaaaaacatatgatatataaatgtataaaatctaaaacatcaggtattttaaccgcaaaatactcctatgtttaaataggatttagcagaaaagtaatgacggaagtaacaaaaatgtaacttaaggtatttaattcgtaaaaaaaaaaatgtaatatttaagtgtataaaactgaaaacgtatagtacttatgccgcaaataccttttttacaaataaaagtaataatagatatttagcagatagcgcaactacttatataatagtgctataaatatttttaaagtttatgaaaaatggagataaatgttaatataatttcagtacggctagtttaattaaaggctcctaagagccattatattgatgcaaaagtaaatataaaaaaatgcattcttaaaaaaggaatctgttaaaatattataattttatatgcaagaaagtctccaaaatacaaagatgaaaagagaccccaaaatcagagcctatttctttacactcttcttccaaaaatatatattataatactatcattttctacttaataatatattatgttatattagatgtttctgtatgtcccttcaaagaaagcaaaagccccataagcaagcagcgtgagggtatttgccagtttcacattttgcgaagggtaattgggccttaagccccgaaacgtagatggtcaattgggcctgagcccaaaatcacagctttcgttttcccttaatcgagtttatcttctcaagcctccacccatcgtacagccttgcaatgaaagtgtcggccttgatgtcaacgtctgggctaggacagaacactgacccaaacccatctccaccgttaatcatgttgactgactctgattcttctttagttgacgatgaatcagcgtcgtccatttgctcaggggagccacaacgagagctttgagcgcttcta

SEQ ID NO: 66581 - DNA, 1045 bp, Cannabis sativa
ttggctctttcaaagagcttacagttcttaatcttgatggcaatccaataagtggaagtattcctccacaacttggaaatctcaccaaattggagtctcttcatcttagaagcacttctcaaatgactattgacaaccctgaatggcttccccatcttacttctctagagaatctctacatatcaaattgtcgccttctcaaggtacctgatcatacttcatcatcctctatttcccattcaaactattccttcacttctcttcaacatcttcacatctctcaaagttttatacatcctgcaacaattacttggttactaaattctactattaacctagaattcataaggttaggtgacaacaatcttagtggaacattattacataatcttcttggaaatatatcaagttccaccaggaattccttacactatttgtacttgagttctaaccaacttggtgggttgattcttaatgactttgaaaacacctttccttctttgactggtctttatcttgacaataatcaattggaaggtcattttcctaaccgtttgaaaacatttcccaatcttaaaagattagatgtaagttataaccaattcgtaggattattgcctgacctttcatcaatgccaaatctaacatatttcaacgcatccaacaataagttcagtggtacttcaagtgagagtattggcaagcttgacaatttaaggcacttagatgtctcttcaaatcatcttagtgggtatgtctctcacgtactaaatctacaatgcccgagcttgaattacctagatatttcctataacttagacatgacatctaaattcaactccaaatatcctataatcccctcatttaaattgtcattcataaatttggcttcttgcaagttaggtcctgaatttcctaattggctacaaacccaaacagaacccatatatctagacatttctaattcaagtatttctggtcctcttcctaattggttcccaaatataacttccaacttaaagtatttaaatatgtctcacaacct

SEQ ID NO: 66582 - DNA, 899 bp, Cannabis sativa
accggcctaagaaatgacctaagtgggaaaagtaaaagcccttggcatgttcccccaccgagtgggggcatcctaaacttaagaagacgctcgtcgaactctagaggcctataccgggaatactcttggacagaaggaacatgatggaccgttaaaggagacttaccggagctggatgtgctggcatcaggagccccagtattgggaaccaggaccaacaatttaggcctggaaggcatccgatctgtgctcgcctccagacgaaggttcctcccggcggcagcctgagctttgatgtaagccaactcctgttccctcctaaagaggtacttctgatatcggtcctctgccgaggctatgatgtccacccggagtgctttctccgcggccggagtacggatgtttgggcagagaacctttgaaaggttaaagtcatccatcgactggctcccggagataagcttggccattcgatagttctccgtcgtgaccaagtcccccacgttaagaccttttttatcataagtggagaaagtcttggcatgttggagaaacaactgggtaggagcagtgcagagaagaggaggaattctaacccactctgtgagaagctccgggcggtctacggcttggaagccagaagagaagaaaaaatgatggcggtattcctttacattcttttgataattaaaaaggaccgagccctcatttaaaggatgggcccggagggtgaaaaaactatctttaaacttgtcccccttcttggggacagatacaagtacgtaaaagtataaaacttcagccgggctaggcgaagcccagcctctggcaacataaaaaataaacaagcctgagagcaggcgataagcttgtggaattagttgataaggcgcaaggcc

SEQ ID NO: 66583 - DNA, 665 bp, Cannabis sativa
aaaatgggggccttgtgcaatggcccaagctgcccaatgctttggccgaccttgttcaaaataatcagttgtactcatataaagtaaaacatgatgcgactttattttaatcatattttctaccccttaaattactcaaaaaaaaaaaaaaaattaaaacagacaacctactataatctatagccaggtctggttatgggcataggcgggctaggcctgtgtctagggcccacctagcccaggagtccaattttttttgtttccttttaaaattatatatattttttactaactttgaaaaataccacattttttctaacataagggcccaaaaataatttttttttctgtggcccactttatttcagggtcggccctgtctatagctaatgacacctaaattttcctatattaaaaagtaaaaatattttaataaaagtcaaatatattttttgaaaagataaaaaaaatcagggatattgaaactaactttaccttaaaaaaagggaaaaaaatattacaagtagttactaataattttgttattttttttttcttttcttttttggttgggatatttactcggttgttttgttgtactacaaacaaacaaagatgaacgaaaccctctctactctccactcaatctttgaattttgagcctt

SEQ ID NO: 66584 - DNA, 1945 bp, Cannabis sativa
tgtacaatcacctgcaagctctggactcactactactcagccttcacctttaccttacctacacatgtaagcaaatctatgagttgatagactcagtaagaaaagcataaaacatataaacatattatcgaccatgcatctaggcgtctatacacctatctacaaggcttgacagataaatcaagaacgttcttgcctttggtaagattgatcataatatcagccactaccagtactatggtcgcgctgcggacccaacacgatagttatactgctatgatagcatcagtctatacccaaaagaaccattgaccatattatcactcttcacaagtactatacttgtactattgacccggtactattgtttgcaccgctatgacagtgtcaattaatactttatgaaattaaaatatatcagtcaaaaccagcaatatactagcactattgacctgacactatagtttgcacctgctatgataccaattcatatatttaccaacataaacatgtatatcacgtgcacacatatacatatacatacatcttattctattgttatctcgtttttaggttcaagtgttccggtcatactgaatgaaaatatcgctcactaaagagagatcatatgtcacatttacgtaaaacgggtaaataacttgctaaaaccttatcggggacttaaactcaaaactagaagttctctatcgataaatagcgtggtaataccttaaatatcaagaaaatacaaaaaaagactttaaaaaaaattgcctgacaaacagcaggccatttctgtaaaaacgacagactgtttttctgggttactgccaacaaaaatgatagaccgtttctgagaaaacgacagagtctgccgttttcttctgaagttttccaaaacatgtcaaatctattctaaatctcaatccaagatctggaacacgtaattaaggtccaacaaacatattccaagtgataacatcagttataacacaaaattataaaaactactattgttgagcgaagtttgagttaatgaactcaaacttgctcaacaccacaactagccatcaaattaacctcaaaaaagctttaaaaaacttctttttatcccagaaatcaacccaagacaaccctaggtttggacataacctattcttaaaatttgcacgttctaactaaacgaaagctttcaaactcgagaagcaaagagtctagggttttacattttgtttgctcttctaacacacttgaattctagctgaaatctataaaagtttgatgaataaaacactaattcttgttggttctcttagggccaaactaaggagagagagagataaggatagacttgatctttcacttatgtttatctaatgaaataccattaatttcttttattaaaccttaggtaataaactaaattaaattattagaaagttctaccacatcaactaaaattaaagccaaccttgtaggcaaaatgaccaatttaccccttgcttctcactgaaataatcttaaggcctaggggtaaaatggtccattatcataaccccacttaatcctaatttttctaatattaaataaatatacccagctaaaagaaaggttctaaaccatacctgtgtaactctaataactaaaccgtcgcatttctatcgttaccgagcaaaaattataaaaatacttacatatatcaaatataatatacctagagtttaataaaatctttaaaattgagaaattataaccctaatgcctatttcttaaaaataggacccaccatatataatatataaaattgtcacatttagtcatataatatagctatttagtgttagttaccttattaatccttattctaagtatgtgatcattacaatcatcaatctattttatcgagtattggagaatattgtcccacatggattaaatgtgaaag

SEQ ID NO: 66585 - DNA, 616 bp, Cannabis sativa
aatagagtattcttaaatagatgttctactgtatatattattatatttatgttatatattatatatataaaataaaaaaaagtaaaaatcgggttaaatcgatttgggcagtttaggtctattttcaacaccccaattaaactgattgggcagtttagaattttatcgagttatgtcggtttgtattttttatcagctttttcgatttagtttggacggattatttggattgggctgtttcgaaaatttcaatacaaccctatttacaatcactaaaccaatcattaactctatgtagccatttcccgccaattattatttaatctattttaatatatgtgattttgtcttattaataatattattatttttgtaaggtatataattatttaaacagaaacgctccaaacccaattgcagttgcacctcttaaaccctagccacttccaaagaaacctcacccctaaaaccctagcctcctgccatggccatcgaccccaaaagtgtggaatcagacagggttttgatcctcgactacggttcccagtatacccatctcatcactcgccgtatccgatttcttgatgttttttccctatgcctttccggaaccagc

SEQ ID NO: 66586 - DNA, 1496 bp, Cannabis sativa
gaggtaacagagagcaagttgcaatgaaatttaggaacacaaagaacatttttaagcacaatattagcaatatgcacagttccaacaaaagaaacagcaatgtatctaccatcgggcaacccaacattattgattttaacattgttttccacactatgaaacaggttaggatcacagcatacatgatgagtggcccctgtatctattatccaagtagatttagggacacaaaagtcattaccagagacatttgagacaatgggctgatctggagtctggtttagagtgctgttttcctgcactttctgagtcaacatggcaatgagcttttggcattgagaggaaaaatcatgttcacctgtggctccttcttgactgtcaatatgcccagaaaaactagcagtggatcgatcatgttgctgagaggatcgatcacgctgctggttttgttgattgcttggcttattaggaagatctttaggcactttaccatgtaaacgatgccaaggaggatatccatgcaacctatagcattttgcagcagtatgtccaacaagaccacagtgagaacaagtgggttttccattcgtctggttatttccacctcggtttccttgtgtatttcctgcaaactgtccagtattttcattagattttggaatttcaggttgaagattagtgatacctctttgcctttcttcttggatgacagaagcaaaagccttgtttacattgggaagaggatcttggaaaaggatctgagatctggtactggaataggacatttagaccaatgagaaactcaagaaccttgtcttcatcctggtaagcctgaatagttttcatagcgccacacgaacacaatggttgtggtctgtattcttgcagaagttcccaaagactcttgagacgggtgtagtaggaggtaacatcattggaaccttgagataacagctgcaatgatctttttacctcataaattcttggggcatttctttgttgaaacctttcctgtagttcagaccatatgtaagacgcatcatccatgtacattatgctttctgcaatcgagttggaaaccgaatgtaagatccatgaaataaccatgctgttacatcttgtccaggcctcataatcttcatcttcttcatctggtgcagggagttttccattgatgaatttcatcttgttcctggcaagcaaagccaccaccatcgatcgacgccaggaactgtaattttctgctccagtaagaaccttgggaacaagattaacagagggattgtcaccatgatttaagaaatatgggctgcgaggatcatcagctgaactgcgagtattctgatcaagaacagagaatcgattcgaatcaccattgttggtggtactacgggtctgagttccacctcctctggccatggtcgaagatcgaacaacaagcggaagagtcgaagagcacactcagtcgagtggctctgataccattttagtaatca

SEQ ID NO: 66587 - DNA, 1070 bp, Cannabis sativa
  modified_base (331)..(347): a, c, t, g, unknown or other
  modified_base (427)..(436): a, c, t, g, unknown or other
aatcatgtgaaccatgctacataaaatgttatttctgatctttataaataagtaaatctgattatatgaaatgggttttatttagggcacaaaatccaacactaccttcatcacaggcgtcgtactcgtcgaagtttccttcgtatttgtcgtcgtgggtcacttctccttcctcagagcccacgttaactctagaggccacctcctcattttcagaatcttgggcgtcttgaggaggacggggttgacgcgtgttacgagtctccatgattgttgttttagtttataaggttgtttgtgtatctgcagacgcttccttcagctctcaatnnnnnnnnnnnnnnnnngaccgaggttttcggcaaccaatttaataatatataagaaagctgtagaaagattaatgcacgagatttttacgtggttnnnnnnnnnntgagccttagtccacgagtcttttctatttatgagagtatttattacagagaatgttcttggtaactttttctctctttggttcttttgaaacccagaaatctcgacccctgccttaatgagtttggggggtatttatagtgtttttgtgggatgatccctagaaccaagctacatgtctttctgtattttccagtagtggcacacattcccaacgagtgtaacataggaaatgcatggtctataccctaggtattttagggattaggtggatgtaatccattatcccttcttgaccgatgtgattgctcataaagtagtcgtcactaggcttattaatcatagcgtaatagctgcagaaggggagttacgccgtcagacttaatacttatggcagttccaatacgccttctcccatgcaacattaaatgcgaggtgactgatcagatgtggtttgatacctcgcggaggtgctttgctatagctttgccatccgggagtacgtggatccctcattctttctccaggaggtatgtttctttctgatcctcttgattaaaaagacttagccgaattatctcaaaaccttactcctccaatccacgtgtcgcagtcgcattggtccacgtaatttg

SEQ ID NO: 66588 - DNA, 931 bp, Cannabis sativa
tttgtttaataataataaagtattttccctcaaaaaaaaaaaaaaaccacctacactttgaaaaataattaaatttatggttatagtttaaaatattcttcattttatttttataatttaaaaaatagttagttaacataaaaaaaaatctaattacatttaaattaataatctcgagatattttttatttgtatttattataatttttctgaacaaataaaaaagataaagtaatttagagattttaataagtatttcttatatatatatatatatataaattatttatatttttgatcgttatgaacatgatgatttataataaaacaacaatcaattatttcttggaaaatttatttgcacccataagtacacactaatatattaaaaaaaaacaaataactaaattacattgtcaattataattacaaataataataaaattacataatagaacaacctatgaaaattcaatacatatacactcaagttaaagacataaaaggataaaagaaatcattaataaatactcaaattacacatttagattgtcaaatacccaaaccatgaagatgattctttttttttttcaaaaaatctcatagtctaaccaccatctctcagagccattgtcgaaaaaaggattgttgcaatccatcctcttcttgaccaatttatcttcatcgttgtttgtcgctgcatctctttgaccgtcatcactaaatcataaattttgagaaagaaaaaatatattgagtatggagaagaaaaataatatgtattgatagaatatttaaaattaataataaaaaaaaagtatattgaatatacatcacattaggattactcttatatatatatagatttaggtttaataaaaatattatagggtagttctacaatggacaccctaatattggtcacaaccat

SEQ ID NO: 66589 - DNA, 955 bp, Cannabis sativa
cttggtaatccatccatcctaaaaatttgcatccttattgtgtgaaagcatcgcatcaaacaacgcgtagttcttagtttatctgacttggcagatggcctctctaagtttggctaactcgtgatcttctcccaagtctacactaggcttgctaatggctggttttccaatttctagcctcgtttccccgacataataccggggatgagatctagttgtggtgcccaagggttgctccatgttggccattcttccagtacaaggcgctagttgggatcctccctgggcagtagaggttggccattaagaccaacaaagtttgttgtgtccacctgaccagtcatggtggccaagtttgtgatgcttaccgagatggtagggttggccacatctgtcgagttcatggagattctagttgtggatggaacacgaacatcgtgatcaacaatcatagggtcttgaggaggacttgatgaggttagccagagttctccttgtgttaaacatggtgtttgatcacataaattgacaaagctctcaatgagagcaccaaactattaaccttaaatttggccaattgacagcagagtcgtatttattactgatgcgaccacgtgtacacaataagaacatgaaagtaaaagagaatatatttttataaaggtttgacccccttagttagcgggtaatgatctactccccttttggttatattaataccatcgataataccactaagatcatatgggtcatggattctaaaatggctctcttaagataacaatattagaatcaagttggcaaatctcaagtaagagagaagccttgggcgtgtagaggagagagagaggtagagctagggttttagacttagagcttgagagttttagggagcttagagacattgaagaattaaggttaggttcatgctctttatataggagagcttataaga

SEQ ID NO: 66590 - DNA, 916 bp, Cannabis sativa
ccaggccactattattcttcctccatcgtgccatgcattattcgatgtgaaacaccatcctcagaacatattcacatataagaccccaagtttttgggccttaactctcgtctcgagaagaccaacaagtccagccttatgagcattgatcatgttcttaacttggttttaattttcttggctactgatcccttggacattccaactcacgaatttttccattttcccgaggaggaactccccctcctcatgttttctctgcagtagataattctttggcatgttctgtctaagtatgagaggattctacaatgttcttattcagaccagcaagcttatctgttagagcatcaaaagaattgcacaattgtgtctcggtcgatattgctatgccctttcccttcccacctttactaactttttgaaatccatcatcatctgtagctttcccttctactgcatcagctggtttactctctttgaccacccactgttgcttctttccatctttcttgcgacagtctattgttgcgtgtcctaagcctttacagtgattacatagtatcggtttccattcataagaaactgaggctgtcacattgtaaccacgctcatcttcaaaatgaatttaagcaggaaactcctgttgaatcgatacttctataagcaccctaggatagttgagcttgttcctttctttagtcacaggatcgacttgtaggggtgtccccaattgccccacaatcttgaataaagacctctcaccccagtatttcaaatctaaatcaaggagtgttgaatccagattggcaccgttcttatgtcttctttcttgacatttatatctggatcccaagctttcatcaccactggcctgttgttgaagaacacatagcctccatttagtatttcatct

SEQ ID NO: 66591 - DNA, 539 bp, Cannabis sativa
atcacgggactactgattatcacacaaagagactcaaagagactgatttcacacggtacccattgcgtgtgaacaaaatcagcaacatagagagacaaacctttttggcacctaaccaaacaatgatgtgcaacaatatgattatgacaacataagacaacaacttagcacaggcagatgcgcaacaacctggaaacaacccaacaacaacaaacaagcaacaactatctacaacaacaattggatcagcaacagatgatacttttttgctcgatactgggactgtaacattagagtcaaccatacaacaaccagaaaacaacaacaaaaaaaacacctccagtagatgaatattttgacttcaccgactacgcaaagcttgtggttgtagaaaggtacatcaacttgaaaacaaccaaaaagaagaagaagaagaagtcgacaacacagaaatgattattatcactgataaacgatatgaaacaataaaaacggcacaaatttacaaggaaaatgatatattgataagtgttctatgc

SEQ ID NO: 66592 - DNA, 2071 bp, Cannabis sativa
ggttctcataccttttatgtgtttaatttcatcgttttagaaattcatattaggatgttaaaaaagacatacttattagtaaatctagatcctaataaaataatacccaacagctggtatgagaaccatgataatgatttactttcatgaaatatgaatttaaaacaatgattgtgatgatgtggatgtattcgtgcttatatgcttatttaatgaaggtatgtaaattatgatttttcgataaaaatatttttagtttcctacttaaaatatttttcttggaaagtagataaaaaaattaatgaatttaagctcttacaatacttaatttgaatctttattgaactagttatgattttttgaattttaaaaataaaatatctaagggaaggtgcacgtgcgctcccagctatgggtgtcactcgatcatgaccgagcttcagacaagcccatgacaaggttttctcggaatagggcattttgaatccccagttgacagagaattgcccctcaagaaggctgcatgaagcctcattatatgccattttccccttaggtgcgcgcggggagtatgcagtatgcatgtgctaaacttgattttgtgatattttgagttttaaaaattatttttcaatgaaacaaaattgaaatttcagtagaacaattgtgtagaatctaaattttggaaaaaaaaatctaattatcataataaaattaatttttattaatttttcaattaatttaaattagttttagatattagtagcctttgaatttgaaaaattgatttttccacaaaattacttttatggttatttttaaaatttgattattttttgcttattttgttaattttaattataagatcatatattttctaattatattaataaaatttgaagtgatcttattttgacactacaatatttatgaaactttaagataatctagttagaattttaaattgctaaccatattagattttcaaaaatttattatttttattttattaatttaaattataaaattcgaaaagtgtttgttttgatatgctatcttattatatatttatcttaattaaaatttatattttttgttgaaataacatcaaattttgaaaagttgttaattttggtttgaatagatattttatgttttctaaccataaaattttcaaaattaggatattgtattttatttattttttaataaagttgataatatcctaaccatcaaaatatcctattttcaaattatttatttctatttaaatttaatttactaaattataagatttgaaatatgacagtagaaatatttaaattttcaaattaagatattatgttatattatctaattaaatatttaaataattgaaattatttaatcaaactgaatatttaaaaaattagttggatatttaaattttaaatttatggtattttaggttttgttagattttatgttagattttaaatatttttaaacaacttaatttgaattcaagttaagatatttttttaaaatattctattattcatagtctaattggcaatagatgaaataaataatttgtaataggtaattttgtaatttctttcatctgtgataaacctagtaacataatacggcccatccaaatcaattatctatgtgagcctatatgttttctattgggcttagatgcatataagaagcccatttacttttagatatttaaatcgactaggttgctaaagtaaaataatcatcttgatagtttttttataagccatatatatattgggcttattcaatttatagaaattatttatttaagtagaaattacataatatatgagaaaattataagagtttacttttttatggcataaataaataatactaaggggttatgggttttttgttttattacatttatatttacgccatatttttgtaaaaaaatatgaaaatcccatatttgtaaacgataataagttttgtcggaaaagtcactagcgccgaaaaagtcaccgaaaaagtcagtgtcgccgaaaaagtcactggaaaagtcaccaaaagtagatgt

SEQ ID NO: 66593 - DNA, 998 bp, Cannabis sativa
atttaagttcgggtctggttggagtccaaaatattgattaaaaaaactgtacaaaaaaatattgaaaaattattatttttgtgtttttaaaattttgattctcaattaaaaaattgaaaagtgaaaataattttatagaacatgtttttgaaaaaatatattcacttttctaattttaaaaacataaaactgattaaaaagtgttaccaaatgtcacatttatttatcacatgtaaaaaaatcataataaacactagattcatgtgatttgtttattagcataacattatgaaacttaaaaaatatataataaatataaaatattttttaaagcaaaataaaaaaatacatattatttattttattataatattaatttatgtgaaatatttttatatttagtaatacataataaataaattgatatattttagtacaaataaatttattatagtattttaatcaaatttatcaaaataattttttcttaaagttaagttgtatcagcttttacttttagttgtaatttttagtgtaaattcttcaataagttaatttttaactatttattaaacacgtttatagaacatccttttcagaaagcaattttaactttttcaaagcatgtatcaaactggcactacaacaaaagttcgcattagaggcggaccaatccaccagtattaattggtgatttcatcggtaaagattattagccaattaatagcagctatctgacacaccccgtcattattactaataattaccgacggatcaataagggcgggtccagccggtattgagttttgtcagacactagtttgactatttattaccggcggatcccacctcaattaatccggcgatacaattttacagataatttttttttataaaatataaatattataattcaaaaatatttttaagtataatacttttaacataaaattaatatttatccataacattaaatcaatcgtccataatatgactac

SEQ ID NO: 66594 - DNA, 692 bp, Cannabis sativa
tttgaaatcaggcacaaacaagaccttgggtgtagggaattggacaaaaaatgtagtaggattagattgattggaagagaaacattggcaacaaacgtggtgtgtggcaccactatctataatccaggaaaagggattagaagtacttgaaaaattattcacaacagctttgtctgtagatgttgaggcatctgtgggttgtaattgttgagtcaacattgatataagttgttgacattgagctagtgtgagttgtgtgtttgaaagatcaggtgtggggttggaaacttgtgaagcctgaggattatttctggtgtgattgtcaccatcagagtttctggtgtttgtaaagtcagctggttttgattaccatagtaagggggaaacccaattaataagtagcatttatccttataatggccaagtttttgacaatttgtgcagtgtggcctaggcctttaattttttgaggctgcattggctgcaggggtagattcttgaggaacagtagagctggtagcaactaatgggggaattgtgcgatggcctaatgtcctttgtctttcttggttgattaccatggaaacgactttgtttagaggaggacaaggatcaagaagcaagatttgatcacgcatgccatggtatgaatcattcagacccttcagaaatttaagaacttgatcataatt

SEQ ID NO: 66595 - DNA, 902 bp, Cannabis sativa
taattgtaatggtaataggaatagtaatagaatgtaaaagtaatagtaatgggaatactattaccatgtttggtttattttgtaattataattgaacttacaaaaatttgattcaattatggtttattttgtaaatagaattgaattgagaaaactttgattacatgatcgtttatttgtaacagaaatagtaatgggaatattattaccatgtttggtttattttgtagttagaattaaattgacaaaactttgattctgttatggtttattttgtaattagaataaaattgacaaaattttgattccattacgatcttgattccaatcaaccaaaaaacaaattcaaatgtaataaaatgaaggcaaaagtttgctctaatttttgatttgtcaatggtttatagcccattacaaaataagctcttgatgttcacttaacttaacccaaaaaagaacatttaatggcagcaactcctaatttcacatagtccatgtgtgcatccttaaacatggaactcactaaattaagcagcatccaaaaaaaaaagtaggatatactacttacaattcatacatccagtacttacataacaaaaaaaacacaattacaattcaaacactaacttagtggtgtattatatcaagttgtaggattggaagaccctgcatttggagctgcttgtgcattatcccttgtctcccttgccaactgtttctctttcctcttcctactcttcaaagtttcctcacttgggtttttggaaggtgggcgacctcctttcttcttctccacctaaacatagttcaaaattgtagagaaatcagagtaaatggcgcaaaaaagaaaagacagagcatccgctaaattgaaattttgtacgattatatagggaaacatt

SEQ ID NO: 66596 - DNA, 561 bp, Cannabis sativa
ataaataacaatttttttctttcaatttctcaactttttaccctatatatcttttctcccgcaatatattttctctaactatttatgtcttatatgctttataatcattattagacaaagccatttgtaatcaaagctttcaattgtatttgtaagtattatttgtaaagtatttcttaagaaattttaatagacaaaggcttacaagaataaaacattataatgtatatacatatttagaaagaaaaaaacacacacatatatccattgcttgtaagactcatgcttccatagtataaaactatggaatatgacaaaagagcaataaataatttaattcttttccatttttggaataattacaagtgtcccaatttggtcttcatgggaggccatgtgccacaacattctacatccttgcaaaatatatgtaaacaatatttaaataactataataaaagttatatatccttttttattataaaaaaaagttaattaattatttaattaaaataaaaaacattgtttttgttacattgtataatggcctctttctttgaa

SEQ ID NO: 66597 - DNA, 1211 bp, Cannabis sativa
attatttagcttaaaattcaagctctagaattgagataagttgagaactattttttttattacacattaatcaaatataattgtaaaataatttaattgataaatacccttttttataatcgaaatactaaatataatctcatataacttatcaaacgagtgtaattttcttaaatgaattgacatatgtggctcatgaacttaagtcactttatttcatttaatgaaatgatgtcttttttttctttccaattttactatttattttgtctaattatttaaatacgatttttaataataattataaataattattcacataaagatataatttgaatatatttattaattagatttacaaattatcttaattaacaaataaattcttgttgttgcggtttttcgtcaactgatctaagaagattgtaaaaaataaaagggatgtgataaactgatttggctaaataaaattgcgataaataaaaagaacattaaggatttatagtagtttactctcatatcgtgatgataatgaagctatgtatactttatttttattaatttgatccgacacacttgagttatgttctcaagagtgggcaatagtacaaaagagatctctaggtaaaatttgtatcaagatttatgaacacaagactcacgggagacccaacattcataaatctaataaggagaatggttgtaatgttcttgagagcaataaactaatagagagaatgatctcttttccttggtaaacgtgtatgacattataatgcttgtcaaaggtataacagtggaagcttggtgtcttgaggaacacaaagaagaaaatgcataaggaaaaaaaaaattctccaatggtttctaaatttggaagcttttagaatgcgaatgaggattttagtctcaaaagtctcgtccttttaaccttagcctatcattatttttacataggcttagagtttgttagtgatccctcacatgtcgagagtgtcttactttcaaatctcgcatctcattttaaacaataaataaaaataggaataaataaatatttatgaaaatattctttattcatagtcaaatcaacacactactacaatgctgattagtggttaaaaatacacttttatttattttaaatgataaaataaattgagttttaattgatattttcatgaaattattgtaatatattttataaatga

SEQ ID NO: 66598 - DNA, 626 bp, Cannabis sativa
gggacctaggactcggacgtggattggggacctagccctaggacacgggaatcagaactgggactgagacacaggatccgaccccggacctggacccggacgtaggaccgggaccgggacctgggactcgaagtggaactagattgggaccctagatcatgattgagatctggacctggggcttggacctaacccgtagttaatgtttggatctgggacccatacttggattcaaacccagacccagacccgtatccatgacatgggttcgagtccgactcaaggtttgagtccgagaactgaaatgtaattaggacccagacccagacctggaccaggacacggacccaaatacaaactcgaataaggactcgagacacgaaccagaacctagacacggacttggacccagactccgaaccaggactagtaccgggattggagactcaggcctagacccaggaccttgacctagacctaaagtcggatctagacgtggaactgaacacggacccggacccttaccgggtttgatacccagacctagacctgaacttggacccagacttacgccaggaattgcgacccagaatccagaacccaggacctgtgacccggaacctgga

SEQ ID NO: 66599 - DNA, 1048 bp, Cannabis sativa
  modified_base (128)..(130): a, c, t, g, unknown or other
tgatgcacccttgacttgtttcggtatccagaagaactttttagtctaattttttttttcatattgatgtacgttatagctatatgagataaccaacaaaatcttgagaaattcagaataatttacannntagaaaacaatgttcaaacagttttttttactcgcgtataaaataaaatagtcacacgtgcaacacactgtttgaacgtatttttcggcgtgccaccacgaatctcctcgtctttctctagagtcaaggctatcgtggccttcgtcgggctttgaactccaatccctggagttcttaaagctcccttcgtcgctcaccacgaagttaagaaaaaatcaattaaacccacctttttctttcaccacaaactaaatctgtaaaaatattaaaataaaaataaaaaagagtgagaaagggaggtggagtcgagaaagaaagagagacaaagacaaagacaagaaaggatgatttactgtgaattttttcttgctggagatgagaccagtagtggagacgtagtcgtaaagatgggaaagagaaagggaatcagtgacatcgagatgaagaggagacgaattagagtttaaatcaatggtggtggaagacaagaaagaaagaagatatgaaatagagcttgcaaaaaaaaaaatatcggttaaacaaatatggatctgtgcgtgcttgaagatgatggagaagattaagtcaaagagaaaataaatgaaaagaaaattaaaaaaatattaaagttatttatttatttaatatttaaattattttaaattattttttattaaaattatgagttagcccaataatatttaaacacctgtcatttttatcagtatttaacaagtctattaaattgagtacaaacgaactgaagaaaatagcaatcttaaggactattacgttaattttttgaagttagaaacttatctataagaaagtgaatattttttggagactttgccccaaatttcccttttttaatgggaaatttgattttctatacttagaaaatcaaaaaatttgatt

SEQ ID NO: 66600 - DNA, 618 bp, Cannabis sativa
atataaagaatagattatatgtcaacaatttttaacaagcagggatgtatattaagaattagtcctaaattactatagaaataaattgtgatatataagatgaataatctactccttctattgtcaattgttttgagatgaaaccccattcatcttatccttaaattctaacaatgtaaacgggacgaggttgctccctcaccctactcgtttcctaaattcattcatacacgtcctaatacttaattaaattaaaataatcatatatattttaaaaaaattattctcatcgagtacctattatatatatatttaaaaaaaaaatgattgtccaaaaggaactaaaacaatataatcatattaagtcattaaaacaacaataaaagtggaatagtgtatagtaaatggagttagtaaatacaaacttagtaatcaataataaatgactatgcatcacaataaatattttcataaaaattaaaatgtctcattattactgtaatgaatatattggtgtcactatggcactgcgtgtatgaatacaaacggcagttttgtggctctcgttgtgcaacacaagtttgtaaatatgagatcttttttcaattgaatttattt

SEQ ID NO: 66601 - DNA, 1070 bp, Cannabis sativa
  modified_base (381)..(382): a, c, t, g, unknown or other
tcatctactttatattattttataataataaataattagtaatcttttataattattaagaattgattttaaaccacacgagtaacgatattataatgataggacttagtaggtaccattactgtcgtttattttcttttgatgacttctcaacgaatatgcgggacagatggacgtaccatggaaaagtaagtgttcaatcaatatccccaattttcataatgcctactttgttcacctccctacataaattggttattaatattaaaaggcactatataatcatgagtatgatgttgggtactagtggtatttaacatcttttaaacgtgttatcttgtgattgattagcgatactttataaaaattattatattaaannatatgagactcaatacttaattgcaccaatagcgaccttgatacgtaggagggtgctagacacttttaacatttctctataattaaatatcaaattttatgtaatttaatataataatttttaaagaatatcgctattaaattataagaagacacgtctaaaatgtagtacgagctaaatatcattagtgttcaataacaatgttcttattaaaagtacgaaaaatgctaaaagacactagtagtattgcataataccttcctacgctaatatcactatattagtacaattaagtatcagatcttatataatttaattaatataataatgtttagagactatcgctaactaatttcaaagtgacatgtataataaacaccaataatatccaataacaatattctataaatacaagagttaggaatagttatattagtaagagaattgctaaaaagtatcaaatgtctagcaacttctcaatgtcatcatactattattgatatagtattaagttttatataatttaaaaaaataattttttgagaatatatattgttaacgaattctaagaaaatacccactacgtataaaaaacagctaccttttgtgataaatttttagtcataatataatttttttgtgactagatgtgacttttagtcacaacaaaaagttacttatgactaaa

SEQ ID NO: 66602 - DNA, 572 bp, Cannabis sativa
tttttggcaatatcatgagttgacaccaatatgaatgaatggctattaacactgagttgatgagaaccactctccctgcaaatgatagattaccggtactccaataagttcttatcctagccactattttttcaattaagatactacaattagctgttgaaattctctttggactggttggtattcctaagtacttgaaaggaagatcatgttttcggaagcccgaagcatcaagtactctttgaatatcattatcactcatgttattgcaatagaaaacagtcttagagagattagggaataaacttgaggtttgggagaataacttgagtccttggagcataaggtaaatacttttgaaatctccattgcaaaataggagaacgtcatcaacaaaactcaaataatttagcttcaagtccccacacttctcatgaaaaatctacaaaactacaagatactttctatacctcaaataaatcaatcaattaaaaaaaaatgcatgggaatgaaaatacatcttagccgaactatattcaagttataaaatattttttgtcaatctaaatatg

SEQ ID NO: 66603 - DNA, 1034 bp, Cannabis sativa
tgcaatcctctccgatgatcttgaatccgattcgtctgattccaacaatacccaaaattataattcccaggcgagcttgaattcgaaacgttacagtaggtttgatgcccaggttcgcacgttacagggtgatgcaagcacttactgcgatgagcctgaggatttggatgattatagtaaatggaagttagggtttgttttggaagaaaaaagtgaagaaattgaagagttaattgaagaaaatagggctgtggaaaatatctacaagagggttgttccggatagtattgatcaccagactttttggtgtagatatttctttaaggtctataagcttaaacaagccgaggacttgagagctaatttagtgaaaagagcattttcaagggaagaagaagaggaattgagttgggatgttgatgatgatgacgacgaggatgatgttgtgttgaaaacgattaccaagaaaaatggggaattgggtagtgaagatggtggagtagtagtagcaaaggaactggaaaatgactcctcaaatgcttccttgaaggaagaaagttccatagaaactaataagaatgttgagaaaacttataatgtgaatgagggaaagagtagtggggaagagtctaaacagagtttgcatttggaagaagatgttgattctgaagtaagtactaaaaaattggatgtatccaaagctgatgataaattggcttcgaaagggatgattgaatctggtgactccagcaaagatagtgatgttacagttgtttcaactcagccctcaatgcctgaggaggaagaccttggctgggatgagattgaggatcttagcactattgaagataagaaaatcactcatcttgggagtcctaatagagcagagctgcgaaagcggcttagtgctgcggaagaagatgatgaggacttgagctgggatattgaagatgatgatgatgatgaaccaagtaaagcttaaaactaaaacttcaattacttagttaataattgtactgctttcatattttcct

SEQ ID NO: 66604 - DNA, 2093 bp, Cannabis sativa
tggtgcaggtaagggcaaggcaaaattagaacaaccatgagatggcggtcttctctagcaatgtacatattgaccccaccagcctgcgtgttgagttgcagggagttgttttagactggctatgtcagttgtattttgaattgtgttttaaattgttgttgtatatcgtgatttggataaatcttttataacaggaatccccggaattcctttttactgccgttataatgtccatttttagtgttttaatttagtcaagttttgattatcctcaccgtttttaataattaattaatatattaatattaaactagttttataaaattacacacgtggcgttcctttagattagggcattacaaatatagtgcgctaggttcttaaaatataagaataagctaggtacattaacaaataacatcattgttaaattagggtgaaatcaaaacattgacaattgtttttatttgattattctcaactttaatttgtaattctcgtcgttgctattctcttttaattttctaatatcattcaatatcgaatgcttaataaaattatgttttaatatttgccatatttaattactttaattacttttaatctctttggtatgatatccctctcttgatcactattattacttgtcgatttatgcacttgcaagcacataaatatatgaataaaattcgcaacaaggttttagcgtcgttgtgaggtttaaatctttttaattaatatagtgaagaaattatcaaattctagtctaagtttttgctatttttattgtttactaaagttgttttataattgttgctgtgaaggtgcatctgcaaagctcgtagttcacctttcttaccttttgatcctaaattaaaagaaaattaaagtaaattaaaagagaactacgagctagaacaagaaagatggctgataatagtgtcaacaataacaacaacaacactgctgatggtcccaatcttgtagcaaatcggaccttgagagattactgtaggtcaattgtcaataatgatttcttagttgtgagaagacaacaagtgaatgtgaacaactttgaattaaaacctgcattagttagtatgggacaataaaatcaatattttcctcatgatacctaaacattagcatttctactttcttggaagagattgctgaaaaattcctcacaaaatcctttcctcattccaagacttctaaattaagagtgaattcactcaattttgacagcttgagattgatcaattttatgaggcatgggatagattcaaggagatgcttagaaagtgtcctctacatgacatagaagattggtttcaactctaatttttctacaataggattaataaaaaactgaggtctcacattgatgttgcatctagctgtacaattctatcaaagacactaacgaaggctatgagtttatttgaggatatggcaatgaatagttgtcaatgacaaagtgagtggtcaattgttaaaaaggaaacaagggtaattgaagttgatcagagtacgtccctaatggcacaaatttctatgttgacaaatcaaattaaaaggcttacagaatgtaaagtggtacaaacaagaatagtgaacatggcacaagctttaggatctaatgaatttgtggatgaaaaatttcaatatgttaatcgaagctacaattttaaaaccaacaacaattcgcctaaccactatcatcttggtctccaaaatcatgagaacttttctattatcccaaaaattgcacgaatgacgtggcatcacgaagagttacatgtggcctcaattaagtagctggtcgagatatgatgacctaagtgttgctcgactaattagtatcctttgaagcatccgactagcctgaattagcaggaaacatcattacgttctcgcaaggagatattgggcggaccttctagcccatgatgtttacttgttcaaaatctttgatccataaaacaataaacactgattaaatattctataaataaatgttatttaataacactttatctctataaataaatctttgatccataagtttgaaggtcattgactaattcatg

SEQ ID NO: 66605 - DNA, 1771 bp, Cannabis sativa
tcaagattaactgctaatttccaaattaaactaagcgggctttacatagcgcaagggagcaaataagcatggtgatctacaaaagaggagcgaacaaagtcaatacacttaaatacatcaacgagacaattattgtgtatcttttcattgcgagtgtggattagatcaattgtattagttacttttgcatgcatgtaaatcaacatcagatctgcacaagtacgaattttagatttctcaaatcaatttaatttatacaagtacagatatccgcactttgaagattgaattgaattagattgtgcagattaaattaaattttatattttatgacccttaattaaccgcactttatacagttaacagaaaagtagttgagacaaatatatatgggaaagaaaaggagggaagaaagaaaagacgtgttgggccggattgaagaaattaaggagtactactaatactattattactgttgttagcgtccaaattcaaactccaacacggcgccatgtgtagctgacgtggaatgggacccaatacgttctcttcatggtctggtgggtgcctcctctcactcactccattctattacattgtaattatataatttggattaatttatattattaatcctattcctcctcatggactaaaaaatattccttcaacttcaactacttattaaacaagttccataccaaaaaaaaaaataaataaataaaaaataaaatacttgttaaacaagaatcccaaacccttttcaaactccacatatatatacaaattaaaccctaccccgccactaatattatcattatcttatctaaacagaatacatgacatgccatgatgatcatcttgatcatgatataatatgtcatgtgccatggccataacatacatacatttataagggcgtgtaaaagtctaaaaaaaaagggccacagagaattgtttttgaagaaaaagagtcatagtcatggctgactcagaaaattgaggcctcatatatatgcacctagcaacatggccttcatattgctctttccattttcaatattttctttcatataatttggtgaagttgtcaatcccattcattccccataatattattaaacttcattatcttaattaatattatatattattgccaataattatatgtaggagatacctataaggaataattaattaattaataatgtttttactacttaataatgccaccatagagggactttactatacgtacgttaaccaatatatgaatatgattaaatgtttttacaatattggtgcatgtgaatttcactagtcgttattgcttcacataatttaaaaagggtgttaatatagatattataaatgttggaattttaccaattgctacactcacttctacacaaaaagttggcccagttagaaacaaaaataccaataggtacggaataccccaaaaccctagctagctcttctaggtttgattagaaccttcgagagtctctctctcacacacacactcgcacacatacacacacagagattagggtttttaaattcaataatacacacacacacacaaacacgtatagttctaagaatcaaactagaaatgaaaaagattgaagaaaaaaatacaaacagatcaaaagaacataagatttctatcaaggttcaaccaaaagctgggctatgtccttgtcgagcttgcctcaataatactcgagttccactgtcacgactcgagccctaggttgtggcagat

SEQ ID NO: 66606 - DNA, 668 bp, Cannabis sativa
attgttaaactaatgggtgagtttttttagtaggttcgattgaaggtaatgaaataaaatgaaaaggaaataaaataatctctattctatttttattacttggttggatattaaagtgttggaatgtcattccaatagaatgaccttttcactattttggtggaataagaattctattttgaaatggaagatcaaaagaccattccaatgcatgatgaaaaaaatttaataatttttttagcaattttttatgtattttaaattttattccattccattcttattatcattcatatttccattctcattcttatatttttattcgtctcaactaaacgccacctaaaattttattacttattcatactccttgtaagttattgttgcctttttcttcatttaatgtgtttttttttctctctttgaaagttcacagtagtttctaaataattttgttgaatggacaattatggtgtttgtttagtgagctttcagctattatggaatttgcctcaaatttttattaatcaaatggttagattactcaaggaattgagatgtctattatgtctatgtttatttctattttgaggttttgttgtttttattttgaagttatattgtttttatttcataaaacttattttcattttgaatttatgtgtttt

SEQ ID NO: 66607 - DNA, 603 bp, Cannabis sativa
  modified_base (379)..(382): a, c, t, g, unknown or other
tatggtgatgaccatatgtctacagagcaaaaatcatatatgttcttggtagaacgctaaaagcttagaatgctctttaggggggagaatatctagtgtcaactctccaccaccccttggcaccttagtgctaagtgagttactactagttagtgcgactagtagggtgggcatatgaggaccatgaggggactcatatgtctccatgagttggaatactcatggacattatcgggccgatccggtaatgcgtctaagaatgatgccagaggttagcgggtacgattccattggcttactagtatgccgcttgcacgggacgtgacctaaatgtccaaaagatgttgtggtgcaccttggccacgagtctcaacacgannnnacacgggtagtcattcgtgggctggtttgcatacgcgcatgggacagttgcaccatgtaggaaagagacagaggtctaatgtatgcatctagtttggtggcttgtcttgggggcttgccaacatgcgtggagacatggtgccttgaggattagaccatggacgtatgggagtccttgggtgatgagggagacggttctgacagtatcgaatggggcatgat

SEQ ID NO: 66608 - DNA, 549 bp, Cannabis sativa
ttttaaaatcaaaaataaatttaaatatttacatcatactttaaaaagcataaataaaaataaaaataaaatctaaatacatatataaagcataaaattaaaaaaaaaaaaaaatacataattagaaatgaaactaaatctaaatacataaattcatactcaataatatagaaaataaatttaaataaatctatgattttttttctcactttcacaaaaatatatatatatatatatatatatttatataaaagagtacatataacaaaacatatatatcatatcaatataattttctatcattgactagtaaattaagatgagttcttttaacaccatcactgtcataagttttatgtgtattgcattgttgctagtttcgggtaagttttcaatcatttttaatttgttggttattaataattatttaaatatatatatatataacatattatatgtaatattttttaatctaataaatgtgggagcttcaatggtaggagctttatttttctcctatatcaggttttaacaaattatgaataatta

SEQ ID NO: 66609 - DNA, 1184 bp, Cannabis sativa
ggcataaaacccaacagattgtacatgtcttggcgatcttcaatagataaacctggtagctctaataccaaaattgtaacaccctaatactaaggcacggtacagtgattttttaattacagtgctatctttgctaatcaaagaaattttcatgaaaatcgtgtcgaattaagactttataattaactatgaaactttataaactttgtatatatttttacaaaagtcgggatcccgttgttaaactattttacaaagttttccaaaatacaaaagttaggtcgcagaacgactacaaaatgaaaaccccagatgtcccgagatcgaacactccagatcgcgccaccatgacatgtacaacatcacgctagctcaagctcactcttgttcagcctttgcctttcctttacttacacatgaaagtagaactgtgagtcgacagattcagtaagaaaagcatataacaaatcatataatatcgagttgtatctaggcgcccatatacctatttacaaggcttaacaaatgagttagaatattcttaactaagatacgattatgtaccactttaccaaggtagggtatgaaccgtaccctgagtaatgttaagtgttgtaccacatacaccatgtacctactcgtactagtgctagtaacaccgtaatgtactcttcagacatcgtacactttaccaatgtactttgcaccactaccgtacaagtgttgctagtgtacgaatcacaacaagcatgcacatatatttcacacatacatacactcgcatatatatatatatcacatgttttacaatattcttacctcgttttcaaattcacgtgagttggtcaccctgaatggaaagtctcgtgctggatggatgccctaatcacacaacataaccgggtatataactcggcaaaaccctaattcgagaaacccgaacctccaacttaaggttctactattactaaccgaaactacaataccctaagaaacatggaattacccaaccaaggctctgaaatggacatgaatcgaggaaatgaattgttttagggaatctgccaaaatcggttaaccggttttacaagtcctatcggtttgcaccaggtttccccaaataattccaaacctgctcaaaacacgtccaaatcccaccaaactctccagaacacctataaaga

SEQ ID NO: 66610 - DNA, 980 bp, Cannabis sativa
agacgaccaaaactgttgagaaacagtcaaatatataaaaacatttaagttcgttgcttgcctgaggtttagaattgagaaattttttttgtcaaagtggtgtaagtaaaacttatttatgagcaaaaatacataacacattcaaaatattcataactcaaatgaaattttttcatccaaaaagaggaaatataaataaaataaagtggcatgaaagttaaaagtgtaattaaggcaaatttgaccatttaacaacgcaaaataaaattgattacataaaagccataaagggccaatcgaccattgtttagaatttttttgaaaactaagtctacattgtgggagactcacattgtgggagactcagagggcctttcttcttcttcttcttcttcttcttcctcaacgacctcaacctcttcagagttgccaccttcctccttcttagtttgttcaaaatatgctagcatcgccttggctacctcacccaaaaagccaaaatctatgtttggattcgccatccaggtcatgtaaatcgaacacttgaccatcaagttaaccctcttgtcagtgtttacttggacatcttcaagattcttattgacctcttcaagatctttttgggcatgttggttagccttgtgaagccactcattatatatcttcaaacccttctcatatttctctagattttttaaaattttcttttggcaagagatctccaattgggcatcactccattgcttagccaaaagctcgcaatggttgttggacttacaaaactctgtgctaagctggttgaagttttgaagacccttttgttgagcccttaaggttaagaaggaagcctgcatagaaatgatgtcagagaagcagtttaaaaaaatattggaagttggactaactgattgcatgaggtcaacattcctcaccataagtcttgtatagttccaattattaattagatcccagtcatcttg

SEQ ID NO: 66611 - DNA, 1346 bp, Cannabis sativa
ttctgatctctaatctccaatgctcatactttagattcagtttagagagagagagtccaagatcatagtgagtgtgtgtggatggatgtaaatagagtatcactcgaactgatttccctcaatgcgggacatttctttgtaatactttactgtgtttgagttgtaattttgggctcattctattgtgtactgtggactattcatattcaataaaaatccatcattcattcattatcgagctaagtttttttttatctaattttaattaatttcaagttttgattttgtgattggttttagttttaaattgtgtttcttagacattgttactgttgtaaacctgttttgagggtgaggattcaccacatatatgttaaaaattttaatttttctaaggatgacaaatttttattttctcacgcaattaaatttaaaaagtcttattagcaaaacaatcatagaaaattttgcaaaccccaaactgtttactcaacaagttgttaaaaagtcaggctttttcaagaaactttggccagaattaggactagaattttgcactattatcaatgattttttcattacatgttttatgccttttgaactccattcgacattaatttctcttattcctaagcatgagaatccttctagagttgtggattatagacatatcgctcgttgttccacgatttacaagtgtattttgaagcttttatgctctaggcttgcaatagtgcttcttggtttgattaatcaaaaccaaggacccttcattcaaggaagatccgtagcgctcaatgtgatgatgttgggagacattctgaaaaattataaaagctgcactatcaaaattgacataagcaaagtttatgcattgtcagttgtgattttttggaggattttctagctgcttataattttctttagaagtttatttagtgaattatggtgtgtctgagagcaacttcttactcgatagttatgaatggaagagtgcagggcaaatttaaaggagagaaatggttgagacaaggtgacccaatctcttctcttatctgtgtgcttattatggagtgtctcacaagaagacttcaaatggcagttgtcaattcttcatgcaagtatcatcaatgtgtaagggccttaaaataatcaaccttttcttcgcaaatgatttgattttgtttagtaagaaatcaagactctcagttatgactctcaaatataggtgcttaatgaatttagctctgtcacgagcttgcacataaatgctaataaatcccaaatttattttgggggaatgaatactaaggaaaagtaaattgtacttagagattttcagttgg

SEQ ID NO: 66612 - DNA, 1473 bp, Cannabis sativa
gattggttaactaaagccaagattgggacactaatcataccttttagggctcgtttggtacaccgtgatgtattgtattgtattaaatgtgttggattgtattgtattgtattagtattatctaatacaatactatatttgatattgacttgtttaataggttgtgtaagatacaataaattcaaccccaacatggatcacgacttgggctcggatcccaacctgaactcggacccaaaaccgaacccggaacatgccccggaccctaactgggacctggactccgacttttgacccagacccggacccccgacccgaacaccgaaaccgaacctggacctagacttcgaactcggacttgggtcccaaacctagaactcggacctgaacctcaaggtcttggttcaaatccggtgtcctggttcaagtctgggtctgggttggtgtcaggggtccgagtggggtccgggtccatggtcagggtatgggtcgaggtctaaggttcggggctggggtcgaggttgacccagaccctttgtaaatattataatacaaactaatacaggtcatttgttatgtattaaataatacgactcacatcctattaaaatttatggttgtaataattaatataatacaatattttatccaaacatagtcttatttgttatttaatacaatacggcctaccaaacgagcccttaatgatttttacaagacaaaagcataggtgttctactagcttgcacaaaaaccacttccacaaccatccaaattaagataacgagcttgtgaaattaaggtaatagtgataattatgaccacaaacttagcaaaagttcacaagggtacttatatattacatataattagtattattatttttgttttccttattaaagcctagttacttacatctactgtatttgttttggaatttttcatccagaaactcaataaattcaatgctagaagccccaatatgtatagaaggctgtctacttgatttgatgagttaggaatgaaaaccttagctgtacgtaaaggagatggaatcaagaggatggggtggaattgaccccattatgccaatccaaaatatatatatgtatatatgtacatgttatattatataagttttcttatgtatgtatatgtatatatacatgtatattattacctaaaaaggagcaaaactacctgaatcaaattaaatcattacccaaaatcactaagaatcaaaacagaagtaggatgaaactcaagatttgaattgtataaatgagattttgagattttatacaaataaaattagggaacaagtgaaaaagacaagaagaagacgagtaaaaatacctgaaaaatgttgagaggataggaaatttgaggccgaggtagaattagtctcgtggagaaagaggaagtcagagctacattcttatcgtgctgaaatagatatgatcttatgagaga

SEQ ID NO: 66613 - DNA, 607 bp, Cannabis sativa
attcacatgccaaattctttgtcaatttgattaattgctcatgtgcatgttattaaaactattgcttgataataatacaaaaacaacataacctattttaatatacaaaatttttattaattctactagtcaaaccaatttacactactttatagagtaatataatatatacacttctaccattgatccgatccataccattgtcccaaccgacctaagagtgggacatagctggagcttcccaggcccccaccattgttgaacaagtagagttaacccttgctaaaactcccatacacgaggggaacacctgatcatggtatgcatggttcctggcatttcaaagttcatcacacaaacagataccaaacctagaaaaagcctctctatcctccttgcttgttgcactccctaagaaacctggatcaagcagccacaaaagaaaatctctaagacaggaaaagttgaaattctcaccacgaatcgcccattaactaccataccaggtggccttggccaacagacaatgacagaacaaatgcaaccaagaatccacattctcaccacacaacgcacagtttacaggattaccaaagatcctttgaag

SEQ ID NO: 66614 - DNA, 1476 bp, Cannabis sativa
aaagaagaaaaacaactataaaatgtgacacaaaacttaggctaaaaatagcctaacaagttgaccttcctaatatggcatttatgatgatcactgaggagcccgctggtattttgggaagtaatgtggtggatttaaatggtcaggaagactatgatataaatgaggaaggaattgccattttggatagtaaacgtagaagagtctctacaagtgggtctgagtctactaatattgatgaggatatgatgtgattattctgaggatgtttctggtgaaaatattaaaacaaatatgggctcaaaaaatggatcattggtgtgttctagtttctaggcccaccgctcattatgagtattttgagttggaattgtcgtgggcttgggcacccaaagactcttcaattcctaacagaccttgtggtccaaaagaagcccaattatgtatttctctgtgaaacttttgctcgtaaggatgtagtggagaggttgtgtgttgctataagtattgatggtgcattttccgtggatgcaaggggacatagtggtggtgttgctatattttggaggcataaagaagatgtttttttttttgggttattttgtgtgtcatattgatataaaaatcgggtcggatggtgttggtgtatgacgtcttacaggtgtatacggtgaacccaatcagtcgctttggtacaaaacttgaaatctgttacgaacactctcattagagtattctgttccatggtgtgttattggtgatctcaataatactctatcacattcagataaaaaggaggctccccgtaccctcaatggctgttggacggctttcagttagctctagatgagtctaatcttcatgatatggattggatgggttatccatacacttgggagagaggccgaggaagcaataactgggtagaagttagacttgattgtgctttggttagtcattcttggacacatctttttaattcagctcaattatttaatcttgaagtgtccatgtcggatcatagtcttttgttgctggaaactatgtttcataatattgcccagccggttcgtcattttcgcttcgagaatgcttggctgagccaatgtgtcgacaaatcgttaaagaaagctgagattcggtcttaactgttcggcggtggacaaaattaagacatgtgggaccaatttattggcttggggaaaagactttactggaaattttaaacaacgtattaatgattgtaaaaaggagatacaaagattaaaaagggcccgtgattctgactctttgattcggtataaaaaggctgaggaagatttgaatgaaatccttactgagaaggaggttttttggcatcaacgatctaagcaattggggcttgaagcgggtgaccggaatattcataaaaaataatatttaattattattacattctattttaacagaaacaaattaaaatctattacaatatta

SEQ ID NO: 66615 - DNA, 736 bp, Cannabis sativa
tttttcaaattacaaaataatcaaaagcaacacacaatttttttttatcataaacgtaccaatttctaatttggattttaagttgtgtacacatttttatcttagactacaattttcaaatttgtcgagattgaaatgtcttcttgctactaaataacttcaccaataatgtttgtaaatatatagttcaataattaagagttttagaacttgttattgttgaggtttgaacccttgaacaagtgtacctaaactgtcagttttgacagttgaacaactccctcaactaacctaattaacttgacagttttgttagttagtgtgctggcccgagagactataaatacctcacacttgtgtgtgtttagatgagtagaaatgagagttttgagagaaaatcaaagtgtgtttgagggttgtaaatggcctctcatgtgtttgattgagagaaccacaagtgagacacaatgtaaggatcaagactccattgagtgaagggtttatcttcaattttataatctctgttcaaacttaataaagatcatctccacgaccattaaatgatgctttctcccgtagattaagctcatgatcatctttattgtgtagcccaaccacgtaagttctttgtgttgtttttatgctttcattagttgttatctttgctggtttatgctcagtttaagttcttgatcatttgttctgtttttgctgttgtgttgattcttgtttgggg

SEQ ID NO: 66616 - DNA, 1546 bp, Cannabis sativa
tggagcgtacgatctttgggacatcaaggcttttgctgaatagtcgctaggcgacaaaacttttgtaaatggataggaaacatttgtaaatgtattttgtaacgggatctcgggattttataaatgtattactttatgtatttaattaaataagcaacgagctgcacagtacattcaaaattacgttaacatgcctaaatagttagggtgttacaaaatgtgcccaaaaattttaaacatgtctaataaaaaacaaaacagataaaaaaatacaaaataaacaaaataacattaacaatacaaaaattatctacccaacttaccgcagtacatgtattcgtaaaacctacttcactatggttgaatatttaagatattgaagctcgactaagcattgacaattaattaataataaaagttacctcgaatgttaaaattaggtttttagaccaaggaagaaacatgtttgctatttccctaacatgtatgcaaccctcaattgagattgagatttcagcatcctcttgcaacatttctgaaatgagaacccgggcatgtgaatcatcgtagggcaaagtgtaaactgtgattggaccatcatgtttgtatagctaagcttaagccactatgttgtcatattgtctgagcagagaaatactgtctgattagctgcccactattcagtgaaattgtatatgacaggtggctcatataggggaacaaactcgtgtgcataatattttggacccttatcctcttgagcatgttcttgtggtacatacttctgggccaactatccttcttcctcatcatcattctcattttgctcttgtttgacaacatttttcttctatatatgggatttgatttttgcttttaatttcgcaatctccctcagttttcgagccacgacattagaaacttccattttctttctcccaaatagtttagacgactttgcaaggaacctgcaaattaataaataaagttaacaaatatttttcaagtctaactagtgaaataacatttcttaagtactagcatgcccaacattcctgacacgtctaggatgctctagtgtcctgagcgcctgggtcaaatgtcattttgaccatgaacctgaacttgtccctgactaactttctcctccagttaagcctagtgcacatattcaagcaattagtatatgatttatatatattaacacagtattactttttcagcaattaattatatacttactatcttatcagtagtgacaagttttgttttctttgttcgagatttgatataaagacggtggtatgggagatttttttacaaaacttaaatgagtaataatacattttgatgcatgttgctagaaatttattatattaattacttacaacatcttctcttacgttcagcattctgctcaaacaactttgatgtctagattgaattttttctgatggttccttttgtacgttactaatttcctaccatccaaaaaaaaatatgttagctactagtacgggtatttaaaaatatatcttagtacaaa

SEQ ID NO: 66617 - DNA, 959 bp, Cannabis sativa
  modified_base (240)..(241): a, c, t, g, unknown or other
taaagtataataagtgatgaacaaacaataataaaaaataataatacatgcattaataaataatatctaaataaaaatttattgctctttgacaaaaaaaaatatgcataataaatagatagaaagttttacactagaaaaaatctgaatgatctcgattaccgttgatcttatccacatttgatctcaacctaagggtgagttgttgtctggttggtaggagacaacaacctgatagannaacttgttggatacttatattgaatgattgatatatgctttaccggtatatatattttaacaaggtaaatggttcaacgggcagttgtttctttagttcccacaaccccgacaatgacatgctcaatccaggcccactaaattagttcaggttccacaaacttggtctttataatttatttttaatttgagatttattttaattaattaaaaaaatgtaaatctctatgatagtctattaattgatcttgttaatatgagataattcatatataaaatattttttctcaaattttacaattgttgtggacaataaaataagatatgcgataagacattaatttatcattcaaatgtaatagtttataaaaataattaaagtaaataattaattctatatctaaaatttttaaatatgtataacattataatcttaaaaagtaaattaattaatataatatgataaaattttgaaattattaaattagttgaaatcttaaattaaatataaataaagaaaaagaaaaaagaaaatattgcttctaaaggttgaactcgtgacgttttaattgttttaagagtacttatattgattgttgtctggaatttttcccaaaatacgtggtagttcaagaaagagttaggttgcaataggatccacactacaagatgtgccatcttaatagccccggagcttaatgttacaaaggaataatgac

SEQ ID NO: 66618 - DNA, 697 bp, Cannabis sativa
tttggtggaaactttaattaatgacgccggggattggaagttagaagcccttgaggaaaagatgaacaaggatgacattccgtggatattggggattcaaacaatacaagactgtggagaagatgaacttatttggaacccaacacttgatggggagtacacagtggccagcggttatctaatgaagcaaagtgagaaagaaggtgctgaaaggtcaaacaaatcgataactacaggttggtggactgcggtttggcattcaaatactccaaaaatgaagaactttatatggagagtgtgccataattgggttccctctaagactgagcttgcaaagagaggtatcaaattggatagaacctgtactggctgctggaatcagattgaaacaatcagtcatgctatatggcaatgtcctcggctcaagtatgtttggaaagaaacggggctctggcatctttttcctaaaagtctcggactgatgacggatttgatggagtttctaatgtttatgaaaaacaaatgctctaatcaggagtttgaaagatttttgggtatgagttggatggtgtggagccaatgaaataatcgaatcttccaaaataagaatccccctttaaagagctggactccttgggctatcgactttgttaaccatgcacttacaaaggatacagacatcaaggataagaagata

SEQ ID NO: 66619 - DNA, 712 bp, Cannabis sativa
tgccttagcattaggggcgttatagctaatgggtaatggaagctatgtctacttcgaatttttatttctcatgagatggtaattacagaaagatgctaagtgtttaagctctagttttgagagagagaaactagagagatatactctgaacttctgggtagttttctgaatatgaaaaatatgctagagtaactctccttttattggtgaaggagatccttaaaaataagaaaaaataattcaaaatatgaaaaaaaatctaaattggtgaattttgaccgtagatgacgatctgatggtcaaaattaacttatgaagttgatagtcaattttttgagcttgggtcgcggcggcgggactcgctttgggtaagttagagcttatttcataactctcttggggtaaatttagagtaatttcagaattgcaattgaagtgtgagaaataacttgatagaacattgaaatagctccaaaatacaattgaattgcgttaatcgaatcaatattgagtgagttatgattgtcttactgaaagcagttcataacccaacacccaagttgacatatgacgtcaacctggatgctggataagtgagaaaatattccagtgatgtgctttttgatgcctaagtgatattttaatatcacttaatttgattttgtattttggcaaagctggtcactagttttcggagatattgctgttatgc

SEQ ID NO: 66620 - DNA, 1151 bp, Cannabis sativa
taccaattttatttttttttttttgaaaaaaaaggataaaatgggaagttcatgtaatcaatggactaaatttgtacaaatttagggaggatataaattttaatatgacttgtattattaaggccaaaaagtgaaatttcccttttaaaattatgaacaaatatagctttgaatatttaaatgatgaaatggacggttcttgtaccgcatataaacaattatatgcacttttcttacattgttagtatcaaacttagcctcatcttatttttggcttttttcttttcttttagaacaataaatagacgatgaagtggacgttaggaatttttatttgttttgactttcttattattttttaacctacctttattttattttctacaactctaaaaaaaaataacaactacattgttaatcattttaattaaaaaataataccattatgacctgctcttcaagctggttattttaatatgtgataatcatatatttttttatttttaccaaaaaaattgtaactaaaatcaaaagcaactacttagtttattttataatttattaataaaattgtaaccaaattttaaattcaaataaagtttaatatatcaactaacttatgttactataaagttgtttgatatctcctaaataatggtctattccattaaataattttcgtatgtaaataaactaaataaaatctttttttttttaacaaaagaaactaaatgatatcttaaatattataaaatttaaaattttcattttaggtaacattatactcttatgttgtaataacatttaaattacctttaaaatctatttgagagtcaaacctaacaacatcatcaccaaaaaaatattaccagtatcataaacaatattttaatttctttttataacttattaagaaataagcaaccaaactttaaatttaacaaaattttatatattaaccaaaaaagacttaaactcaaataattgttcgtagtaactgaaaaagactttagaaatcataaataggagagacataaatatagatttattttttatttataaaaaaataaaaatcaaataaaataaaaaagtgagaagacatctgattgagtgtcattttgctaaaagaaaagaccaaaaaaaaaaaaaaa

SEQ ID NO: 66621 - DNA, 872 bp, Cannabis sativa
atatcatttatacggggttaagttgtaaagactgcttagtttaatttggaaatataaagggatgtacaattcttgaaactaattttttttttcttaaataccaatttgcttaagcatcattcattttattattaaattacgcgaggacgagtaagagtcaagtgtgggggaatttgataagttgatattttgcctataaatataactaatttatgtattaatattcttaaattgattttttaaattattgattagtgttataatttcttcagctattttgaagactaatcatgcatttggagtcatttggagggatattcgcatattttgaagactaagccggcgagctcggttttacaaggaagaacttaattacaaattttggtaatcctaaaagtagaattggacttggagctcaacatgaaagttttagatctcattcttagattttcggaacatcttgaatcgtctaattccgagctgtattgaagatgttatggccaaaatactaatcgggtacaaaacagaaattgtgttgggcgctatagcgcccagttccagagctatatcgccggtctgaaacaaaaaacacacacaaaaaagataatttcagcacatgggttattcaagaaatatctcatgggcgctatagcgccaatttatcattttttttgaaaaaatcctaattctaaggggattcatctatcttttcaagcactataaataggacctcttaggctacgaatttaataattctataactacaaattagagtgagagcaaggaagagacggagatcggctttgaagtgttcttcattctagttcttttcttctccttctacttttactaaatattatgattttggttat

SEQ ID NO: 66622 - DNA, 956 bp, Cannabis sativa
catatttagggtgttaattacacacttgtgaatagatctaagatcctggtaaaataaatttccaacatgagacaatgtttggacttctgtaagttcacactcttggtcaacatattagcaacattatcttcagtgttgactttcatagcttgaacttgacctttgacagcaatgtctctgataaaatggtacttaatatctatatgctttgatctttcatgcagcataggttccttatcaagtgtagggcactttgattgtcacaaaacactttctgatttgaaaccaacttcttgtgtcaaaccctttaaccaatgagcttccttgaatgcttcagttgctatcatgtactcagcttaagtagttaagagggtaactactttttgcatattagacttctaactcattgtgtttccagccacacagaacactaaacaagtgagtcactttctggtgtctatgtttgctacataatcactgtcaacatagccataaattttagcttgtttacttgatcttcttccatagactaaccctaaatctgttgtcccttagacatatcttagaatccatttgagggctttccaatgaccttctccaagatcagtcatgtacctaataaccacacttagagaatgtgctagatcaggtctagtacataccatagaatacattagggtgccttctatgtcagtataaggtacaattgacctcgcttttcagccaacaacggtgagtcttaattaaagcgatgagaataattaaataacagaaagaaaaagaaaataaagtaaagaaaacaccaattttatagaggttcgaccccttatagttggtaatagcctactctcttttttgttgtattaacttgtgagaagagtaagcaagaataccgtgatctctctcgaaggttcttacaatgatctttaagtacttcactcttagattgaggtttc

SEQ ID NO: 66623 - DNA, 1400 bp, Cannabis sativa
ttatgaagacttttcctgcggtatggtaaagattgtttctttacatagcgagtcagttcgaatgacctaacatgttcgatgacctgacaaggactcgcatgccctaggttgtcgacgctaacaaggtattcgtatacgcgattcgattaggacgcagatacctatgcgcgagacccattggcctcgttttaacataatgcaccctaagcctgcgagcttatgcgagtatatgaacagacaacttgcactatgaaaatcattttacgttgctgtatttagtaaaacagatttaaactgttcttcagttattccatttatgtttttcttaatttaatgctaatattcaatgtaaaacggttcaataattaagttccgtgtattcaaaggaacacttcctttgtatataaaggagtgatccattacgaatagaggaggctataaatccttgcaacagtgaactaagcagaccaggatccgactaaaccactatacttccttgtgttcatagtttttccatttttctgtgtagcttcgtttgaatactccccattctaggtctaatactcgctctttattattaaataattatatttttacttttatttggtgttgttaaaattcctccaacaatatttggcgccttctgtgggaaccgtatttacttttgattttggaggagaatcgaaatggctacaaattagacaaatggaaacaacaacacgtgatccttcaacattggaacgatgaatgtcccactcccaagtaatggaacgaacccgattgacataattaacgggggtgtgggatgaaccactatcactcccctcaatttatttctagaaaccactagtcatgccggagaaacatcgacactagtagccaccatagggaacttctcgcctattacaccagccgtggtgtctgaaggaatcattcaattaacaacgacccaatatacaaccatgtaggagcaaatgcgggtgttgcaggctgaagttgacgggagagccaggacccgacgtccaccttgagtcttgaacatgcatttgggcaatcctcaagtagctattgcgaataggcaacaaaatgattgtcttaataataatcatattcgtagggagcatgaaaatgagtaggagggtctggacttgaaacaacccacacataattcaatgcaaaacagagagccaaccattcataacactggtcgcactagggaggagggaccgcaagaggaagaccctgagtgacggaaccctcaaaaccgggctcaactgcgagttaggtaaataaagtcgaatctcattcttcttccactaatagttgctctccaagtgtttatacgaggtcaggctctgtcgaaacacgatgaggaggaagatactgttgggttttatgcc

SEQ ID NO: 66624 - DNA, 1766 bp, Cannabis sativa
ttttcgactgatcttgtgttctagttctggttttcttttacagtttctctgggttttgatgggaaaaatttcagaaacggcattacattgtttgagctgaatgggtcgtacttcagcaaagagaaaggcagggaagggaaagagcgtccattatgggagtgcaactagtcaggaatgtagtcatgaaaacactgatgttaggctgcagaggcgactaaagagaagatgcaccgatcaccaaagtttcaacccaaactctcacagcagtgcaacgagtgtccagttagggagcttaggatctggttataatgactctgacttgaggtcagagagacgattgaggagagaaagaatgagtaaccaatgttacaaccccaaatctcgcagcaaggcttcaaaggcaataaaaaagaacatagctggagaaaaatcaggggttttgaaacctgcgagcttttcaaacattagactaaaggatggtgattatgatcatattgataatgataatgatgttgctgctccttctgatgaagaggacgtgtatgatccagtgcatatcaagttcttggaaagtttgaggcgaaatggaaactcatattcagctgagtttgttgatgagaatggtgtgactaagctaatcgactatgacgtagaagaggacttacgtcctagtataagatttggctttgaaaatcaacttccggcttttgctgaagatgttgatgaagatgattcaaaacatgttgatgaagatgatctagaagatgttgacgttgaagatttagaagatgttgatgaagaatacttcttaacttttcttaataacagaaatgagtattcttataaaacacctgtttcaagggacaaagaagatgatgcagatcattgcagattcattaagttgaaacctagtcaaccaagtgggcattctaatttgaaacacggtggaacaattggtaatcctaatttgaaacgtgggttagctgctgattgcgaacaggaagatggtgaaattgagtatctcacatatctggatactattgaagattatgagaatacattgccaaagaaatctgacaaagttgaggagattgaacttgaggacgaatacgatcaagaagatgaaggtgatggtatatgcgaagactatcacgcttttctggattgcctggaaaaagaaggtgaagaaatcatgtttgatgatgatgatgatgatgatgtgcaaatacttacaatgaatgagaaccctcgtgacgtagtatgttctcgtacctcaacttgatctcattagttttcatttaatttattctttcatacaattgtgcttaatgtgattagtttttatgcataaatatctgtgtagatggcctctgatttttttattaatctaaaaaatattttacaaatgattagatagatatagacaaccctactttggctaaagatggagacagaagtcaatcccaatcccggtttaggaaggagctcttggaaatattgagaagtccttatgacccacaacagcatatagagctttgggccgaagtatctcatcgcaaacgcaaagttaaagacataatgttgtggggcggaacaaaatcatctaatttggaagacagcttgggagaatcattgcttgatcgatacaaaggtcagttgatccattgttagaatttccgcatttgcttcatctaaatccttatgtttgctcatgcttaaggttttatacaatatgtcataactgttgctttcttgtgcatttcttt

SEQ ID NO: 66625 - DNA, 618 bp, Cannabis sativa
ccagccatatttttgttttgaacaaaaatctaagaataattaaaaaaaaatgtatatttaaaaagtaaaaagtgggaggaagaaggttactaagatgaagacgtggcgtgttggggtggttctgcccaaagtgttggatagatttgactgctgacgtggctggggcccacttacttcaccgctttagatttgacacctggttttgttctatgctttatttctatttacaatcaccacaaagtacttggagaatactctacctccctaaataaccattggtttattattgcttaagttttttacacctaaattaattttctcaactattattttatttatacttaattttttaagtttaaattttacccgtaaatttttctaaattattaaactacttgcaaatttaaaatattatttatttttaactgttagttgtcgatgggtatacttttatacatgtatcaagtttatattggtaaatttaatattattattttaaaaatataaattattacaaaacttataatgtctttatttttaaaaaatattttatttttatttttataattttatataattttaaaataaattttgaaaataattattaaataataatat

SEQ ID NO: 66626 - DNA, 4949 bp, Cannabis sativa
ctctcaggactttatcacccaaacagagtataatggcactgtgtgccttctcaagaatctcagtcttctccttctctgttctttccttgatattttcttcaccacgtaaagcctcctgaattccttgctgcactaacaaagctctcattttcaccctccacaatccaaaattattcttgcctgtaaacttctccaaatcgaactttgcattccccattgttgccctggatgttcttcacgcaccaccacgctgagctttgtcccttgaagctcaagaacccgtccagctctgataccagtttgtaaggaatgagtcaattcctatgcaatcaatcacactgatccaagaacatcacgaaccagtttcgaacagaaagaaaaacttgagcagtaatgctcctttattgaatgtattgtaatgtatttacaataagtgtcttaactgaaaaactagttacaaaatgaattagacaaagctatttatagctttgtcctaggtgtcaaactaattagctaaccgacttaactgtcgaggtaaaagtcttaactggaataaccgaccataaactaacaagagcattgttatttgctttattggacagcagttgtgccttatacttgagtgatacttaactcataattgtaatatctttggtatgactcataatacacactgtcactactacagaaatctcttaaagaaaattgaaaagaacattttgagagtagaatactaaaaattttatttagtagaatactttctgatgcctcttacaataaaaaagatgactctatatatagtcatctacactgggtaggataaaaaataagaaacttaataaaaatttctcagaaacattaaagtttagaaaatgacaacaaatagaaaaaccaataaaatgacaaaaatagaaagtgataaactgacaataaataaataaactgacaaacatggaaaatgacgaaccgacaaacaaacgattagaaaaatttcctacaaacatcatgactatcaagaaattttccacttattgctatcttaaaaaagtaagagatatggaatctctttgtactacttatgagcgatttataattggctcgtggtcagtattgtagtcaaagtcataattagagtcctcttgaagtgggtgccaacttgatggttcatcatcttcgttacttctagctggtggacatgactcatattcagaataaaccaactcccattctagttcattgtattgaaagagataggggcatagtgtgaaatgtgataacaaataggggcgtgccacattcttggtttaagtctactagaacatattccattatgttgacaggcctgtcgagccactctttcttgccttttctcattcaattagagtctcccgtatgcaaagcttggacatacagatccgggtcaactgtggggtgatttgctctttgtttttgtagatcctcaaaaatatttgtcttatggagtaggacccctacagtgtctgtttcttttaacagtgatgaatttttcttcctttctttaagggcttgaacttgattgtgacttttattataaatttagaatttttgtagagtattttcatggggcatcatcttctattttgggccaaatttttggtagaatagtctggtttttctaaaaaataacattttagagatccatgtactctgaaatttctctgaaaggtgcttcttgggagtcatatagttcaaaggtgggatcatatactattttctttttctcgtccaattttacattaagactaataagaaagacagtgtagcaatatatcatgttggctacatgcggtcctgatggatgaataaagatgtgcctattgttgcaaaccttttcccattcaccccaaaatatttttttccactcctctagaggagcgtaccaagataaaaggtctatttggatttggtagactggcttatgtttttcttgttcaaggaaagattgtatagcaatgtaaagagccatatagtttggactttgacatcaatcgtacagatgcatgttaggtaccaaaaaagatgggctatagattttggagtgaaaagtgtagtccagagggggataaaattggaaaaatgatactttgggtaaattagaaaatcatgttgaaaattgggaccaagtttagagagaatttggttgtgagtataaacatccctgtgagaggccctttcttttgctatcttttttgatttggaaaggatgagctttgcatcttggggaaataagcaattcttttgcgatgatgatgatgatgtcattatatatatatatggaatggtatggtatgggaagagttgtagataattaagaggatggtttgcagtggatgtgaagagaccatatttatagacgtaggtctagatagaaggtcgaccaaaatgttttcttttctaagaaggtgttttatttcaaaagagtaatgatcataccatgttgccagtctcaaaactcgccgataaaagtgttttttcttgtagcgccttttgatgcaagaaaatcgatttccaccaacaaatgatggcctatgatgtagagctcaaattttgtgatttttatcttgattgcaattaactctttgagtgttgaataataatggagttggaaatctttgaagtgaccactcttatatcaacatattcatatttttccctgctcatcttgctcaaggacaacaccccaatgttggtcattggcatctgtttgaaaaacacattttttgtcagtgggaatctataaaggttgtagatttatagattctacatgatttgcttcacctttctgactgcaacagtttggtcatatgaccattctggactattcttctagagcatatagatgagtggtcttgtcagtacagaaagtcggggaacaaactctcgcaaataattgatgatgcccaagaattgttggacttggactttcatgagattttcacctgagaattcgagtagttcatgggctatatgttattgggcttcatatggtcatttggataatttcattcaaaggaattctatttgcatctgtctattaattactttcttttcagacaacatgataccatgggctttagtaattgaagaaaattgggccaattacgattgatgggctttttcaacaggagaaaaaagaaaaatattgtcaatatagatgagattcttttccaatatcaggccatataccgtggtcatagccttttggaataaagaaggagcagttttgagcccaaacggtaggacgatccattgaaaatgataattttgaatgaaaaaggttattttgggccagtcatctggtttgatgcctacttgccaaaatccccctttttgatcaaatttcaagaaaaaatatgggctttggataaactggaaaacaataaattcttatttggtattggagatttatcatctgcaaagaactcatttaggggcttgtagttgatgaccaacctttgctttcctcgagcttgctctgatcaattattgacataaaatgtatgacatgcccatggagaggaagttaactctattaaaccctgctgctataactctttacattcagtggatgccatttattcatgttttggattcatgcctgggtgactagcctttgtagggtttatatcttcattaggattaaaaagaaggcttatgaagaattgttgatttttccataaaggatggtcacatttctttaggaacttgagatgattattggcacatgagacgtcaatgagctctttcttgatttgatgaaatgggtcatgggacattaagaataagtttggtatggcttcccatggagcaaaatgttgtttgtaaccaagtccactaggaagaatacacaaaccattcttctttgtgtaaagatcaaagctgacaattaagtcttttttggataattttgatccaatgactttatgagtaacagaacaccctgaaaagaactgcaaccgaattggtttgctaatgagttctgtgcaaaaaaaacttccatttgtagcatgaaagtattgtttctcttttctccaatattctttaggaagaatatcaaggttcgtgtatgatgctctcatgttaaaaaaaatgttgccacttttatctgcttgacatattttgttggaagaatttgcacaatgatgacaagggatggttgcatcgtacggacaatggacatttaataacattctgaagtgttcgaatcactccattgttcgaatgcacaaagagattctgagttaaattcatcatatgtggagaagattgactcgatctatgttatcttcctcagagaaatcctagtcatttgttgaatatgtgagagaagcttgattatttttccttgaggacatcgttttacataatgacccctttttccacatacatagcaacgatcatatttttttttccaaaagtcacacttccttcacaaaaaaattattttgcgcccttgtactttgagaacttgaacatcttgaacttgtttctgttccttgggttttttgcaagaacacgaaaattcagaagagtatttgatgagtaaatcttgtctactacaacctttgcctattttcttaaattatttcataaatttctggagaaatttcttttgggagcacatgttttcaaggaccttactagctggaaaatttcaccaattgtggcatccgttaggctttttcccaatacaaagagtagcctgaaagtttctccgccaagtggctctggaatagaggaaaggaaggcttgctttagatttggatcatcaatgccacctatttggtaaaatcgttgagtcattcacttataatgttgttcaagtctcttttatccattgaacaacacttgagcttgaaaaactctacttggagtctttcagttatttgtgcgtcttggccacaaaactt

SEQ ID NO: 66627 - DNA, 2177 bp, Cannabis sativa
ttctaagtacaaggcccagcccaagtaggatgctatggctgacaatgacacacagtgaatgatcatattggtcttattatcagctatcttcatgcctaaaatttcatttggttagtggtaactagttcaatttctccgtttaaattccacaactaaatttacttgctctgttgtttatttattacctgtttgtgtaattgttcttgaatgtttaaaaatatttataataactatcaactgtctttgaaagtcaccagacatgtaattacagtagccaagagcatgggaaattaaattgaaagatgtcatatataataggttagctgctacaaaatttaatgccaagaaatagacaaatcaaacactctctctaaccccatttctatagagaaaagcttttattatattggctagaacctataataaccattaccaaagctcaagtttcctactctttaattctttcacacagtttcacactaactcagtactcactctctctctctctctcctactcatcaatttcataaggagccaaaccaagttcacatgtctttgttttcttgtgaataaagataagttttttactcaatatagttgtatatcatctcctcactcaataatctttaatttcccttttgttatccactcactcaacaaactcacctcctatactgtgtgaatgtgataaatggtctcagctcaaaaactaaactattcataaagaaccaatcttggcttcatctcatctcaactcattctcatcatctccaaaactttctcaatgaagtcaatagtactactattctttgttgtttcttcctgcattttcataaagtctcttcttttagaggctaggcaagttaaatccaactctcacattgttgtaatgggttttgtttactgtgacatttgccataacaacaccttctccaaacacagttactttttaccaggtaatacatatatatctcaagtacccagaagctagtttcttgtttttattaatttttgtaatttttaaccaaaaaaatagaaagaaacttgtgtttgtgttttctgttgttctatattacttgtgtagtgacaaaatctatcaataaagaaaatttttctgaagtgcccaaatgaatgaacaggtgcagaagttaaagtagattgcatattcaaagcaatttcaccaagaacagcagaacagatatcattctcagtgaacagaacaacaaacaagcatggactttacaagatggaaataccatctgttgagggtattaaatgtgctgctgaagaatcagccatagttaattcatgtcaggcaagcttaatagggagttcttcttcttcatgcaatgttcctggttataaagtcacttcagatcaaataacagtcaaatctaaaggagccaatctatgcatttatagcttaaatgctttaaacttcaaaccattaaagaaagagactaaattatgtgggaaatcaaaaaaataagtttttcttttcaatatatagtctcactattggatactctactcccatttttcttttccctttatgtgtttgtgtgtttagttggttttagatattatatatacatatatattgatgatacatgtatagtttttggttgaagaaaaagcattgattttcccctttttcctattttggattctcagtagaaagatatgctttcactgattgtgtcaaatttacaaatatgattttgtaaggttttaaggctcaagccaaaacaatatcatttaaaggcaagcttttattattttattttttattttttatagctatggaagagttgagagtgtgatatttaggatcatggttgtaaaggcctggaatctacttgaaaagtaatgaaatttcattaattactttaatatcaattaaggaaacaacaactaaaacttttaatgtaaaacttttatgtcaacattcaaactctttcaaacataatacagatgacagagaagtgagaactcagagtaaagtatttaatagtaataataattaagacaagcagcattttaaacaaagacaaactatttgcaaaccattttacttttacattttgctcaagaaaccttttcttttcttcattttattatagtgattgatgagaagtaaaactagtgatgatttcttggaatgttttcatggctgg

SEQ ID NO: 66628 - DNA, 751 bp, Cannabis sativa
acacttttagcttctcatttttaattaacattgctatttggtgtgtccaacactatattgtggtacctaataattaatcagccgttccttattatttattaaattaaaatttatatgacccgattttacaatataccaataataatatatcacttattgtaatgcttgacaccttaaggtgacccttaacatttctctttgctcaatcgcttattattaaagaataaatgtataaatacttaaccttccatatgctagtgaagttgggacttaggagtattaatccatggcttgcataaggctagatttggcctataacgttaccaataccatggtgagtcgttaattacatggtaaatctatccgcttaaagattattggaatattattaaaagggtgttcataccttaagggcattcctaatcattgtttacacttcaagaagatagagagtatagatcaaaatattaagctggttggctatgtgattctgactatgttgggaatttttataagagaatagatactacaaaagttgttaaggaaggaggtgatttagttaaatggactaggagcaaatttactttttaaaaaatttacttttattattcacaaattttattgtaattaaaagtaaaaattcttatagtaagaacggaaacatagagaaaatataggagaccaaaatataaaaataaaaattaatggaggccaatatataaatttatatagaagaataaaaagaattaca

SEQ ID NO: 66629 - DNA, 608 bp, Cannabis sativa
attgttagatttaaggactattataaaatttaattcaattttactaattcagtgattatttaagtactaaatcatgatcattagactttgatccaccaaatgatacccctcaaactttaacatgtaccaaattatgccccctgaacatttatttaggttagactttccttactaaaattggacaaaagtcctcaaatccaacaatctcaatagtgtaagggaaatttttaatcaccttaaaattcagtgagcatgatttagtacatgttaaagttcaggggcaaaaattttaattagccttaaatttatagctacatgtatcgcatcaagataaagccaccaaagaaacactataataataaaagaaaaaaaacaaaaatctgctcacactgcttaaaaaaatgaaaaaaatggtttgataaatttaattaaaacactataatattttttgtgtactaaaatatatttacttatttaatatatattacttaaaataaaaaggaattttgaaataaatatatattataataaagtaaataatactttaatatttaattttttttttaaaaaaatatattatatgcattactgttgacggtaaaaactcg

SEQ ID NO: 66630 - DNA, 2482 bp, Cannabis sativa
tgtttgctcttgggaattatcatattagagtactttcattgactactctattctatcttttaaaatactttactaatttttttttattctactttaaatttttatataacaccatacattaactaatttattttttctctatataatttaaattataatttttttaatatattttattcatttaatttattttatatatttattaatataaataatgtaaaggaatgaaaagaaaacaacaacaaataataataaaaaaaaattagttaagatgtaaaacttacctaaatgtaaagatgtactattcatgagctaaaatattaagatattatagcttatttattggaagagtttttttaagagttattttgagatatattttagctttgtagttattatacagtgctttagtttcaagtaggaaactcttgagtttttacccaacaactagcctaatcctaattgacttcctagattggactgtacagaaaggtttctcttctgtggaataatagttttgggaaatttaaaaaattcatctgattttttccctttatttttcaaaaaaaaaaaaaaaaaaagttacacaagccaattattgccaacacagttgtattacagtataaactattacaatgattaaagcaaaaaattaaagttatattccataagtttgtgcaaggtaatttcctccctcaacttataattaatggaacataaaaggaagtatacttatcttttgtttcctcatacagacaaaactgttgaaaagaaaataagagataaagacagaacacagtgcattaatagtagcaaatgaataactactgtaatcatcttctttccaatacaatctttactatagtctataaagacatacatggaatgaggaatgggcttcaaaattaccaaaaaacaccaacaagagtggtattggtattggtattggtagtattagtgggagcctgggaagaaatgaagaaaagcaaagatgatgtatatagtatatagagaaggttaatcatggggtagcattgaaagtgtcaagattcttgtagaaagagagtcttgtcctgtattaatcattatatctactttctcttttacaaaaacataagtgggtttgaacaatgaagccatactatacaagtgaaaataaataaataaataattaaattaacacaaaaaaaaaaaaaaagagggatttcctttctagttggtaagcagtcagtatttgcctggccctgccgacaggatcggcaatgtttccaccgaattcagtaagcaaaaggcaacgaaaggtaaaattagaactaactcaaaatataaactactatatactatacacaaaaactcttttgtattaactattttattttcatgcttttgtcacatatggcaaacacttgatatttttctactgttccagatgagattatagaaggtggggaaaatctaatcttctttattggggaggatatgggatcctatggtaagagggtataattatgttttaggttattgaaaactctataacatcaactttagaggtgtaacaacacaaagcaagtatgatagtatttaccaaacttgggagtttttctctttgctactataaggaattaaatgatgaccaaccaataactctccacgttattttgtcatgcatatacatataatcctcacacctcaccctatttcttcctatctttttctcaactgtgttatgtgtcattgatgaagaaaaataaaatgtcaaaatggatttaaatgtttcaccagccagaaccagatcactctagccaaagtgaatttcttaaaagttttgtttttttttattcttaataaagaattaaaaggggcattagtacatattacatatatgttgcattagattaacaagttgtgtgtgcattggtttcgaacactttgttacatcaatttttatggcaaaaaaaaaaaaaaaaatagtgattctttacagaactgctaaaaccaccaacctgttacaattagtcaaaattagtagccgaaataaacatgcagaattgtttgaaattcgttgcaatatccctttcaaccatcttatgtgcctcctcaagccgacaaacctccttgcttcagctttgcccaagacttttttagcaatcatgtaaagactaatttgataatcctgcaaaaataaaattcaatttacgacgttggaattaaaatattcacgaaagggccccaaactcaagagttaaaaatattacaaaaattggaatgttttaaatgacaagttaccaaagatgatgggacactatagccaagataattaagcatatgaaatgaaaaataggaaggagaaagagagtaatgagaggcaaaggtcccacactatacctctcactttctattgaccatgacaaccacgaaaaaaaaaaaaagaagatgaagaagaagaaaaaaaactgagatggacatcctctctttcattgtg

SEQ ID NO: 66631 - DNA, 1067 bp, Cannabis sativa
aataataaaataatatatatgaaaaaaaaaaattagatttttaataaaaattatgttaaaacacaaaattttaaagctaaaaaaaaattataagaagcccatatggagtcggttatttcataataaccgacattataaggtctttatttttaacccctacaaccttgtctaaaaaagtgtttgtagcagatttcgttaaaactaatgctgaaagatcttaaaacttgtctctaaagttcaattttatagtagtgcttatagctggaatgtcatatgagtaatccagggtgcttgtagttgtaggtttactaaatagcaaaatgaagaattgaagaaactaaggcaaagaaagtaaaccataagagttataaattatatctgatattggaggttttaccacagatggtttaatcaaagtttgaaccttcaagaatggctgtagtagtgtttggagatacttctgaaagctttggcaatagtctaaatggacagaaagagtttcctaaccatgaatgtttaagagataattaatgcttttctttctctttccatatattttatctttagtttcatcaacacgggaatttatccgtaaagctaaatattattttgaatcttatgatttgcaaaagttattaattagactctctattttgttaaataacaaaatagacctcgtattttctaaaattgtagaaataggacctggactgattttttgtcaaaataaaacttaataataatatgatttagagatgttatgacaaaactagttatattttttatatctgttcgtgttagaaattatcttaaagttgattatattaaaaaaaaaattattaaaaattaagctcaaagtcctatttttacccttttgaaaaatataaggtcaattttgtcatttatcaaaacaaattgtctaattaataatttttacaaaacacagagtacaaaattttacacatctataaattaattatagcctataggttttaaaacaatgatgttcttttctctaggccataagtacaatgatgttagttccctcaataattataaatatttag

SEQ ID NO: 66632 - DNA, 633 bp, Cannabis sativa
aattccaggaaagaactctcattgggagggagggggcttgataagggccgcctcctcgcccgattgaaaattttcctacacctgaatttcaataaccatgtcccctttagcagatcgtagcttcccattcgcaagacccaatccagtagccacatccgagagttcgaccccggcggagggactcactctagtcgatcgcctttgatgaatcctaggataagactgcccctttttcctccctctcttcttcttctccgaactagcgttcccaggggttatagtctgttttccttcagtaaacaccatagatcccccgtccaaggagaggaagaagtcaaaggttccacttgggccgagaaaaggacatgtgtcacactcccacaagccttcctctttttattattactacacggcccaacatcaacactagcaggtgaaatcaaagtcttaagttttccattggattgggccagcccagtggaaatagaagagcccagtaaaagctcagccaatttctcaaccttatctgagttgggcctaggaaggataacgggctcaggatgttgatgaggtgtcctggacttgcaaatagcttcatggggcaaatctaccatttgggccgcagttgggccc

SEQ ID NO: 66633 - DNA, 806 bp, Cannabis sativa
tacgaattgggcttcaacaacccataaatataggagattagctttagttatttacctattcttggggactaattaacatgttattttcttattaatcgaatgtgtaacatataggtcatatatcttcattttaaaggatatcaacctactatctcttgtatgctctctcctatataaagagcactaaactaaacttaaaatatttaagtcttaagctctgaagttctatgatctaagttctagactcttaagttctgaaaccctagctctccctctcttctacatgccaagacactaagtctccctcatctcatctacttgagattttcctcttattctcactattgtagtcttaagagaaccactcttaaatccacaatatttgtgatctaagtggtgttatctctaatatcaatataaaagacagtaggttattacccgctaactaaaggggttgaacctatataaaaaataatgtatcctttttgtttgcttgttctaattgtgtacacgtggtgatttcaatcataaatacgacttcactatcggttggccaaatttgaggtgaacaataacaaaattaatatttcaccaaatttgtaggaataaatgtaacaaaaatataatgtatagtatttaatttgttaaaaaaaattatatgggatataattggataaaataaaaaacataaaatatttataccgctaatatctatatgtatataacaagattgagttagaggaacttaaagtatatataaatatatatacattaaatatattcaattaatttcaactgcatatatt

SEQ ID NO: 66634 - DNA, 1438 bp, Cannabis sativa
catgtgtgcctcagtgatcttggatggaggactcacccttctggcacctaaggcacctttccttctgtgaggaactgctttagtgagctcctcagtgacgtagtctactccttcgaccaagactttgccctccgcagtcaccggctccccggcctcgttataccctccaaagtttggaggttcagcctcctcttcctcctcagcctcagaagggctgctaggacggacgtcatcctgctcctcaatctcctggacttcaatgtccccctcgtgatctccctcctcctagacgggcagatcttgttcgtcgttcggtaatgtggcgacctgggccacatgagtatcagatgcattgacctttcgcattgtttgctttgttcgggccatcatcctactgttggacggacactggtgcgaatgtcgggccgccgtgacattatgaacaacaattggaatgccaaagttcaccgaacttggtcggtcaggagaaagagtgtcagcaacacctagccagacaatgtatgttcagttggacagcagataacgcctccaacctttcttcaattcccaaatgaagcggtcgtacccctctctggcgatctgctcggagtaatagtggtgttgcactacgggttcttgggtaggagaacattcactactgaccccccattcttcaaagctcgaattagaaagttcgtcacttgaagaggacggactggcatgaagacgagggtgatccttgtacagaatttgaagcacatcctggtcaattcgttgtttgcttccccaaaactcaccaagcttcatctacaaaagaaaacacacgagatgagtgtttgtttgggatatcgaacaataaaaggggaactatgccgaccaagagtgcctaacagattaaaagaatgaaaaatgtccaaaaataagtcaaaaccaagaagcttgaaatttttgggtttgggttaaagttcttgaagcttcgaatgagctaggtgaaagacgaacaatgtgagatcaaaggcaagcgtcataaaccgtgaagctatacagattattacagcgaaaacacaaagttttaagcctagattttctatctatcttctacaaacaagtcaaaaacgcatgtataaaaccctaaaattaaacatgcagagttaaaagagaagaagactgaaaacttactcactgttcgacgtctaagtccagtcgagattgggctgctcggatgcttttggtagaaatctcacggcagacttgaagtaaaaaccctttttgctgtgagttttgtttagtgaagaaattggtaaaagtaaagttatgaagaaaactcaaccctatttataggctgagaagtgaaaaaggcaatcattttaaatgcctttagatgcatcggttccctcccaaaagaaaatattgggaaatcaaatgtaatcaagtgtaa

SEQ ID NO: 66635 - DNA, 1038 bp, Cannabis sativa
tttttttttcaaaataattctaagaaaaaatttgggcagcacctccccttaattttctacttcccaaaaattcacaatcactcaaataaacccaacaataacacaatacaattccattaagcccaatatcacaacaaatccacaaaatatgcactataccacccaaaatttataataagtaaatcaaattccttaatatggtaggaagtgatacttacaaacccaaagaagcttttactccacctccattgttgaatgtccttgaaagcttgaggttgaagatgaagaattatggtattttcggatttgggattgtattggtgatttttgggatgatttttgttggaaagtgtaaattgatgagtgaaattaggtttttagatggattgggattgagaaattggattgaagatgaaagaattgaagatttggggaataaaatttgaaatttttgaatgaaaaggggttcgggtcggctgagagaagaagaaagaatttgaaattggtgtagggttgaatgggggggggggaaattggggtatttatagaaaaatcgtaagctggtcgcgacttgcccaaaggctggtcgcgactagcttaaattcaaaatttagaggtttctggaaaagtggttggtcgcgactagggtcatgacttggaaaaagggtcgcgactattaaaggcccaagtcgcgaccactgtaaccaaaaaaaaaaatggtggtttctgtaaaaccccaagtcgcgaccagggtcggaaaaagggtgacccaggaacctggtggtcgcgactactgggttcctagatccaaaaataaaaactttttttttcacgtttttcacgattcaactggaaaaaatttaatgtctggtacttaactaaaaaatttaaaatataagaaatactaaaacataaactaggaacataaccaaaaagtctgaaaaatgaatgaaaacacttgggttgcctcccaagagcgttgtctttatcgtcatatagccggacgctgagctgtatctagagaggcgccagaataat

SEQ ID NO: 66636 - DNA, 880 bp, Cannabis sativa
tattttctgttattgttatttttttactacaatcataccaacttaagcgtcaaagtccctttggctgacaccccaccggtgctcccaattgaacttttgtctctctttttgttcttaacaggttgcttgtgcctgaattacgtaattgtagatttcacccactatagtggaggattaggatcgatataggtattcttattcactaaagtcacaaaaaggggaataaatttatctcgcttcttttaaagcattgataaatataaacttagacgcttatcattacttataactttaaattgatacattaaccctttcatgtacttgtaattcacttctagtttcaagtcatactgtactttgtcaaccaccaactcattgtacaaaagctcaaccagtagtgagtaggttatgttcttattaatctcgaatgtcaaacattctgctctattaaaaaccaaatctctatcctcacactcctaaataccattatacattaagaatgcgaacacagttgaccctgtcaccgcaaaaaaaaggctaaaataattgctaaaaatgtgtaatatcgaacacaattggcctgtaattgtactcaaagaataatatttaaaacttatcgtaccaacatcgaaaaactattgaactacatcgtgcttaatagacaagtgttaactatcatgccaaaattggacgaccatcgacctatatcaaacacatcaccctaacctctaaactcaacaaaccattgggcagttatcttacagacaccaaacacaattgtgacatcacctctaacctctaaacagaataaaccaacggacccctatagtgaagactgttggaaattattttacctggatgttagatctactcacaagta

SEQ ID NO: 66637 - DNA, 1014 bp, Cannabis sativa
aaatagaaatattcctactaatagagctatcaatttctcatcttggtaaacttcctctaagaacattaatagtgacttccgaatcactttcaactatcacaaaattatagtcaaaagctactaatgtctctaaagcaagtaaacaagtagctacttcatcaatgaggaggtctaaaaacgaaaaattgttaacaactatccacacaaaagagcccatatggtcatgagtcacagctatcacacacatggtcttcctctcattcctcacgtcacaattgattttagtccagtgaccacccgatcacagtaagatccatatgctataagagaatagattaggcataatctgtataaaaatgattaatagagtcaatataatattgtatgctagttatattgttgttatatactttatcgttgtgagtttctcaaatcgtgtcaacaacaataaatgcatagtaatagacgtcgtttctgagcaccaatttgttgtagttgtagctacaataatctgcatgcagatcactacagctaccccatcactatttttttattttaatttttataaaattgtatttaaattgaagttgaatgtgtggttcttatggacatggtagcattagattgaattcttaatgtttaggactctctatggttgaaataaattatttatcagtagtatcgttatttctacaagagacatacttttttcaaataattttggatcattagtagatgatgttgcagtttgagttgattaatgtgattgcacataaattaattgcacatattctttggatggatgaataattacatttagtggttggaagactttctatattgtattttatttgggattcttagttctttagttaatattaggttgtcgtacatgctttcattattcaatgatattactcattttaaaacaaaaatcaagaatatataataatttttacatcttcaacatagtaattttttattttgtttggtgaaaaccaccccttcattttt

SEQ ID NO: 66638 - DNA, 789 bp, Cannabis sativa
  modified_base (75)..(77): a, c, t, g, unknown or other
gtgggattcttgcacccgattcttatgaaggggaaccttctgaggctttctttttgacaagtgtccggagggggnnnctttccagcggttaggggaccccattcccttttttgacttagggtttggtttggggcctgactgctagattttttcaatctttttcagaactaagatgtctgcatccggttctaaatctttaaagaaagaagtgaaacgcttggccaccctggaggaagttatgaagggtccggtggcccaggaggggcacaagtctggtgccaacgtgtgggaagcggctgagcttcgttctaccctgacctgccctcaccagctggaacatatcgtggtggtggccagtatcaagcccataacctctgggacctaccaccggccgcctcgagacgcggagatgcctaatcacaactacaagggcttcggagcctggagccaaatgcacttgatggccgaggccatacttccccttcaagattattttatcaatttccttgtatttgccgcccttgcgccataccaacttattgcgcaagcttaccgcctgctttaaggcttatttattttttactctgcccggagctggggctcgcccagtccggcagagattttatatttttatgaactcgtttccatccctaaaaagggagataagtttaaggacggctttttgttaggctatttttagcctatattttggatcgttttatggtgcgtttttcactatgttgggacaaaattacgcctgttttctatgttttcaggttctttggaata

SEQ ID NO: 66639 - DNA, 1736 bp, Cannabis sativa
  modified_base (1530)..(1535): a, c, t, g, unknown or other
taatattatattccatattttcaaaaacattatctaacaatttgtaactattgggttgtcatttattttttgatttgttcaaggaagaatgggacaaataacacacgtagataaagactgactgggccccatcaggcccattaaaaatttcagggcccaatttatattccatttcttttttctccttactttttctatataataataataataacatgatgatgtaataataaaaaaggccacaactgtttattatttaacaattttttttttcctgaaacggatattatctaacaatttggaaatatatcattatattgtgttgtcaattttttttaacacttgtcagcaacaccaagataaagactaaactttatgcctagactcattaaaaatttaagtaatttacaacataaatatttaaatctaatatataattaaaaataaataatttaatttaatttaacgataataatatatttttgactgttaaaattttatttaaattaaaaaaattaataacaaaattattatgtgaccattacttaatagttagacgcatttaaaaatttttaaaataaaattttattattacatttagaaattaaattagattgaccgagtaataaacactgtaaattattctaaaaattccaaggcctaattattacatttttaatttaattatttccctactttttctaaataattcttttttttttttaaatcaagctaaacttaaattaaatcaaatggaaaatcgaagtatcaaaattatcaaacacaaataaaagaaattaaataaaataaaaatgaagagatcagaaatagaaacctgtgtaaacgcaagtgacataaaggagagcttctcttggaccatccatggcttctcgaggtgaagcgtaaccaggtccagccttacaacacgatgaagttccattgctctgcatcttccctgactcggccatttttttcacagctttctctctctaaaactctcaacagagtactttctctctctactcggccaagaagaagaagatcgtgagtaataataactgtaattttgtctttttatatatgaagatgagtttgctgacgtggcagatttgggagaaagaattttgtctaggtgggatgaatctgtaatttcataagctgattttatctgacggtggtggatgatgacacgtggatggtggagatggattaagagtcgggtgatgacagaattatgggagatgatgtccgaggtttacgagagactgaaaactctttttttatttatttaaaagtaatttataacataaaaatgtttaaatttaattattatttagataaataattaagtttaatttttaataataataataagtttttttttatgttagagatccgtaatattataagtcaaattattatttatgtgctattattttattagaatatttaatttttatataacaaataaaaatttaattacatagataaatcaagaactgtcactctaaaattattattattattatnnnnnntattattattattattatcttcattatactatagaagattgtaggtgagacgtgatgattctttggtgttattattttaatgtatgaaattaaagagatatgatattataataaattataattataattaaaattattatactatttattttattttatttttttttgacaaagtgattaaaatcactcgtgaatttacga

SEQ ID NO: 66640 - DNA, 767 bp, Cannabis sativa
agcttcactggtggagcttaaattattatagatgggtttttacatccttctaaaataattcctccaccccagagtaaccaccatctctaatagattatgagtcggcgtagataaaataattttaatatacacccctatcatctaacatatagatcactttcaaagattctattgtcttctaatgttcattgtttaattacatcttagatggctcccactcaacagtaggagtctggttaagttcgtacactagtcctcttacaattggttcttagggacatcttgttgtgacatattatcttagtctgaaaactataagttccttctagactaagttaacaacatagcactctagtataaacattagtgtaaaatacttgcttaagattaagtaatcattatagataccataaaacatttcatatggactagggatttcgctaagtcatttgaatagacttaacaaaattttctatcttatcctcataattccgataagttattgctatccatatgaatggttagatttactttctcagttttattctaaagttcctgtcacggtcataacatagtaggctatcactagtgtcatccaaattatgatgggctagaattttaaaattctcccactaagataaggtactatgatactatttctaagaacttcatttgtatcatttctattacaacagtaacaagtgaattcgaacaattacatgatcaagtataagttctaatggtttgctaatttgtttattatatta

SEQ ID NO: 66641 - DNA, 651 bp, Cannabis sativa
gtgggcatgtgggaaatagaaaagaagtgggtggacacgtgagaaatttggcgagaagtaggtaacgattttttattgtgctcttatattcaacggtttaaaaccctcgcctatactataggcgacggttttaaacataggtgacggttttaaaccgttacttatatgggcccaataaattttacgaatttcaattaaaaccgtcgcctattcctgtaattactgttataaaccgtcgtgaattctaatttttcttgacgattttaaacatataatttttttagcaacggtcccttaaaaaaagtgcttttaaaaccgtcgtgaattctgacttttgtagtaaatacttaagtagtaatgtgactattttaactaattattttaattgaaaaaaaatgggaaaaaaaaaaaaaattgaaacattaccaaatcattgattttgcgtaatattttggacacacacaaaggactgataatttgttttccaactcattgatattaatttgcatgctagcaggattaaaatataaaatagaccaaatatatattgggaaaattacatgtgaatacgtgtttgtccatttaattttaataataacgtgatgtgtgaaattattgatattactgttattttataccttctttttaatt

SEQ ID NO: 66642 - DNA, 1392 bp, Cannabis sativa
cagtgtggtttttacagttttaaggtcttgtggtgcagttacagtttgagaaattacaaaaattacatatatagtttggtttaaatccacaccagccgtacctcaaacacccttagtacaaattcacttgaaacaatattattgtatttgtgaaagactcttacttttatcattaaaacaacttattaggatttgcctccttcaataggtgccacatcaatacctttaatcctaattggctaagtggctagttatgttagttggttcttacactacttaacctaactaacaacttatgcctatataaaaagaattccacacaccaagacttagattaagactgcaactagatgaatctaaacttagtcgagatgcatctctacttacaataattttgtctaagaaattaagtgattgagagttgtaaatacgacacttgtgtgtttgatcaagtattcctcagtgtgaggtttgtttataattagtgttaatcaccacagtcttcatgcgtgtgttgtaatctcagattgtattggtgttgatcatattcaataaaattcatcattttgagtaaagtttttctaacattttaaattttctggttttatagtttataattggttaaatgtggtgctctttgttaatgttattgttcgggacataagtgaaataattcactacaaataatatcagaccgcagggactagagttcaagaaatgcaatcaacaaatgatttgaggtggacagattcactagatcaaatgatttcagtttaaggagaattaaaataaaggtatttttagttcaccaaggaatctatgtggcacttgatgcagaagttatgagattgatagaagaaaaaaagaagaaacttgagattgaacccaagacacataatgccattctcctgaatcttggtgatgatgttttgagagaagttgatgatgaagataatgctttgggactttggaacaaatttgtttcaaactacatgaagaaatcccttgctaacaaattgtatctcaagaaaaaattgtatacactttgaatggatgaatctaaagagatgaggaattatcttgatgattacaacatataactctggacttgaactatcttaggggtgaaaatagatgataaagatcaggctatcattctgttgagttcacttccaaaggtgtatgaatattttgttgatacaatcgtatatggcaaagaaatgttgaccacgacaaagtttaaggctggattgaatttaaaagaaattcaaaagaaagaaaatgagaaaggtgttgacgctgaaaagcgatcaactaatctgtacaatctgattagcagtaacagccaacaaatgtatgaacagacagtaaaaagagaacaccacaattata

SEQ ID NO: 66643 - DNA, 1365 bp, Cannabis sativa
  modified_base (211)..(214): a, c, t, g, unknown or other
cacaaaacccaacaagaacatcaatcaaaggccaagttttggctgactttctaattgaagggataatctcaaaagaagacccatttgtcaagcacgatactgaaacttggaaattatgtgtagatggggctttgaatgagaatggctcagggtcatgagtcataatgatgtcgcctgacaactttaaatttcactacgcattaagattccnnnntgatacttcaaacaacgaagcagaatatgaagctttgttggctggcttgagaatagttgaagtactaaaagttaggaatcttaaatgctatagtgactcgcaattgattgtgaatcatattctaggtgaatgctaggcgaaaggattaaggatggaaaaatatttagagaagtttcagaagaacttggagaaatttgattattttaagattgaacaaattccaagagagcaaaacttaaatgcccatgcactagtaaatttggcctcgcaaaatgaacttgacaagttgaatctagtaccggtcgaagttttgaacaacccaagcatatgtgaaaaggaaaaaattgagatgatagacgccttgccaacatgaatgacacccatagtcaaatatctagtcaatggagaactttctacagacaaaactgaggcacgtaaactcttgtattcactgcctctcttacgatgtgtgttaccgacaaaagttagtgaaataatcaaagaaattcatgagagattttgtggagaccatgcaggttggcaaaattttgttaaagaaaattatctatcaaggatactattggccaacaataaataaagatagacatcaatttgttaagagatgcgacaaatatcagaagttttcacatatacctcatgtaccaccaacataattgagaatgatgacctcgccatacctatttgtaatatggtgaattgatctgaatgggggattaccaacagggtgaggaagagcaaagtacgcagtagtaacagtcgacttctttacaaaatggatagagactgaacctctagtttccgtaacttgtaaaaaagttctcgatttcgttataaagaatatcatttgcagttttggaatacaaattaaaaacgtatctgataatggaactcagttttacgacgatttgttcactacattctgtgaaaggaataagattaactaaagcttctcgtcagtatcgagacctcaagcaaacggacaattagaagctgttagtaaaacattaaaagataatattaagaagaagttggacgctgctaaaggaagatgggtagatgaactaccacaagtactttgggctcacagaaccacaaagaaaacagtgacgagacacattccattctcttta

SEQ ID NO: 66644 - DNA, 500 bp, Cannabis sativa
atggaagcctaactgctttgagcatatcacagctgctcggacatgggaatcatggagtggtgtaaagatgaactggggtttcggaactgagggctctaagaatctgagattagttggtgtggatccgaggacagaagtgaatgacgatgtgtttggtgtgaaaagtgttgtgacgactggaactgaaagctcagaattaattgagacgcattcaatgaaatttttagcagtacttgaattggctgaggttgccaatgaataataagtttggagaaaaagaagagaatatagtagcagtttgtgtactgctagggatggtgattttgaaatcatgttaacgtatatatcttctaacaagcttgattttgctctccttcttatagacaattgtgtcagtttacataattgtatatttatatattgaagagagaaatgtcggtgagtcaaagttaaattggtaggttgattagatgagagtagagatagaaaattatcatttt

SEQ ID NO: 66645 - DNA, 636 bp, Cannabis sativa
cattctttgttttttaattactttcttgcaagaactataacatagaattttttttattgctcaagtttattactaagttagctacacaattatctatcatcatcattttcgcctttgttcaattttttttccctctaattgtatattgaaataattgcaggtgatgaaaaagactcattattatatagttgatacaagtgttgtcactcctggtgctgctgtttcagacttgcaattcaagatcatagatgaagatccattcactgttcaagggttaaaggtcagacttcaaattttctgcttaattatattatcttatgaagtatgttcttttttaaaaaataaaataaataaacctttatcttaaaaaaactgctcttataatttaatattttgtgaattccaaaaaacaaaattgtagatagtgaatattcttatggagagcaaaggaaagtttgagagaacaaagagaagccaaaacttaaaatataaatatgtactggaattcagtaaatccttccagtgttgttgccttggtggaactgatttacaactcgactacattttttcttttcggtttatcagctgtctggccagctttggttatttctagttcaatttgcatgcgttctatat

SEQ ID NO: 66646 - DNA, 1036 bp, Cannabis sativa
atcagttagttttaaaattaaattgctttatttttaatcgacatataaagaatattgcttcgtacaccgtttttctcttttctataataaaattattattacttaataaaatatactcattattttatgaatattacttttaataatcttttcaaaatttaaatatatttcaataattattaaatgaaaacatgtacaaaagtattagtcaaataaagaaaaaatagatcaaaatataatatattaaataccaacctctaaatcaccctcttttttgacctttttcccttgaattcctagtttgtctgtttaaaacacaatttatatgactttaaattttctttcttaaaaaataaaaaaaatgattacaaaacaattttttcatactaattttgtataaaatccgaaagaataaattaaaccgtaccagtctctctaataatattaaagatgttatattattattagtacaatttaaaaaaaaatacaaactactcctaagatatcacctcatactaatattagataccactaatgcttaataacaatgctcggagaatcaaaacaaaactcgtaccttgattaacagcaataacatgtttgttgctaagcaaacttaaggtaacattgtccattgccctaatatcacacccaactagtaaaggagcctacaaacaagtacaattctctcttattaaaaataaaaaaatattagatatttaattatatatattatttgtagtttattatatgatggatattttttatggtaaaataaatcaagcccttaaatattagataaataataataccttaacgagcgcccaaatgctaaaatgcgcacgatactcttctgttgtcattccaccgtttcccacttcaagcatatcgggatctgcttaaattaattaattattcattaaacttaattacataaattactatttttgacaaaatttttatacttttatgtttaatttttttctttataaaaataacaaaaaaacaacaaaacaacataaaaaaataatataca

SEQ ID NO: 66647 - DNA, 1135 bp, Cannabis sativa
caattaaaaaataaagaagaaatcagttcctaaaacattaaaacataaattaaaaacaaaactagtttcacaacaaaataacttatagcacattatacctcataaaatcggttataaatttttttttaaaaaaaagtgaggatcaatccaaaaaatatcgaggtaaaatatgaaaagaactggttttataacataatgaataattcaaatcggttataattaaaaatagaaccgattctataacataataaataaaacacaaataacacagaataactcaaatcagttataattaaaattgaaccggttttataacaaaataaataaatacaaaataactcaaaccagatataaataaaataaaactcgttctataacaatattataatgaataaaaacaaataacatgacatgactcaaaccaattattattaaaatagaattggttctataacataatgaataaaaacaaataatacataataactcaaaatggttataattgaaaaacaacgaggaaatcagctcctaaacacactgaaacataaattaaaaataaaacttaatccacaacaaaataagtataaacgaataacacataattctcataaaatcgattataatttttttttaaaaaaaaaaaaaaaaaagtggtgatcaatttcaaaaatactaaaggataaatataaataaatttaattccataataaaataaataaaaacaaatattaccacacaataactcaaaatataatataaaaaaactggttatatttatcaactagttaaaaatttgaaacaaaaaaattgattccgtaaagcaaccaagataaaaatttacacacaaaaatcaattaaataaaataaataaattaaaaaatggttacttgaatcaactaaatcaaaaattggttctcaaaataactaaattaaaaacaagttccttaaattaataaaatcaaaagtcgatttctgaaataaaaattcaagaaccgatttctaaaataacttaaataaaaagctaactgcgacaaaaataaaaaacaaccggtttcacaacaaaataattaaaaataaataacacacaataacacttgcgattataaaacagctatagattaagtatgattgtttt

SEQ ID NO: 66648 - DNA, 558 bp, Cannabis sativa
tcagagtagctaacagagagaaatctactctcaaacttccatgattgacaggttagaacaccatgaatgccatggttcataaccttcaggagcagcagtcctttactctctccttctcgatacaattctctctctctcactttctcactctgattcttccttttcttctattacaaaatgattacaagatagagtttatatagattagataacagctcattaaactaagcctctaaccaactgacagttcaaactgacataactgtcacaactaactaactctaaccaactttaactaacagtcacaactgaaagtaacaacaagattttgttttctatgaattacaccacagtaactgaaaattaaatatgaatattaatgccgcaaattggtctatttatttattatttattttttcttacaatatccaaatcgtgggtcgaacgtctattcatttcaaccatacaatatacttaaccaacaccacatgatctgtatggaccatttcatttatagaaatgaatatcacttacctacctcataacaatgctgtatat

SEQ ID NO: 66649 - DNA, 1105 bp, Cannabis sativa
caatctgacaataaaaaatatgttgttaataaaaattcctctacattacaccatcaaagattatggaacaatctccataaatagaataaatattagtaaatagtgaggatattcaatacacttgattttactaattttatttagagcttgtgtggtttgcattaaggaaaagtataccaattgttagactattatataatatgaacaataaaacgtatatgaacgatatgtaatgcaaaaaaaactacaaacatatcacaatcatatatgcgatgaaaggatcgaaatacctccagtcattgatgtttgagcttcagtccctgtgatagcttcgatatgagaatttgggcttcctcgctctcttaactatctttagatagaattttgctatttgcacagaatgcatggtgagctcagggactgagacgctatatttatatatgtgagaccttccattaaggtccctgccataattaattgttagaatattttgataatcaattttggaaattaaattgggtaactaaaatatttggtagttaaatctgaccataattagaatattttaattgattagtaaataattaattatattttataaatcaaatcaaataaaatatttgatttattaccatataaaaattattctaataataactgattagtaaattttatattatttattaatttaaaatatataacacacaatattaaaatgtgaaaattacaactaatggtacaaaatcaaataaactaaattttaaacaatcaaacaattaacaatggaaaaattaacaaatacaagcagtaatcggaggaaaaatagggatgaacaaagtatgaacaaccaaaagcaactaaagcagtaaaacaataaaatcaacagcaagatatatactggttcaagtccaatagatcgatatgatctatgactctactccagttttggaacaccaccaaattctctttattgattgagcaagaacatgtacaatacagtcgagatcgattctctgatgagttctctcaaagtgtgtaatacgctagaattaagaaatagattagcgaaaccctaattagataattatgaataattgaggaatta

SEQ ID NO: 66650 - DNA, 510 bp, Cannabis sativa
tcacactgaaagatatttcaggcctggtaatcgtcaggtattgaagggcaccaactatggaccgatagagctgaggattagtaactggttcgccctcatatgcagatagcttgagagtactaatcatgggtgtaggaacaggtttagccccctccatttgggctttaaccaagagatctcttatatatttggcctgtgacagatgtagcccattcgaagtatgctgaacttcgattcccagaaaatagttcagctgaccaagatttttcagagagaactgggaattcagatcactgataagagtagagatgagagaagtgtcactaccagtgatgattatatcatcaacatacacaaggattagagtaatggaggatgatgtatgcttgagaaacaaactttgatcagacttggagggattgaaacccgagattggcaagacaagtatggagcttttcaaaccaagcacgaggggcttgcttaagcccgtataatgctttgtgaagtttg

SEQ ID NO: 66651 - DNA, 956 bp, Cannabis sativa
aactcaaaattttagtccctattctgctattttttcatcactgagttactcatcggagttcacgtctctatgtctttcaagccattttcaggcgagcttaggcatcaccatgagatctttcagagtcggagttgaagtcggagttgctcgtttccgatccagccaccttcggaccccatggaggtaaacaattttaatcttgtgctacggttgacatgggtttcatcagatctggtttgtggtttttttttttggttttatttgttttatattttaaaggttctgattcagatttgaaaaaaatgtaatgatggtaatgggtttctatgatttcaggggtggtgatttcagtggttgtttttttagatttgatattcttgtttttaatttaatttgggtttttgtttgatttttgtgagatttagatcttgaataatcgtgataaatgtggtgtgtataattgtttgtttgtgctataagatatgggattgtgtttgagtcatggtggaggtggcagtaacattgatggtggttgcggtggtggtggcggtgggtggtggtgatagtttaaaggtggttttggtggtggtgatatggtttgaaagagtatgaagaagaagaaaagtcagaaaaaaaaagaaacaaaaagaattttcttttatatatttaatgattttttaaaattttaattaatttttttgtctttcaaaaaaaatttaaattatttacgtgggccaataatattgtgccacgtatacattatgtccatgtgtacaatccattatagtagttaacactcaaatttggatggaagttgtaaagtgctaacagtatcatagttttgggggttttaccgcccaaatttaggttttgggggttaattgtgttgcaattaattttaccaggatcttaatctactcacaagtatgttgattaacaatctaaatatgaacttc

SEQ ID NO: 66652 - DNA, 1791 bp, Cannabis sativa
aatatataaaaaaatttatttttacagtgtattatagttataatgagattattttgtttgtgtgtttgttttatagtttatttataattaatctcgttattttttaactttttactaaataaaatttatttttataattttaaaattttacaacaatatttttataattaaaaataaaacataaaaaaaaaaaaaagtatttttaaaaatttcccattttaaatttctttaagcattttctcagtagaaatattttctccccattttctcatttaccaaacaactctttttattttcttcttcccaaccccaactttctctctaaattttgatttccctccactttctttcctgacaaacaaaaggttaaaccatagacgcagacgatgctcattgtggagaagcaaccaaagagagtgtactctagggaggctatggaggctttgaggtttgccgacatggatgaacacaggaagaagatgtggaaccatgtcctaacggagctcagttctgacggcattaatatcttacgaagctctcagaatcataatgaaattcaaaccacctctgataatcagcagcaaagcattggagaagatgatgagtctcctacaattctcggttagtactgaatataaatatatatatactgattttaagactatgaatgaaaattatgaaatgaaatttttgcttgtatctgtgatagtggatgaagtagttaatactcgtgggggagaaggaactaagaagatttactcaagggaggttatggaggcattgaggtttgttaacgcgaaggaaaagaggaaactatggaagagtgttttgaatgggcttgatcctgttgtgcagaaggaatatattaacctagctagctctaagaatcataagaaatctggaaagaaggaagaatctcctccaattctcagtaagtagtagtgaatttttctaaattgaattcttgggtggaatggattatggatatgtataaatgtttgattgaaattcttgattctgtattctgtttattatgtcttaagcatacctgattcactgattggtaaagattatggcatttgggtttaagattttatgaaagatatagggaatactttgatctttacatgtacctgtttgatgttgaatttattagctatttatttatttcatgggctatttccaaacctagacaatattcccgaggctcattcgaaggaaaagggcaatggattattgagtttggagagaactggaagtgatgctgcttgcagctctgtagttggggatggagacaaccatccaattgttgaaggagattacagtgaagatgatgatagtgatgaggattatgctagcattcagagacctgcatttgcggtccaaggagagcccaactttgattctggtcctccagaagatggacttgagtatcttaggcgtgtaaggtataatttactactctcctgtcctttttcactgattgttgatattatagtgccctgacatcaacacttttattaatttagtaggagaagaattcccatttagaatccatacaaataaaagagaaatgttgacttagagttaattagagtaggcattcccttgctgcactgatagaaatgatttgattttggaatattcttgatctatagtttaaagttcacataagccaagtatcaggtttgaacatatatttttggaaacccaaatagtttgttacaattatctgcttacatatagaagttcttatttttcattaaaaaaaaaagcatgtattacagaaac

SEQ ID NO: 66653 - DNA, 2229 bp, Cannabis sativa
tgtcttaaaaaagaaaatacttgctaagcattccttaataatcatatttgttggggaggggggcttcttgtccactttttttttcctcgtgtttcaattcgtctagtgatatacatatatatatatattattctttttagaaagaaactaaatttgtattgatgatgaagaacactaaaatgaaaatctacaatgtttatatatatataatttttcagctgattggaaaataataagaacaataattatttaaggtgaaagagaaaaaaaatatgtacttgacaaaagagttatgtctagaaactaatttatttctttctccgatctctctaagataaaaacacttatagaaaaatctaaaaaggactcctgaaaaaagtcatcactcgtcattttattttgtgccaaacaaaatttataagtattccgctatgttggcttgttgcttttagccctccctatgtcttcccctatgttgatggttgagtgttgccttaatgtttctctaataggtgtaaaaggagtgtactcatcaaagacaatggaaggtgctgctgagttcttaagccaatatgctagctgccttagttcaaggtacagctttgtgtgcttttccccttgcattttcaagttatgttaatattaattgtttttatttggaattcatattcctaatgtctaagctattgttgctaatatgccttgtgcttatttggcaatgaaactaatctaaaattaatccagaatttgtttttgaatgctcttctaacccttgtcccttgccagttaaaaaaagttgtcttcacatgatcaaggaaaatgcatttctgttgaattgataaaagacaattgttattcttttttttatttatttttctaaaaaaaaaaagacaatggttattggttgcagaaagagaatgatatgtagtaattatttgacatggtaacaggaaatggattgttttcctgatcaatttagcatctgcgacaaagcagcagtcatttagtagagctgggttgatgggccttgctgaatgcattgctgcagttgctagcagagttacacatgataatgaaagtgaagcagaaagagatgatatgtttgctgaaatggcacatctggaatgtaactcggagagttttcttcaaaatgacaaaattgttttactgaatgctttgcggtttaccattgaaagcagcaaacaacacttcaatcctaattatcgccttcgaggtctcaaatcattgattgatggattatagttctcgtttgcagctcagtattctcattataaattaaaaccaagagaactaacaatatatcttctttcttataactccagtttgtgagaaagtccttgaagccggtgcttctgttgtgtgtacatttgacgtgcctcttgaaatactattgcactttatttcaactgtgccacgagattttactgattatggtggtaagtctgatgttatagcaacttaattttcaccttcccatttcgatatccacagttcctggcatgtgtttatatataagtatatgctgatatcgctcacttttacttgtgggtacttcaaacattattcaatgaaacagaaatgagccaaactgaacattattcaatgaaatagttaggataatacgtcattggaacttttttgttgaaaatctaggctcatctcatgtaatgttctggtttagactaggagattagttcacatctcattgctctgcattttgaaccaaatatagattttagatttgtttaatgcgagatcaggctctaatgtatcaatacatcacagtttttcataaaaaaaatgttatatcattctttagcttgtccatctgttttctggttactctacctgtctctactctacgaaaagaaatgaaacatttcctgttatggtatttgaggcaagttcttgtcaaaaaagaaaaaagaaaaagaaatgaaacaatataacatagaagaacatgggcgatttttccttcatattaacagtagttagagaaaatggtaattattccaggatattgtgtttgaatgtttatatgattattgctctgtgcaatgtcaacaaagttccaatcttactctttggacttcacaaggtatgactctataaaatggtggccatagacttatcatatcatcttccatattacatgtgttggatgttctcctcccctgctttttcgggggtgtctaatacatctactca

SEQ ID NO: 66654 - DNA, 695 bp, Cannabis sativa
taaaacttcaaattgagaaaatttttacagtcaccaattgcccaatgctcatttaaaattcattttttgatttatacaatgatatttttagaataagtaaatctactaataaacagtaattcacaaagtaacaattaacaattaatctcaattaaaaaaaattacaaaaatatgattaactgacagtattaaacaatggtgaatttacaacatatacatattacattttttttttcattagtttcaacattaattatataaatagatagatttagttttttaaaaaataaaagataaaaagacaaagaagaaaaaactaactaactactaataataactacactctcaatcataaaaattgagatatgaatatatatgattgatggtggctagtagtctagtagatcaaatataacaaaaatatagatatggaagtaaaaataataaacaatatagatacatataatgaacaaagagtaaatatcaaatacataccttccattaatcgttgataaattttactcagaaaattccaatgaatgatattattctccaattaagaaaactaaaaatatagatgatagcaaaatatatctaatgtcctttctctcaattctcataaacaattgtgatttttgatgttgatgaaaagcttaaaattgaatatatatatatatatatgggtatacttttaa

SEQ ID NO: 66655 - DNA, 762 bp, Cannabis sativa
aatttgtcataagagatgaaatttaaaatgggatgtgaggtagaatactcacaaatgtagtcttggaagatggggtgaacgaatgaccgtctgaccagatgttgtggtgatgttggattcacttgtaggggtgggaataatcgctggtggtggcggtaattcagcaggaatagtggcaggagtagccacatgttcgggcggcggtggagggtttataggcccagggaccgcaacctttaaaggagcctgtgaaagaccactaggtgaaccattagtgttggaaaaaaatgcatcaatattatcattagaacatgtatttttaagaggaaaaatatgttcataaaaaatgacatctctagagtgaaatatttgatgtgtttcaagatcaagtagagtataagctttcataccaaccgggtatccaatgaatgcacaagcccaagatctcagggaaaatttatgccttgatctgtccaaagtgaaagcatatgcaaggcaaccaaaggtccggagatgatcataagagggcaacctattatacaacaacttaaaagaagacttaaggttaagtaaaacagatggtgtgcgatttagtaagtaaacagcggtattaataaagtaactccaatacccaagagatagacgagattgaaatgcaagagagcgagcaacatttagtatatgttgatgcttgcattcaacaacagaattttgttgaggtctttctacacaagaatgataaggaacaatgcctttagttgt

SEQ ID NO: 66656 - DNA, 704 bp, Cannabis sativa
agctgtgattgggcagagcaagatgtcgttttgttcagcagtaactgagcgacgtataccattgacaatagagccacaaatagcatgatcggtagtataaagaaccgagaaataatcaattattacctgatcaagacctgaattccagcctctccaaacaccatcactatcctgaagttggacaatttgattatttcgtttacgagagcttgtggtggcatgaaaatatttgctatttttgtcccctccatttaaccaaaattattttgatcgttcttccaatagagttcttgctgaggtaaaatctcaaaataattacatttctcattcaaaaagtcttcatatgagtctggattgtcacgagacttgaggcttgatagttttttcttactattagacagccgcttcttgaagtgcccagtaagatcacgaccccaatcaagtaaagtttcaagacaaagcttagttttatcagtaagagggagatgagcattaacctcccaccagtttcggacaatttggctacataaaggttcacggccccaagcattttcataacgaaaaataacaaccggttttactcataacaacaggtgcgggttcaaggaaaataggagtatgatcggaggacgaaaaatcaaaatttgacaaacgagcctcattaaaaatagttagccaagactgagtagcaaaagctttgtcta

SEQ ID NO: 66657 - DNA, 2551 bp, Cannabis sativa
aagttgaaaaatactacttttttttaatcaattaatcaaatttacctctaatttcatatttaattgaaatatacctctttttatatgtattgtacctaaaatagcctgacataaaagagttatatatagagagtatattgaagtgacatgggcaaaattgatacaatatttaaaaaaaagaggtaaaaataataaactttaagaaagagggtaaaaataaaagagaacaatataaaaagagtatagagtgtaatttaatatacattgtcgacccaactcacttgattttttcgttcgcaagaaacccacgatttacaagtctactagactactatattattcttggccaatataaataaaatattagtaatattcataattttatattatagaataacataatctaagaagaaatagaaaactctatatctcaaacttaaataccaaataccactacatagattcccaatctcacaataaccaagatttttgttagtacaagatctctcattctttcttatgataaatgtggttatgtaagagaatagttggtttaattatttttttttttttgttaaaattaatatcgttaaatcaatcaattaattatatttaaaaaataattttaaatatttaaatttatttttaacatataaattaaataattatttaaaagtaatagcaaaattaaatgattacattttatataaatcttaatttaaatgtaatgaattaaagttaatttaattaattaatcatactttataacaaatttattagttatatatggtttaaaatatataaacttatttacttattttgttttgtaataatttaattagatatatttttataaataaatttaaaattatgttaaattttatatattcaaaaaaatatataattaaataattgcattagatttaattttttattattatttaaattaacaattagataaaaataattctaatacaactctaagtaaatatgcattagatggtactaaataatacttagtaatatgtatatttatatatatatatatatatatatttatatgtacaaattgtgggagttctactacctccaactttgagcttcagcaataggttgtaaactgcacttttgaatattgatatccaaaattgttttgatggttatgaaaatttggtagcaattttcagtggttttgacttttaatcactgttatttttgggataagcctatcaattcaaaagcacaaataaaattgttaaaaaaaaaaaagacaaggagaagttttcttattaatttctctttaaaaaaataaaacgaaaaattaactcaaatgaatggcaccaattaaattccatttggtaataaggaaaagaaaatggcaccaagaaaaagaaaactcgtcaaccaaataatacgtacactgttttggtattaagatatttgagcaaaagaagagtactatagaatagatagtgacatgttttaattttatctcttaccaaacaaacaaccaaagcaacatgccactaccaacaaaggcaccaagtgctgatttgctgtggaacataattatatttttcttttattaattttatatgctttttaaagaaatagaaaataataataataatcataataataggcagtggatgcgatttggtttcttttgtatagacagaaacattatcactaataacatatcaatcccaatcttaatcacatattgactcttgtcttgtcttaacctaatttaaattttaccaacacgtcatacaaacaaggaataatatattagtatgattaatattattagtgatttgtgtactattaacatatcataattggatatctacgatgtgacaactaattaatagagaagaaaatgagaggctaataattgaaacactactgtttactcacatataaaaccactttgcatttttattggatatctacatatatatcagttaacaacattaacttatattaatatatatttatatacatttatagtgcatatatataccatccatattaagatacgtgtttgtatgcaaaaaaatttacctgttactttcaccgagaagacttttcttagagtcatttgagtgggaaaccacgtaagtattataatatagatctacttaattacttgcttgataattttgttaataaatataacactaaccaaatatggcatccttctcacacttcacgactgcatgtaaacaacgtcatattttgtctttgtcttttgcctatacttatataatgccttgttctgtttgccaatgctgcatatcactaattataggattacggaaattaagtccaatactttaactattattatatataaggtatataatggtctaacttctaagtattccaaattttagcagtataagtactcaatatatttgtagggatacgattttgttccgttattgtacttttacggaatattaatgtattccgtaatgtacgacagccgttggatgggaaagttatttgatctgaaggctagggttaatctaagagtaattagggt

SEQ ID NO: 66658 - DNA, 1071 bp, Cannabis sativa
  modified_base (587)..(601): a, c, t, g, unknown or other
ctgtggttgttctctaaaatacaattcaatctgcaaatatcattttaatattttcgtgtgattttctataattaatatgtaatacgtgtatatacattctaaaaaattttacttttaagtaaaaatattgtgattaattattaatcaatattcttatgttgtgactaaaagtcagtgactataatttttgtgattaaaattaaattagttactacttgtatttaaatactatattttagtcataagtaatttttttgttatgactaaatatcacatttagccacaaaaaatttatgttatgattaaaaagttgtcactaaaagtagctattttttgtactgataatacaataaatattttatattcattggatttggtcacaattaattggttgatattttatgtatggtcagattaccatttactaaatatttgatttttcgatttaatttcctaaattaatggacaaatattgacaattaatttgggcatagaccatgatggaaggtctaacctatataaatatagggtcttgatcttcgacctcactactcattctatgaaacacagtaaatctatctaaagannnnnnnnnnnnnnnttggaagcccgattacccacactaattagtttcctttttctttgcagatccaaagcttatgtaggattgaagctcaaagaattattggctggaagtattttgattatatatatatgtttgatttaattttgcatttcatacatgataaaatatatttcatatcattcatataaatttttaacagttagtatcaaaacaaaagtatgtacctcgattatttgagttttctatatatatatgggtatatatatatatatatggaagatatacatatatggttacaataaagtatgtaatcattgaaatctctttcatatatataactctcaattttaattcatttaacattttgttgttaaaattattataatcattcaatactaatattttacatgcattataaagattgtttatttatatatggaacatttcttaatgggtattacctatgaatagttactaaacaaatt

SEQ ID NO: 66659 - DNA, 639 bp, Cannabis sativa
atgatattgaacaagaagagtcaaatgaaggggcttacgaattggggtatttctattgcagggaaaacttctctggagacaatacagcccaggggaaactctgcaacaaataaagaacagataattcttcttcttatttatttatttcttttaaataaagactagaaagaaacagaaaatagaaaaagtgattaatctgcagaagtttttagatcgtgtgtaggttagttcactcacgatttgtttgaatcatcaaatatgaaattgttagccaccaagttcctgtacaaagttgtttgaatcatatcctattcggtaactaataatctaagcatcagaaatgtagaaaaaacagaagaagacatacagttgtgatattgagcctaaccatctcggtaaaggccctgataagaaattgtaagacagatctctgaagacattgcagtatataaataacaatcagttgaaaataattctcaaaaaatgcagaattgacaaaagtaaaaaatgcttagtttttagataattctactctacatatttcttttattttccttgattaattagcaactgcatattttgaataaatcaaatggaagatacaatgattgcttcaagtgccagaagtataacacttgt

SEQ ID NO: 66660 - DNA, 1369 bp, Cannabis sativa
  modified_base (271)..(291): a, c, t, g, unknown or other
agctttcccaacgacattcaaatgtcgttattgataccttcatttttaatgaggacttttaggcgttggtaatagtggcgttggtattgaccataattcttgtagtgagattcggtctcaaatcttgttattactctgcgatagaaaggaacaagggttagagatctaagaaaataaatgagtcatattattccactgcgatcaatgtaagattttctaaactcttatgtgtttaatttcattgtattaaaaaattcatatttaggatgtnnnnnnnnnnnnnnnnnnnnnaaatctagatcttggtaaaaataaattccaacagcatgatgatgggacgagaggagtactactcacaggctccatgcaaaccgtaggaaaaacccaagttccactcaccgactctcgagaaaggatgaataagagaatgaaagagctagaagcagagatgtaggatttgcgtcgaaagatggctacaacatcaaagagaaattcagaggatgatgagttcgacgaaaagtcccctttcttaagggaaattcaaatggaaccacttccacccaatttctaggagccttccatgacgccatatgatggtacaagtgatccaaagtacatataagagcttttaatgagctaatgaagatgaaaaaggtatcatgcaaggcaaggtgctaatgctttgtggttacacttaaatggatcacatataagtggttcaagagggttggactaggagcaattacatcctagaaataattttgggaggaattccttcaatagcatcaagcggcgagtgattacattgtgcatgtaacgagtatcaccaatataaaagcaaggggagaaagaatgcttaaagagatacatccaacactttaatgctgaagttgccaaagtaggaaggatgtccaacgatgaacataagtttatcatagctgctggaatacaccctgggagtagattatggaggaatttgttgaaaaggaattatgattgcattgaagacttctacgagagagcaaaaaaaggcatttgtgtcaaggaaggaaacagagtgtaagagacggacacaagcaattgtactttgggaagctcatcagacccttacatggtccattagacagtactattcccattgctcgtaagtggttgcatccaagtgaattctctgctatacaacctataaaaataaatatccaagatattcctctaagtaaagtcccactatatatgcgagaagaagttcctagcgatagtaagtacgcttttagtgtgttgcaattaattaaagaaggcactcatgttggcctttgagtcaaagtgaatgacgttacacacttgggggcaaaaaaaaagaaaaaaagaa

SEQ ID NO: 66661 - DNA, 749 bp, Cannabis sativa
catttacaagaaacaacctagtaccactaggcactattgcaatgctctataaaaaaaaaaaaattgttttaggacactcatatagtgcttagcacttttgtgagttctacttataattaatacaatttaatatcgaatctcacttattttaatttaataataagattatataaaactcttaaatagtaataaggcactacctcatagttgtgctagctaaggagcttggtgtcccgtagctgtcatcatagtagcacaccatgaggtgatgatctataaataattaaccgttttttataatctttattaaaagatttatatggactgcatgtccccaaactatataataagttttagtaagttggtctctaaatttgattttttgacaaattaatccccaaactataaacatttgggcaagtttatttccaaattttattttttggtaaattagtccctaaactttgatcattttattagtaacgttaagtcctcactcttagatattgatttttttttttttgtttattttacttatttttaattttttttgttaaattcaaataattattttttaagtatttgtatagtatttgctttctcaataaaatatttaaaatatattttattcatatatattattaataagataaaaaagcataaacattcacaaacccatataatgcctagaagaaattctagatcttcacgttttttatattttaacatttatagtatattttattatt

SEQ ID NO: 66662 - DNA, 1281 bp, Cannabis sativa
caaacatgcactaagtctccttcgcacctgttagagaattgattgttaatctagttaaagtaattgttaggcttttctttctgttgatcttgttaacgggttggtaagtttaaattaatcgattttgctttttgagcattatcttttcttttctcgtaatagatcacattgtccaatttatctcttctcccttagaaaaaaaaaaaaagcaaagcaggaagtgatgctgcaaaacatctttgactttagttggtaaagaatttgaccatttatgtgaaatttttggttagttgaggtgaataattaacttttttagcactagccttgatcattttcaaaatagtttgatttgttattatattacactatatagtgtagagacttagtcacaggctgatcaaccctttaagacatctgaatcaatagataaagaaaaactccaaattcaaagatatttcctaaacaattgctctcaatgaatatgaaagccacagttacttgtctttatatgatgaacatttttttatttgtaattttttatgacatatatatttctttgttttattaaaagtttgtacctggtcatattcaatgacacatgtacaactactcttaaattaaagaaaaataaagcttttgaagctttcttaggagcatgaaaattatttttataagtttttctatattttcttgaaattaagtaccggaacaaaagtatattttccacccttaaattccactcatatataattttatggatcatattatattattttaaattatcatgatatatatagagagagttttttcttttagtacggtggtcaatatatattaatggctttgtaaaagtagcctataatctgtgaaaactacatattaaccaaccaatctcatcaatatcaactatatatataatgcaaaattgaaatgtggattaatatgatttgtacagacatttcttattaagtaacttaaagggatattatagttatttcaaagtaattaagtaatgtttattagtttatctatttttttttttttatttgtagatcttacattataatgctgtatgtataaaagagatataattaagaagattgattttttaaagctctcgtatatgcagaccagttcttattaggccttggtcatattaattcccatatatataaataaacaaaagtagtgaagaaagaaaccatcattaataataatggtaagcaatattttcatattattcatatatattatatgataggaaaattaagatgtagagca

SEQ ID NO: 66663 - DNA, 942 bp, Cannabis sativa
accagaaccaaccggtcgaccgattctggcagaccagaaaaccttgggttttcttcctcaatttcgacccaaacctcctccaacgtaaccaaacattccagaacagtgtaatatcataaacataacatgtcctaagcttcaaaatacagtaatgcaatctttaagtcaaaatcacatgctcgagtgaaagaaatttaacttttagcctcgtcaaacacatttcaaaccaagcagccctagaaacctctcaaaacaatctccaacatactcaaaaacctagcctaaacacaactcaaactcagtctaatccctacaaccacagaaacacaaaaccctaaccttaaactaactaaaaattcatagaattcacaatctataaggtgtaaacttacctcaattacgtctaggttgatcttaggttgaagaatctgctccaaaagcaaaagaaaatggtgaggaaggtctctctttgtaaagaccgcttaagtttaatatgctgagttattaaataattagagtttattcataagatttaactattatttgaaatatacatattgtggagatttattcaaagtttaatatataataattatgctatatgtgaatctctcattttctgtaattgtgttcggtagcggtagaaagtgacgttgggccattagagagtcacattttgtatgttgtagaattttattaatagcggggtgtcattgttaggttttggaaattgtcggaagttgggtttgaccattttgcccttgagcagtatggttgcttttgttttatgttaagggcatattggtcttttaccttgagggattttgtcattttatgggattattagttgttgtaggtttattgattaaaataggagaaaagggattaattttaaagatataacctaaaaacacatttcctctctctctatctctctctctc

SEQ ID NO: 66664 - DNA, 897 bp, Cannabis sativa
  modified_base (273)..(273): a, c, t, g, unknown or other
tttgttttgtctgtataggtagagatatatagtaactgaagtaatgttggagtagtaagcatacatgacagattatcaaaccccaacatagatcacagattggatttcttacagcaatagacaaatacacacattattaatttattaacaatatatatatatatatatacaaaaaatattcaacatagccttagttgtcacccccatcctcatgtttcttctattatagaccaatatattgaagtggaccatatatgtataaatatatatatntatatatatataattcattattattatgagattgattttgatgaagtttaagtagctatacttaaggtcttctttgatagatttatgaagttttgagaaatgttaacatttatcttcattgtgattgagtccatttcaaaaaaaaaaaaaaaaaagattgagttctgttctgtaataatatgatgttttttttgtattgtcaatttttcattcaattgttgatgtttgtggtatttttctaaattgttggggttttagatctaatttggtaaatttaatgaggtttgatataattctcataacttggaaactgttaggcaatatcagaaaacgacatgaatctcaagaaacgacaacaataatattttgttagtgaaaaatggaagaggaaaacgacaatgttatacttaaaaacgacaatcttataaagtcggaatcggaaacgactgaaaaatagttacgcaaaagaaaaatcatcgaacgacatgaatctctggaaacgacagaaaaccaattttgctctaaaaaacgacaacaatttttttgttgacaataaaaacgacaacaaattttacaagcacaatttcacgaagaaaaaaaggtcagctattatgcgctaataga

SEQ ID NO: 66665 - DNA, 796 bp, Cannabis sativa
  modified_base (706)..(716): a, c, t, g, unknown or other
acacatcaatatcagaccaaacctcattccactatgagtctatgactagtctaaaatcataaaaatagaaagaaaaataaaataaaaaaaattattacccccacattaccctacagttctaaaccaattaaagaacaaaaagtttaaaccaccaaatttcttttacctaccccaatagataaaaaaaacaaaaaacatttcactaaaattagtgatatgaatttgaatttgacaataagtgaaaaatcaaatcacgaaaagaaatggtgtaatattagcttcctacacaattcacccatgatatattaaaatgtagaaaagaaaagtagtaaaaagttcacctgataccaaactaatatatatatatatatacatatacatatacatatggatataattttgtcatgttattgtactttcacggattataatccgtgatatacggcaaccgtcagatgagtgagttatttgatctgacggctgagattgatctaggagtaattagggttaaaaaatagaaacgtaccctggtactcatttaatgtaacctgagacccatgtcatgtaccacggaatacattccgtgaaagtacatcacgagacaaaatcatattcctatatatatatataaatatttattacaatatatcactacaaaaaatatctattgatatatttttagacacaacataatttttttgtgacnnnnnnnnnnntttagtcacaataaaaagttacttataactaaaatatagaatttagatacaagttattactaatttacttttagtcacaa

SEQ ID NO: 66666 - DNA, 1798 bp, Cannabis sativa
  modified_base (57)..(69): a, c, t, g, unknown or other
  modified_base (1606)..(1608): a, c, t, g, unknown or other
taaaaaaagagataaaaataataggatttaaaaaagagggtaaaaataaaagaggannnnnnnnnnnnngtatagagtgtaatttcctccatttttttcaagtctcactcctgctaaagcttaagctaagacgggataggcccgcacctaaggcccacccggctaaaaaaaaatattttctatttaaaattatacatattttttaataatttttaaaaatacaacatatttttctaaataaaggactcaataattttaattctcctaagacccaactaatcttgttggagatgttttaagaaatactctgttttcttgataatgaaagaaatagttgaagcctcctaaaacaaagtcacataaacaagattttctcctattttagagttctaatcttctaagacagaaaaaccactcacaaccatttcaaattttaaggaacctttacagccttactaactataagtagtgattagtgcctattttatctatattttgaacacttaatgaaaccatttatgcaaaagtaatgataagatgtaaaccccacttgtatttgtgagagtgagacactaggaatgaataatccaagaaaaacaaaaaaaaaaaagtatatgatgaagcaaaattgattatattattatgccatttgttgaaaaatattatgttttgaagattcaaaaaaaaaaaaaaatcttataacaaatcaaaatcaatcgatcaaaacctatcatagaaggaactcaaaaattcacaaacaaaattcaaacttttcacatttgggggcttaaaaaagaaaaagattcaatttttaattgaagaagagaaatgggggtagcaaagtaccgtcttgagttgaccaaatcgattcgaatcagataaaaattctctcatagcagcagtcctgggatggtgcatccacatggtaccatccatgagctgaaccccattggattcgcaagcttcaacgatggtatcgaactcagaggcattaagggccacaggcttctcaagcaaaatgtgctttttcttcttggctgcgagaacagcccaatggaggtggagactggtcggaaggggaatatagacgacgtcgatttcagggtcgtcgagtaaggaatcatatgagccgtagatcttggcgtgagaagggaaaccgttggatgaggcgaaagctttggccttttcgatcgtacggctggcgacggcgtagaggtcggcgtttggagcgagtattatggcacgtgagagtttccgggctatttcggcacaacccaaaatgccgaatcggattggggtttcttctgttgatgccatttgtgggaaagtgagagagtgagtgagtgatgatgagactgtgaaaagagtgtgtttattggtgaaaaatggaatggaatggagagtagtttagctttgtggtccaaaaaggattggtgctatttataatgatattttcatattgagaaatgctaaaaaaaagtactaacggtgcctagcactctaagtatgtgtcaatatcgttattggttcaattaaatatcgggttccacataatttaatatagggaaattactccttacactgttttttaacttttttttttcannnttacggtttgggtttctaaagtggatgcaccattagttgtaatagggatttttgtacgattttttgttgcaatttatgttgcagggttagttgcaataggggattctatgtagaattctgtaaaaatgcaaaaaaaaactgttttgaggtgtaaaaatgaaaaagcctacagtagaacctctatccaaga

SEQ ID NO: 66667 - DNA, 1281 bp, Cannabis sativa
gattgttgactgcagtttgcctttccaatcttgagcactctttaggggttgcaatcagaaaggggaggatgcgggtttgaccccgagggaagtgcaccctcgtgttattctatctcatgctttgggttgttcctgtttggcattatgctattgtctcgatcatgttgtctagttctttgaggttttctctttttgtaggtcatcgagtattttttttcttactttctatgtaataaatgtatttttcaccctatcttctgtgatcaatgttagctatgtgtcttttcttgttgacatttctaaactgtgtcagtgtgggataaagttgttttggccatgcattttctctgtgagttctgtgcgactttgttttagcttgacctttaaggacttgttcctcttgttgaatgtaattcattaaaaaaaaataatttgaaaattaatgaaataaaaatagagtaatttgtacataaatacctaagtttaactcccaattataaataaatacttaagtttaatttttgacggtaataatacctaagttatattttttgaactctatagatacctgaccattaaataataagtcattatccatataattttcttattggtatatttaaattaattatttttttaaaaaataaaaatttaatgacttggaccaatcaggcattgccacgtgacaatttacttaacacttaatagccaggtacctacaaaaatttcagaattataacttagctatcattatcgctaaaaattaaacttagctatttatttacaaagttaaacttaagtatttatgccacaaatctatatatattaataaaggagaagtatgaggcggtgatgtgacactctacaattgctttgaaactatttttctctactttctttaattctctcatttttttaatttttttattaactttataaatattaattgcttaattatttaaaaaacatatttaataccctaaatatcttctaattaccatcactaaatctatatattcaacatttgtttttttttttttaaaaaatatacgtataaagttataaacaatagatcatttaaagattataaatttcaagtgatagtatacaatgctttttcctttcattgtcttgccaaatttgagatatgtgattttatttattgatctcatgattttttcacacttattcataaattttcaatattattttcttttattaaatctcttaattttggttgagttttcaataattttttttacttatagcatttaacaatta

SEQ ID NO: 66668 - DNA, 897 bp, Cannabis sativa
aaatttacaaaaatacttaaagtttggttaattttttacaaaaatattatcacatggattttttttttccaaagtactgtgtttttataaaacaacaatgaaacacaaagcagaacaactaaaaataatagtaaaactactaaaaaacaaccgtagaataacaatgaaaatttaatacagtacacaacataaaatttacacattatttttgaaaaaaaaaacatagtatttttagaaaaaattcagccccacaatataaaagtaaaaaagttaaaagtttaagtatgtggtacttaaaatattctacaattccatgatataggtagtgacgtaaaccataacccaacaacaattaacaaagaatatttacaaatttacctcatttcgtaaaattggggttctaacccttaaattcataaaatttcaccaaccaaacgcgtttaattaaaactcaacattatcatagtttaaaaaataattctatctttaaattatttaatctaatatacatttaaagaatcaaaatcccaaagaaaaacaatcatattttcaccaagaaaaatacttaataaacataataatgagagaactcccctcattatgatgatgaaagaagttaacgaagaggatagaatgaccaatctaaaattttaaaatttttgtttgaataatttgtggcttaaatacttaaatacttaatacttaaatacttaagtttaactcccagttgtaaataaatacataagcttaatttttggtggtaataatacctaagtcataattttgaaactcatgtgtaggtacctagttaaataaattgtcacgtgacaaattctaattagtccaaatcattaaatttttattttaaaaaaattagttcaaatataccaataagaa

SEQ ID NO: 66669 - DNA, 1208 bp, Cannabis sativa
aactcgggactcgatctcgcacccagaccaatcccttgaccttaactgggatttagaccttgacatggacatgaacctacacccagaccgaataccgacccagacccagaccgggatcgaaacacgggacctggaccaggacccagacccagtccctgacctgaacctaggacctagacccacgacccaaacctagacccggactctcactttgacccagactgggattcgaaaaacccgtacccagactcgaactaagactcggaccccgaccccaacctagacacagacccgaacccagaaccaaactcagacccaaaattagaactggaactatgactaggactcgaacctaagaccaaaaccgaaaccaaaccgtaaccctaactcagaccagaacctggactgagaccttgactaggactgggacctgagaccttagacccaaacttggactgggactgggacctgacttggtcctaaaccctcactgagacctgagacccgcgacccagaccaggatccagaccctaacaaggacccgaacctgaactcgaaccaagactgagatcgagacttggacccaaatccagaccgggacatggactaaaaccaagactcaggatccaaacccgaacctagaccccgaccaggttgtaggaacgggacatggataggggacttagaccccgaaaccaagacccagatctgaatccaagactaaaacccaaactaggacctcacctggacccaggaatccaaagttttaacccagtcccagacccaaaaccttccctggacccaaactaggacaagaacatagacacgaacccacaccaggttgaaacccaaactcggacccgaacccaaaatcgaacccaaaccggggacccgaacttagatccaggctcagaatcacacccaaacctaaacctgcacccgaacccgaactcgaacccaaacccaaattggaacctaggacttagactcaaaaataaacacggactcagatcgagatcgaaacctggtactcagacgcgaacctggacccacacccaagacactaacccatacacggagcccgatccagacctaaacttagacttagattcagacccgaacccaaactcagacacatattcgaaccccgactcaaactcgaaccaaactccaactcataattgcaactaaaattggaaccggactag

SEQ ID NO: 66670 - DNA, 1142 bp, Cannabis sativa
  modified_base (238)..(246): a, c, t, g, unknown or other
aggggccctaatcaattcagcttcgctcctgaccagctcggatccgcccttcggctgttcaggcttgtccgagctccctcctcgagagtctttggacttagtcacttttggggcagaagggcccacgatggttggctcctcagagaggtcaataactgcttcggcggcgccctctctctggacggggttgtctcaccgctcttggatatcttggccggaggagataagcccgagcttnnnnnnnnnctcttctttagagcttcgagcatcgtctgagacatgtctgcatgaaataaaactaacataataagaagatgctcgaagctctaaagaagatgaaagcataataatcaagaaagttaaaagcaagacggagtatattgcacttcgaaagaaatgtttgcccgagcaagacctgatggctcatcatcatcgaacgagtctctttgatcctctaggatgactttcccctttcctactacaggagtggatggccgagcaggcagacaaggctccctgatctgaatcgtatgttcgataggcctgggctcggccggaagtttcttcttccttttgagcagggtcacctcagcctcatctccttgctcaagaggctcatgagcatactgttttgctcttgcacctcccttcaacttagcttcacccttaagttgaataagctcatccttctgatgagttccctcagctcgactagccctggatttcctcttcttctccttcacaggctggggaatgaaatctttccggtagagcccgtattccacaaagttgatctctgaggtcaacaaagtgatattccgggtagacccaaaagttgagtgagtcttggagctctatccctgagagcaagcgtgatgggtggacagtgatatataggaatctactggaactgagtataggtggtacaaggcaaaaatgctactaggggaaaactattaagtcatcttcttaaacaaaggatgagaggagaagctgataaacttgagaaagactatcttcgtatagcctgagaaagatcatatacacgtagctcggagaaagaccgactacacatagttgagaaagaccggctacatgtagagagccttgatctctgaatagacctcattctcctcatcaga

SEQ ID NO: 66671 - DNA, 974 bp, Cannabis sativa
attaattttaaaatttcgtctcccaccgtaaatttctctaatttctactgtaataagtgtgggtatgtttgacaaagcccaaaatgagaaacccaattatgataacagaccctcttcttctatcactcaacccggtttcatccaaagtcacaggctcatagcacaacttctctctccatcacccgtcctctctctaccgttaatatctctagaaagattatcaacctccttcactaattgatcggagagtaggaattctgtttccgttgtcgatctcgggtttagcaccacctgcgcttcactcattggttccgggtaaacaattacttcacacacaggtacggttgtatctcttcttgttttttttttgttttttgttttttaaaatatatatatataattgtttctgttttgcaaagttcataacaaatgttaggacttcaaggacgccgaatccaattggagttattcttacatatgagaacgtaaaattgaaaggaatataattatggaacttttcattgtaaaaatctttaagtaagaatatgatacatgctttggtaaggaagagtgttgtgaagctttagttttgacaagctaacatagtaacttcataataagaaaaaataaagaccttataactacatatatatatttatataagaaaaaaaaaaaatgatgtgattgagaatcactgaagcatctgatgttggttgtagctgtttagtctttattcttagttctttatctgatttcgtattgccactaatgttgagtgttctgtgtgtgtgtgctcagtaacagaagacaaaagtggaggtcttgatttcaagagcaaccaacacatttatatggttgttatggctgtgaatgtcttgacctcatgtagtttgagtgtaactcgtggcttcagaaagaatgagccattgtatcccaaatcattcctaggcaatagacacagaatactggttcag

SEQ ID NO: 66672 - DNA, 823 bp, Cannabis sativa
tcgatccttattcatagtgtatatatgttttattaattctacactttatacataatcatatatgtttcagtttatacatataaatgtctaacaggttagggtttagaagctcaagataagagcttggagaagaagagcggctagggtttgaagagttgaagaaggagagaggctcgtttgctagggtttcaaagaggaaggggttttttcagctgctaggggtttcagctgaaaagattggcttgtataaccattgaaacgactgtgttttaaggaagacaagcttggtccgcacaagcttgggaaatgtcgtatttggccttaggttttctaattttgtggtttgttggtgtaggggcattttgggtattgtaatagaaaattgacaatagcactcctcttatatatttagttatatcattattttttttttatatttttaacaaatattaattaaatatttaattttgcatcaattcttgcaattatttatacatttaagtacaatattgaaaattaataaaaatatatcacaaaaatattttatgccaaaaataaaacacaattttcacatattccattaattagatataggaagaaaaaaatgatggaaatatttagggtgaaaaaaattgaaacatgtcccatccaagtaaagattatactaacactatatattaccaagttaaagatagaagaaccataagaaaaataataactcgactttattgggaccaaaaacaatctattaatagtgaacttaacaatgattgcaaaattttcatttatgtcattcttagggatcccatttccattcagtcct

SEQ ID NO: 66673 - DNA, 1453 bp, Cannabis sativa
  modified_base (93)..(100): a, c, t, g, unknown or other
  modified_base (599)..(599): a, c, t, g, unknown or other
agctatatcatccttgtaatataatatattgtatataataaaaatggtacggcaatgtcggtttttatatatttattttaataataataatannnnnnnnaataataataataataataggtaaatattatttgaaattttacattttataaaaattatttattagatattttattttattaaataacaaattaaatttattattttttaaaatagtacaaataataatctcgcctccatattttgtcataaaacctgaacccaatttctaacctagatagaggcaacaaaaataatcaatttgctataaaacctctatgtctaattattattatcatgatgtactatttttacgaaaattgttcacaatattattttgtacaaatttaaaagaaatttttatattaaaaatataaaatgctaattttattaccaaaataccactacatggttacctgaacatttatacacttttcctttagttttttacatttttaccacatgcacacacaatacatgctttttgacacgtgaatgattgatgtattacatcaatctttttatacatcatttcccttcttttttttcttttttttttnccttttattttccatttcttttcaattttttttttttaaaaatattaacttccatagctgaacacttccccttccatgatcccaactcgatttccctcttctttttgttcttcaattttttttcaactcccattaccgaatcccataactgttttccctctttttattaaatatggttgtaactcgtcattcccctattcaaaagaaaagttctaaaatggagttgaggaagatgactttgattttgctcctccatcgtcgaaacttgggcgagctcctccaaagaagaaatcaaaggtggctgcccagtaaaaaattcatcaagatgatgctcaaaaaatgatcaagatagagctggtatttgatctcaggtttgttttcggtttctttttgctttcccccccctttttgatttttttttttgtatttgacattagtgtgttttgtgtttatcaagtttactattttaggtttttcattttaacatttcttttggttttgtttggttttttagggtttctatttttttagtttaatttatttgttctttttatgggtttttcatttttcgtttgtttagtcttaatttctgtttcattttgttgtttttttctttttttgtttttgtttttccagatgttttattgttttcatttcagttttttcatttaattatttctcattttgtaatattttttcatggtttttttaatagtgtaaacaccttctgtatgtgttttttcctaatatgtttttttttgtctagttgtttcctgtccatttttatatcatcaatgggtaacaattagagttatcatggatgttgatgctcaaagagtttttcctgtatttta

SEQ ID NO: 66674 - DNA, 1040 bp, Cannabis sativa
atcaaatatatacttgtatgtatctgattaaatattttaaaaattaaattttttaaaaaattaatgtttaaaatactgccaacacaacacttttcttctacctttacccctttacagatgacacaaccatcatagtttatcaaaataataacagtaataataataatttgtggttctttaaaattacagacgaaaagtgtatttttcttttcttgttttgtttcttcaacacccatagtctttgcttatcgcgtttttgcaacaataattgtggttttttatttcatttctcttcttatttttttttctttttctttccattttgttttgaatacattagttcttcttctttactttttggtgtgcattttattatcatatagaagaagtaaaagtatgtgattttaatttgtcacttaccccaaataaagtgtgttctttagttgtttagagtgtaaatttgagattattttttatcagccaaatcagtatgtatttcattttttcttctaacatttacagtttacaatcatctggaatttaattttttattttcgttcaatctatttttttttttaaaaaaaataaaattaaagagggaaaattgttcttgtaaaaatcatatattagattggtttaagaaactagattataaagtgaagacgattagatttaatatttaagacatgaatattgtggatttcttctaaaaaagttctggggatgggttttgaatggaccacactatttttttaataattaaataatacttttaaaaagaaaaactaaataattatatatatttagtattaaaatattcttattatattaacaaaataataaaaaatataaaatttgatgtaatttttagtgttgtggttggaatagaaaaaaaaattattgatgaaatagtaattttttggtgttgatttaacactaaatttaagtttttccattggagatgcccttagcaatacatacacaaaaacatatttgtggtaataatacttaaagtattttattatcatattttaataccc

SEQ ID NO: 66675 - DNA, 814 bp, Cannabis sativa
  modified_base (735)..(737): a, c, t, g, unknown or other
acttttagccacggatcttttagtcacaacataagaatcatgatttataattagtcacaagttttgttgcgactaaaaataagattttttgtagtgatgattaatgatgcaacttacaatcagtggcagtacctcctcgagccaggatagctcatcgtctaattgaagagcatcatttgccaaaccatgagctgcacattcttatcgcgagtgacatgggaacaaaattgcccttgaaaatttcgacaataaagttataacatccttaaacagcactcccagctcattaaaaacacccttcatttgttgatagctatcaccagaaaaagcaaaattgattaaacctctctaattgggttgaaaaaataacattaagaaaaattaaaaaaaaaaaatatttggcttgaaaaaaaataaacttatctttgaagcttcttgagaaaaccaaaatcaccctttatcgaataatgagcactctcctctttataatagtaatagttgaaagagagaggatagctctccactattactattactaaatattagtaatagtgacattttaatcactaaaataaaaaaaaaataataataacatttggcttgaaaaaaaataaacttatctttaaagcttcagtcaaaaataacattttaattctcgtcaggcttgatataaatttgaacaacaactttagaataatgatttccgagcccttttcctccaacttcttttgatgnnnctttactaacaactagaccaatagcaattgtttcaggatcagcagtaacgctcttaagattaaccatttcaccaacc

SEQ ID NO: 66676 - DNA, 670 bp, Cannabis sativa
taatcaaattaccactaggctacaacacatatttagcattaaaagtattattatttattttgttattaactatattttattttatttttttctgaaatggggtcctgagcggtgagggggcctaaggcgaccgcctccttcgtcttagctcaggccgcccgtggttagcaacttagctgctctctcatgattgatcgaaccaatttttttttttttttggtattattgatttttactcggtataatatggttatatgcttagtcatatgcctactattcctatcctttataattttattaccaccagctcgagttcaacatctagaatcagtgtggtgaaaatgtatttataccaactcataattttaattgaggataaatctaagagaagagtgattaaataaatagcattattatcttttaaatatatttgaaactgatcttcatatttaatgttaatcttcattctcttcttttctgacctttcactatgcatttcgaaataactctacatagtaattaaaattaatttttgaatcattttaaattatataattatttattgaactattctcaatttaattataaaactcttaatataaaactaagtatacgtgctttaaacgtaatttttttctagtacaggataaatatctataatgtttgaata

SEQ ID NO: 66677 - DNA, 781 bp, Cannabis sativa
tgttcattctttagtaacctctatttattgggtttaagaattagggaaaattttgtagtatggtttccccttgtgtaaccggttttatctctaactcgtgaactcagccgatataaagtaagaacacgttactttttcaattggacagtttgatctgtactagatttatcatttattgatattgataagatacaatccttctatttaatgacaccttagagaatgacatagccttaaagttagtattgagttttttagtacaaggatctacattttggaaacattactattaagtactttgtacccaacaccacactgatgaggtgtgtcataagtggctaacagtttcatgtattatttattaaattaaattgtgtaggtaacgatattaaattacttcaatattgatatgtcactttttgtagtgcttgacaccttaagatgtcttttagtatttttcaaattttgattctgagtctttatgctatcaaagttctaaatagtcactaaacaataaatcgtagattaaaacccgttaatgtccaaaccacataaaactctcgtctctaaatactttattttttttaatctatataattacataaatttataggcggctaaaaatttgataaacatacacataaatctataaataatttcaaagtacaacatatattatcataaacataatttaactaaattttttttcaaaatatcaaaacacataaagaatataccgaaaaaatcttggtggtaattgtattgggttcatgtgtgaagt

SEQ ID NO: 66678 - DNA, 763 bp, Cannabis sativa
ttagttgcaacagttttaacaaactttgcaactaacttttgttctgtctgtaggttgttagaggccgaaggccacttaggtttttactgctttgtatttcttggaaattgcgatctagacagtgtatgtggggatttatttcaacaatttccacctaaatctccatatgcactgcgtattgttatctttgatgttttctgagggtcttagctcgaacccactaagggttttaccaacttgtgtcaatccccaataagcttaagcaaagcttaaacttattgagggacacaacctttttacccatgtctgatggattcacttcagtaggcactttgtctatttcaatctgcccctgtgtaaccttgtccctgataaagtgatactaaatttatctcaatgtgtttagttctgtcatggaacatttttcttcacttgtgttgtatctagaaaaatcattgatgagacattttctcggatgaatttcaaaggctggctgagtgactttaaaggctggtacaattggatcaacttgacaggttaatcgtggattcaaatgatcaacatatccatctaggctgctgttatttataacaattggcttaacaagaacatattgttgtgatatttgtcacacgcaggtgcacgtatcgtttacaagtaataggcttatcactaagagtgaggtcgatcccacgaggattgtagttgagcacattaaaattaaacttttacttctatttggttaaaaaaaaattaaaaataa

SEQ ID NO: 66679 - DNA, 627 bp, Cannabis sativa
aaaaaaaaacaaataaattaatttaaaaattaattatttaattttttttcattctcagcccgacccttattcttctctctccctttcgtcttcttcattagaacctccatagccaccatagtcagaagcttcagccatcgttttcgcttttcccactcagtatcctatctctcttgaaccctaatctcactagccccacaccatcgcatcaccccaaaattcaggtcgtcgtcctcaggttctccctttcttccctctaattaacccagtgctgccatcatcacctctcttcattaagctccacttctcttaaacccattcgaactacactacccctagatcaactggtgtcccctatttatacaatgccttgtcattcccatgcttcccttttttaccatgtccttctttctgcctatatctgaaacattctgagcaaaatagatctctagcgagaggtttaaaaatgcctcattatcgaagcctcatcctgcaatgcctccaatatgggcattttagaagttcgacaacccaatctccaattatggactttgaattaatggtggtgcaaggtgaagaaatagagaagatgttgaacaaagagcttgcaaaaagaaaaaagataaa

SEQ ID NO: 66680 - DNA, 2161 bp, Cannabis sativa
aaataaaaaattaaataaaaatagtcgttggctcttagccggagacaatgttattttaaaatatatcattgtattcgtaaaattttgggcattggaaaaagacttgtgattgagcaacattagtcttatccaatggtaccacattctcattttagcaaatatatcctctaattttatgtactatgtatcctttttttttactttatacacaaatgaacaataatatgcatgcaataattgatttcttggtttgtaggaaattaaaatatattacaaaataaaataaaaatgatcattatcataaaataggaaagtttaccaagctacaccaaataccatgcgtgtacttcaaccatttagaaaaaataataattattaatatgaataatttaaatgcaaagcatatttcaaaaaaaaaaacaaaaaaaagaaagaaagaaaacaaatacatgcacaacaataaaggaaaaaacatatacctcattaacgcctcagacacaataagacatgataaaaaaaattacttttacaatcacttttttttgaaattatatattatcacagcaagaaatttcaaagtatatatattcaatgactaatttgtaaccaatgagtaactttgataaagatcggtaactatagtgaattttgtagtagccacgccgggatgaccgaggatgaataacaaatcccacgtgtttttctaaaacgctcctaatcattatggaaatagactttcaatgacgattgataactgatagtgatgatttgtaaccaatgagtaactttgaccaagatcggttctagtcaactatagtgaatctactagtagtcacgccgggatgaccaagaatgaataacggatcgcatgtgcctttctaaaactccctaatcattatcgaaacatactttcaacgacgattgataaccgataatgatgatttgtaaccaacgagtaactttgactaagatcggttctagtcaactatagtgaatccactagtagtctcgctaggatgatcggggatgaataacggagcacacgtgccttcctaaaacgcccctattcattatggtaacggacttgcaacaacgattaataactgatagtgatgatttgtaattaacgagtaactttgaccaaaattggttctagtcaactatagtgaatccactagtagtctcgctgggatgatcaaggatgaataacggatcgcacgtgctttcctaaaatgcccccagttattatggaaatggactttcaatgacgattgataccctatagtgatgatttgcaaccaacgagtaactttgaccaagatcggttctagtcaactataatgaatccactagtagtcatgccgggataatcagggatgaataacagattgcacgtgccttcctaaaatgcccctaatcattgtggagacggacttacaatgacgattgatacccgatagtgatgatttgtaataaacaagtaactttgaccaatatcgattctagtcaactatagtgaatccactagtagtcacgacaggacgattggggatgcaaaaaggatcgcacgtgccatcctaaaatgcccatagtaattatggaaacgaacttgtaacgatgattgatacctaatagtgatgatttgtaaccaatgtgtaactttgaccaagttcggttctagtccattatagtgaatccactagtagtctcatcgagatgatcgaggatgaataatggattgcacgtgccttcctaaaacacccccagtcattttggaaacagacttgcaacgatgattgatacctgatagtgatgatttgtaaccaacgagtaactttgactaagataggttatagtcaactatagtgaatccactagtagtcacgacgggacgatcggggatgaatactagatcacacatgccatcctaaaattcccctagtcattatggaaacagacttgcaacgacgattaataaccgatagtgatgatttgtaaccaacgagtaactttgaccaagatcgattctagtcaactatagtgaatccaatagtagtctcgctgggatgattgtggatgaatagcggatcgcacgtgccttcctaaaacacccccagtcattatggaaatggacttgcaatgacgattgatacccgatagt

SEQ ID NO: 66681 - DNA, 703 bp, Cannabis sativa
gaaccctaggagttaggggatgttttctgaggtttaattaagttggtttaggcttatttgagttagatttaaaggttgattatggtgttgagcaagtttgagttcaagaactcaaacttggctcaattatggtggattgtgtgtttttgtgttatataccttgttttaccacttggaaatggtttattatgttgattataggtattccagaacttatggcaaagtttggggttgttttaaatcaaaaaggaaggtttttgtttttcaggcagtttccccgtttcattgtttttctcgtgtttcctcgatacttaggattttaccatgctatttattgataggcaaactcttagttttgagttttcattcccaaaaaggttttagaaagttgattatctattttacgtgattgtgacacagggcctctgttagtacgtgattttctaattaggttgaccaatacacttaaatttggaaacgaggtaatattagcatagaatatatatgtatatgtgtatgtatgttgtatgcatgttcttatatgattcatatgctatcaacactagtacggaagcagtaatgagtgcatgtggtatagcctgtgatattaaagagtacaatccgatgttattaacactagtacagttgggtacgtagtacggttcaaaccctaccaacactagtacagtagcggtacgtagtg

SEQ ID NO: 66682 - DNA, 1178 bp, Cannabis sativa
tatcgcaccatgtaacaggtgtgtaatgaagaggaaactcgaatttaagcagtgcttgaatccaagcaatctcggcagatacttgtgcaagggcacgatattcggactccgtactagaccttgatactacggcttgtttcttggatgaccaagagaccagtgtgtccccaagatatacacagtaaccagctacacttcttcgatcatcgcgacaacacgcccagtcagcatctgagtaacccgtaatagcaagtctatcagatactttgatgtgcaaaccgttgtacatggtacccttgagataccttaaaactctttttgcagcagaccaatgtgaggaagtgggagtctgtagaaactgactcaatttgtttactccaaatgaaagatcgggtctggtatgagtgaggtattgaaggccaccaatgagacttctatactcagtaggattacgaagagtctccccatctgactttgacagtggtttgcctactgtcattggagtcgaacatggctttagatgctgcatttcagttttggttaatagttccttgacatcttttccttgattaaggtagagacctgtttcatctctatggacttcgattccaaggaagtaatgtaaggcccctagatctttcaaggaaaacatagcatgaagtttgtcgatgaattggttaagtttggcaatatcattcccagtcactataatatcatcaacataaattagcaccataataatcacacctggaactttgtagaagaatagagaggagtcggctctagagtttctgaatttccagttgataagagtactcttcaacctgtcataccacgccctcggtgcttgttttagtccatagagagacttaacaagcttgcatacacggttcggtttagaggcatcaacaaaaccttgggcttgttccatgtacacgtcttcttgtaactcgccattaagaaacgcattattcacatcaagctgtctaatgtcccagtttttagcaacagcaatggtaagaatgattcttaccgtcgatgccttcacaatagggctgtaggtctcaccaaagtcaatacagggcctttgattgaacccttttgcgactaatctcgccttgtacctttgaaatgtactatcagcattcaatttaactttatacacccacttattacca

SEQ ID NO: 66683 - DNA, 713 bp, Cannabis sativa
acctattttctctttttttactaccttagacttctcaaaatctctactttcaaacttcaaaccagagtcccttattcctagaaaaacttcgaccttacaattgtttccatctgtaaatgcaagaagtttttgactgtctgatctagtacttcttagaattttgtttaacctattttccgaatgcagtgtcactaaatcttgaactgttccacccgaagcccgatgaggattttgacgtccaagtcaggttcggtcacgtgattgactgggtacacaaatcctcggcagatttccacaaaaacctttccctttccactcatacatcaagtaagtatcccgacgcttgctaaatcttgctgtctcgtatcttggatagaaatgattagttcaagctaggtctacgatatctcatacatttgaatggaaaaacgatacccatagggttacatttctaggacagggttatcttgaaatttttctgctaagggagggctggtactgcctagacagttagggtatgcaatctaaattttgtagacctttgcatgttcttaggattttgaaattagggtttggaccaggtagaatgaaattttgagtgaatgttaggactatatatcatttgtgtgcctatttggagttattggaactttgaatgggtttgattttaggaagttgtttgaatctgctttggtaattttcccctagattcc

SEQ ID NO: 66684 - DNA, 1103 bp, Cannabis sativa
  modified_base (137)..(137): a, c, t, g, unknown or other
tatcacacatttatttataaatttgtcaaaaaaatttatttattcatttcattaaattaaaataaattagattagtaaaaatatataattttgaattatcatacatatgctttccaattttaaaatattattaattnaacaatagttacttaaattgattctaagagaaacaatatgacaaaaaaattatatattatttttaaattattaaaaaatttatataaatattttaaaaaaaattaatatttatattaaattagtatttaatatacaaaattttacattattcaagtaattttatattactctgttaaaaaaagtatttttattttactattttaattatttattaaatgaaaaaatatgataaactattttataatatatttatgatatatacttaattatctaggatatattattttataatttaattatttttattattttttttttgctgtgaattattcatttttatttatttattattaaatatttttattttaatttattattatatatttttattttaatttatttttaagaaaaataaaataaaatagtctactctattcttaaactaaacataggattactttcagcataattcaatcttgtccagtccactccaatcttttccagttcagtccaattcaatccaatcctgcgtaccaaacgggccctaagggaccatctggtatacaggactagactggattagacagactaatttgtccagtccagtgtttgggcatgctaaaagtctggataactaatccagctaatcctatctgtctagatgatttatcccatctaacagagtgggataaataatcctatgcaggtgagatttttttgtttttttttttcgattttaattttgttaatatattttaaatttaataagaattttaatgaaagaattattagaaatttagttatagatttttttattaaaaatttatttattaaaattagttaaaatatataattttgaattataatacatatcttttcaaaatttaaaataatattaattaaaaaatagttacttaaattaattctaagagaaacaatataataataaaattatatattctttt

SEQ ID NO: 66685 - DNA, 872 bp, Cannabis sativa
  modified_base (827)..(837): a, c, t, g, unknown or other
tttcttggggatgacgaagccagcactgtagttcaagactttgctagggctgagttagagagtcagggtaggactagctttatcgttttgctgttaggtgcacgccttcttatagttattttaacatttcatttatttctttcttgtagcagccaatccaatggaagatctcctggcgacccttacagaggcctacagcctggatccttctctgcctctggctccatcccaattggtgacccccgagaggtcgtcttccagtgccaccttaggcccaatagtcttgatagacgaggaaggggaagtcgaggaggaggagggcgagattacgacttcccttgagcgtaagcgaaatggtaagatcgttgaggccgagtcttccaagaggcccaggaggagggacactccggctgttagcactgactcagggatcccttccgaagcggaggagtacaccgtgccgcatggcattgttctcaccccggtccccacagacaaagagaggcaaatgctccgaatcgcaaaacataactatgccctggacgagttcagccggggacatgctgaggtggaagccctgaagaagatcttgcgggaggagcaacagaacaccttgcgtgaggacgcattcagaaatccccgggacctgaacatggatcccctgacagactggttcaaccgctttgtcagtgctactctcgcccccttcgcctctgagatgaccagccagtttgtctcccatctgactcaattcccagccatgagatacgcaccctattcctcagtgaactctgtttaccaggtttagtgttgggttttatgccctnnnnnnnnnnnatttcaatataatcagatttactcattaatataga

SEQ ID NO: 66686 - DNA, 1073 bp, Cannabis sativa
ataaaaaaataaaaaattgattttagttacaccttagaaatttatatatgaaattttttggcataattcgtatctcattcgattagttacttatttttaagtaataattttgacagcaaaattactgctgttactcttttggtgccgacagtagcaactttgttagggttgtaactctttccttcttaagcctaccaataaagttacaatctagtactaattattaaataataataataatgagtaaataaaggataaaagaaattagtggtaagatagttattcttttacatttctctttttatatttgtttactataactaaaaattaaaaagagagagaacttgactttttttttttttttttgaaacaaagtaatcagactttattagatatcaaatttcgctaccaagagaagcagcaaatcagttgggacatccctcatactgaaaacacgatcaatacataaactagaagctcttgctaaggaatgagcgactaagtttgctgaccgtttgacaaataaaatagacacatatttcatagtatcaagcaaagttttacaatctctaataatttgcccaaaaggagagatcatttcaatggtgcttcgaattgcttggacaaccactagacaatctgtttcaagcgtaaccgactgccattttttacgttttatccaacttaaagcttcccgtacccgtactgctataacttcagccagttcaagacggacagcaccattacaagcccgagatatcctccagtaagtactcatgatcatttcgagcaacaagaccatatccataccatggttgttaccatttattgaagcatttactttgacttcattagccttaggaacacaccactgttcaaccctatctcctggttccaaaccagattgaaatggctccaaatccgaagattgaacaactttccaatgagcaagataattgttagcgaatgcaaaaatattgttgctgaaatttataaacactacgcaagtatacgcaatcaagtagtaaaactcacacatgtgaagtcgaaccacagggaattggattaaatac

SEQ ID NO: 66687 - DNA, 607 bp, Cannabis sativa
aataaataagtaaaaataatttattatagaattttttaatcaaaccagtgtttttttaaaagttgagttgtaacaattttatctttcggcggtagcttttctataatttttttttgaatggtttatcaaatatttttttttatcacaatttatttaacaagtagcttttagttttcttaaaatataacgggtcatatatgtgtggaatgaattgatagaataatcattagtatgaaagtggttgctatatgtgtagacattttttagttatattactcatttagtattctgttgtggtatttttaacacgtaaatatacgtattgtagataagttataaactcacaaagagtgatgtcgatcccacaaggattgtagtgaagtactttaaaattaaacatttgcttctatttggttatatcgaaattaagagaaaattaaaattagaaaacgataaaaaaacagtaaaaacaggaaacaagtaattaatatgtaaattaacaatgattaaaagttagggtcatctattttaattgcatctattgattatggtttaatatgattctattcctattactaaattttatgtaatagcaaatttacttagg

SEQ ID NO: 66688 - DNA, 1962 bp, Cannabis sativa
  modified_base (1307)..(1308): a, c, t, g, unknown or other
  modified_base (1761)..(1767): a, c, t, g, unknown or other
cgggtctaggtctgggtcttaggtccacgtctaggtttggctctgcatctcgtgtcttggattcgagttcaagtctgtgtctgagtttgggtttcggtctgggtctcgggtttggtcccaggtctgggttcatatcctgatcctggtcccgggttcgagtttgggtcaagattctgagtctgaatcttggataagggttcgggttcgagtttgggtcccgagtcccaatcttggtctggttttgggtccaggtttgggtcttaggtcccagggggtcccgatccgggtctaggtcagcgtccgagtcttgtactaattttttttttttaatatattgaaatagatttgatcctaaaaaatttaggtagggcgaagcgaatctaatctgaaattcaataagtatctgaatgtttcgaatcagaagtgatctgtcaaattggagctccaacctgatccaactaaagggatctttttgatatgcctaaacccacatactgcccctaaaaaataaaaaaaaatgtatatatcttttaattatttacaacatatattaataattaaaagtgatatttatgagtataatataaactttggtataatggttgttattttgcacacataatgaaagttatgggttcaactctcaacaaaaacatgtctactttttaatattcaaagttatttttgaaaacctttaccaaaaatttgtatttagtaccttactcaatattttattgtcacttttttttatttaaactattttctttttttttttgagatgtactttaaactatttaatactattaaatacaataaaagtttgtattaattttcaacatgttatattatttaaaaaaaatattacactccatcccttaataaaagtacacccctcctcaacttaaatcttgtgtgaattgccaaccatgaatgatatggggcacttggaggtagctattgaaaaatatgtataattttgaataaaaaatattttatttgggttcttaagttgggtggccttagatgtgagcctaatccgttttaaactagatccggccatgtacgaaagttgcagaaatataatttaaaaattattactataaaaaattaaacttacgtacttatttgcaacatgtaattagatttagatatttataatacaaattactctgtgtaaatactattttagaattttagttttccaaaagttatagattagaccttctgttttgttaaataacaaaataggtcatgcatattttagaatagtataaataagacaatgaacttaatttttgataattttnntaatataactaactttaagataatccctaacactgacaggtgtaaaaaatttaacaagttttgtcataacacttctaggtcaaattattattaagctttattttgataaaaaaaaaaaaaatcagttcactgttctatttgtactattttgaaaaatacaaaatctattttatcatttaacaaaatagaacttttagaaaatactatatccacccacatatttatataaataaatgaagaataaataccattttgaaccatgtgttttgcaaaagttaccaattagatcatttattttgttaaatgacaaaatggaccatgtattttctaaaatagtacaaatagaaccctgaattgattttttgtcaaaataaaatttaattataattcgatctaaaagtgctatgaccaaactgtttgtatattctgtatctgttcgtattaggaattgtnnnnnnnttggttatattaaaaaaaaaattatcaaaaattaagctcatggtcttacttttaccactttggaaaatacatggtttattttatcatttaacaaactcagaatccaattaataacttttacaaaatacatgatccaaaatagtatttactcgaaaataaattgcaatatttatttaggatttctcgtgaaccttt

SEQ ID NO: 66689 - DNA, 1488 bp, Cannabis sativa
ccggaccttctcaaggctcccgaaacaagaggtcctcaaaaggtagcaatcggacggaggataagcgccaaaaaagggggtatactccccaatactctcagtacactgagatgacggactcccaagaacgtgtgtttttcaccacgaggcaaaatacgcaatacgggaaactgcctcctctatatagagatagttccagaagggatcccaacaaaagatgcgagtaccacaacgacattggacacagcacctatgaatgcaaaaatcttaaagatgagatcgagaacctgattcgattaggtcatctttatgagtggatcaagaactagctgccccatctcaacccggttccggcagggggacctctgccccaagggacaccagggggtgcgcctggagcgctggcactagccgcaccctcgggaggacctcagcagacttctggcctaccaccgagacccaacggaagagtggctatgatctctggagggccccatatcagagggaccactctaaaggaactaaagtgctacgccggggccgttaaacacagtgaggtgtgggaagttactcagcttccagctcaaaggccctgactcatggatcaaccaattacattcacggaagaagacgcaaagatggtgtgttttcctcaccatgacactctggtcatagagactcccatcgccaataacattgtggctagaatactgatcgacaatgggagttttgtgaatttattgtttaaagaagccttcacagcgataggcctcacggaccgggatctttcgccaagcggttcccagctcacgggattcaatggaaccacacttatcccaatgggaaaggtgagatggggcagccagttaccttgtgtccagacacaccccagagcacttttaaatactgcacattcgtagtggtagactgcccaactacttacaacacaatcctcggtcgaccggccctagtggactttggcgcagttacatttatccggcacttatgtctgaaatttcctacccaggaagttggagtagggaccgtgaggggtaatcaaggtgaagccgggcaatgttacaatgttgcggcccacttacctgtatttatggtccgtgaaggtatcaagccagaagtggcggaagaagatgagttggatcctcgtgtgggatccgaaaaaattatagaacccatggaggacgtcgaggaagtgccagtatgcgaccttgacccttccaagaccctccggctgggaaggagcctagaatcggaggaaaaacaaaaaataattaaagcactaagggaaaccaccaatgtttttgcgtggttccaaggagacatgaccggcataagtccccatgtcataacccatgtcctcaatgttaactcggatatgccactggttcagcagaagcaacgtcccctcgatccagtgaaggcggaagctctggagaaagaggtggacaagctactaactagtggcatgat

SEQ ID NO: 66690 - DNA, 791 bp, Cannabis sativa
tatattattttataacaaaataaaagtaataggaatattttggttaatataccttttatttcattacattctcataccaaatcaaatacaataattttaattacagtactcatcacggttgtacataaacttttataaactactcaatctgaataatttaccaaaaccaacccgagataattcgataaaaaatataaaccgacaaacccgacaaaaatataacctgtccaatctttatattgggggggttgaaaataataccaagccgaactaacccgaccaacccgattaagagatttttatatatatatttttattatgtatatttatatattatataatttatatcacaattaaaaaatataaagttcaaactaatatattttatttatggtagtttatttgaattttaaattcaatttatatatatttttatcattattacaattaataaaaataaaaaactaaaaaaactaaaaaaaaaaacattagtggttggtttgtacaggttaacccgaccaaatcgatcaattttattgaacagattactattttcttttttcttaattggatggattgcacataaatttttgtaactcaatctttacattgggttgaataaaatgtagcaaaaattgaccaaattgaccgatctacacccctaatactcattacaataacaaaccaaatattataattaattactattacaattcttaatccattacattgttatcactttttcattacatcaaactaaacatcacctaaagttctaaatataggaaatg

SEQ ID NO: 66691 - DNA, 1115 bp, Cannabis sativa
atattcaatttcatttaccactcaaaaaacataacagtaaaattgttacagctatattgtgcaatgtacgtaattgtactactaacaaccccttcagtcacaaattttttattcttagtcactaacagtgatttgatggcgagtcattgaagaaccaacaacaaaacaaaatcatgtcacacagacaagactaaaacactcaaaaccatactacaaagacaagactaaaatcaaaatcatatctaagagacaatactaatcgcagtagcaaaaattaaattgttgttaacataatcccaaccaaaccgcacctatgtctaaagaaagttgcctggcctaaccaaagaaaaaagataatctcttatagctataaatttaaaaatcagaaaccttgaatttttttaatttaatcgatgttaaatcactactcattttaattactattccaaaaataaattagacatcataatattattcgcattattatttttattacattatattgttaccattattattttattacactcaattaaacactacctaaataattttatgttgttatgagggcttttttcttatttttgtttttcaccttataaaggcctcgtacatatattaataatataagacaaaaataaatacgattgtcatttcgtatctaatttttgcaaattaagtctttaaatcttagtatcaaaattgatttcttcatagttaatatgttctttttagctttaccttgaaaagttaatataaaaagtagagatgccaataaaatattcaatctaatttaatctgcatgatataattcaatctaatatgtaaagtacaaatatacatatttgtgctaataagattggattgaaaaatctaaaatctacacttgtgcgaacttgtgcgaattagatgttaattgagctaaaattgtcgattgagctaacaataagtattttgaagtggtttaaaggacttaagtaaagtagatatctgcaacaccattggtttttttttttttttttttttgataatttgctacaccactagttgttttataatatttatgaattatttaatggatataccattttagatcttatattttgcaaaaatta

SEQ ID NO: 66692 - DNA, 1324 bp, Cannabis sativa
ttgatatggtgaaagtgttatttttattttttgacgtatgaattaattatggtgagagcactatattataagagccttttaattgttatttataatagtttttaaatgagcattgttattgagcaccagtggtgcccaacatcttctataagtgtcattctatgattggttagcgatatttactaaaacttattttcttaagttatatgggacccgctatttaattacactaatagcagtatgacacaaagagggtgctaggcaccagtagtgccctttagcaattctctttttaaatgtcacaggtagagtcccgtaaaaaaaaatccaaataagttctataatctctcatcgcttaaaaaaaatgtgcttgatattcttaaaatgtataaatatagtaaaacttttgccaataagatgatttttttttaatacatttcttcttcataaaaattcaagattaaaactattaatgggtcttaaaataatattagatttaaataattaattgtcccaatcaaattaaatctacgctgtcaagtgagaaaataaatacaaaaatatatattattttttttttaaaaaaaaacagagagatgagagagaaaggcacacacgtgggaatggagtcaattggtgaagaaataaatttatttgattggatcgaggccgcacgtgcgatctagcacgtgtgttgccgtttcgatggccgggccttttggtcgtgtttgccttgcctggtcttgcgtttcgtttcgtttattaagactttgactatttcttttaattattaattattattattaacaattattaattcttaattaatttctaatgttagttataaaatttctccactgaaatctatgcatccagttttttttgttttaaaatacaggaaagtaattttgaattttgattagttagacatcaattaatcttaattaattaaatattatatagtttataatttggagtgtatattaatataattgatgcaaaataaagttaatataaaatatatcctgagctaagtttatattaaaataaatattacatttttttactacttaatataatttataaatttgtttattttattataacttttatatacttttaataaaaaaaaatcaaatattttgggaaacattttaatttaataattacaaaaattgactaaatataatattgtataatttctaaatcaattttgacataaattttacattagagtgtactagaatgcactttaattatgaacatattcttatttttgtattataataaatcaagtaataaaaagagatcttaattaatttaa

SEQ ID NO: 66693 - DNA, 1064 bp, Cannabis sativa
aaaattgtgtccatacgtatacattatatgtatatatgtacacgtgatgtggactgaagttaattattggactaagccaacgtggaattacatgtatgcacactatactatgatattataatcaataatttaataagtcaagattaaagtgtagtcatttagattaattgatttgattacaatgttaatatatatacatatggtactgctttataccacctaaagcattaattctaggtatatatgtaaagaaaattgcaaattaaaggtagtcttgttggtgtctaatattttttttcagtgttatattattattagtataattaaatattaagttttatatataattgaaaaaatagtttttagagaatattgttaaccaattataaaacgccatctataaaaagttaggtgaacgactctacttcaaccttttattggactctttacactaacggacttaagactcttatacacgagtacatcattttagctattttctaaaatgacaactgacttgatcttataaactaacacgaatgtttgtagcatattttttcctcacttgcacgatttttaagaaaacgtcacaggaggtcacttattttaagattactccaaattaagtgcgtttaagaatttttaagtaatggactaccaaaaaataaaatttaccttgttaatataaatatagtacacatcaatttatttacgttatctttttccatatctacataatctaagaattattatatacttttttttttcaagtaatatgagagagtacaaatcctaatttttttcataacgaccacaatatatattgattgtttatataggaattacttttgatctcttttgaaaacgttgaggtgatattttgtgactagtacacatgtaattaagtgataatttataaggaataatttttatttgatttgggctagcaagttggaaattctattattttgtttctagaatgaagatttcttcttagggaaagattattccacgtacttgtagagatatatatatgtagagcttagaaatttttattcattatt

SEQ ID NO: 66694 - DNA, 2382 bp, Cannabis sativa
tcgtgggcttgggaaccaacgggcgtttcaattccttaaagagactgttactcaaaagaaacccagttttatttttttgtgtgagacaaaaagtaataaagctagaattgactatgtgggccggggcctgggctttgaaggaatgttcactgttgaagcccaaggtaggagtggtggtcttgctttattatggaaaaatgaaaaagatggtaaaataattggtttttctcaaaaccatattgattttatgctagaaattgatggtaggccaacgtggagacttacaggattatatggtgaaccccaaagacatcaaagaatggatacttggaatctcttaaggtccttattcaataattcaagggatccatggtgtgttgtaggcgacttaaacaatgtccttagccaaagtgacaaacgtggagggcaaccttatcccaattggctcatctccgggtttgaacaagctataacggagtgcgatttattcgatatggaattggttggttatccttacacttgggaaaaagggaggggaacacctcgttggatagaagttcggttggatcgagcacttgtgtcttcttcgtggcttcaaaactttacgcaagctcggttgttaaaccttgaagtatctccttcggatcactcgccaatttttttagaggtcattgctccggatattttcattccaaataggcgtttccgttttgaaaatgcttggttaaaggaaccaatgtgcttggagattgtgaaggattgttggaatgcttctagccttgcttcggtagcagagaagatttcttgttgtgctgataagttggccacttggggaaagaatgtaaccggtaactttaaactccgaattaagaattgccgtgatgaactgaaaaacttgaagaacaagagagaccctatctcggttcagcggtataatgagaagagaaaggagttgtttttggtgttggatcaaaaggaagccttttggaaacagagggctaagcaattttggttgaaggaaggcgatcagaatagtaaatacttccatagagcggctagtaaccggcgaagtttcaaccaaatatcgaagctcatggattctaatggcacatggaaggattgggagaatggcctagaagatgtagttgtggactatttttcctctttattcagtgcttcgcatgtgggtagtgacatggtgattcaatgtatccaaaggaaggtgacatctcagattaatgaagagttacatcaaccaattgttgctgaggaagtgaagaaagccattttcagcatgcatccagataagagtcctggcccggacggtatgacacctgcgttttaccagaagtgttgggaggtcattcaagttgatattatagccgtggtgcagaaatttgttacttcaggggagttggattcggcttgtggggaggcaaatgttgtgttgattccgaaaaagaaacttcctgaaagtatggtggatctgagacctattgctttatgtaatgttctttacaagatcattactaaagtaatggctaataggatgaagccgtatatggatcaaattgtctcggaagcccaaagtgcgtttataccgggaaggctcataacggataacatcatggtttcctttgaagtgctgcattacttgaaaaggaaaagaaagggtaaggatgggtatatggctttaaaactggacctcagcaaagcctatgaccgcattgagtggagtttcttggattcagttcttaggaagattggcttctcggaccattggagttctttggtgatgaagtgtgttagttcggctaagtacaaagtgattcatggggggagaactatggggccgattactccgtctcgaggcatacgtcaaggtgatcctttgtcaccttatatctttatcctgtgtgcggaaggtttatcagctttgattagaagatatgaagcaatgggctttattcatgggtgtaaagtggcgaatggggctccgaaggtaactcacatgctttttgctgacgatagttatctgtattgcaaagcaactcttcaagaagctaatcgaattagggatctccttcaccaatttgaatgcgcttcaggacagaaagtcaacctgggaaaatcatcaatcttctatagtacaaatacagcaactcatgttagagatgatatcaatactctgttacaaatgccacaagcggatgaaaggagtacgtatctgggtctccctagcactatgggaagaaataaatcagctgtgttggggttcctgaaggatagggtgaggaaaaagcttcaaggctgggattcaaaagtcctttctcgcgctggtaaagaagtgttaatcaaatcggtagcgcaagcccttcctag

SEQ ID NO: 66695 - DNA, 1384 bp, Cannabis sativa
  modified_base (854)..(865): a, c, t, g, unknown or other
aaaaaaaaaaaaaaaattgtgttgttgtgctttatttataaatttacaaatagttctcaccaccattcaacccctaaaaaagtctctactcatataattgggccactcaaaccaaaaagaaaaaatcaaaaattactaaaccttagattcgtaaaggacgacgccgttttcagccacacgctccgccaattgccccatttgtaagggggtgactgtactctgtattatttgttagtatgtactatgtatattaatttggttaaaactgtccataaaacgattataaaaatattgattgtaaaatcctgcatgacttgacatagaaggattgcataaattattgttagaatgtgaaatgtataactaagctagtagaataagtaagtgtatggtaaggtacattttatatatggtaacaattataatggttcttttttatttcttgacatgatcatgcaatatacaagatattataaacactagtggttcttttgttagtatggtgttttattcttcatagttattcatttatatagcacaagttataatatagggtccgttataggagtgtttataaaataatcgattaatcaattcaatctgtacgatccaatccaatccaatctaatccgcaaagtgtggatattcgtatttgtgtagattggattggattgaaaaattcaaaatctttacgtatgcaaattggatgttgattaatatttataaaaagaaattaaaaaattatatatacaattaatattttaatgtaaagaaaataataattttttagtctaatacatataatataattatatttttattttcatatataattttttttttctacatacaannnnnnnnnnnnttaaatatttctttatacatataaatttttttcctttgaatttattattttatttattttaatttgttattgaaaacataaaataacaatagtttattttatttcattacttgttatgtgaaaaaaatatatattttttataaatattaaataatttaatattaaaaaataatcaatataaaataaccgatccaattcgtacttttgcagattagattgaattggatctaaaatataaaattcccacctagtgcagatcaaatgtactatgagtaaataattcgaattgaatcagatgaacactcctacattatattaaaaagaagaactaaaaactttatcatccaaattccaaaatatcacgagatttaacatctggtgtctctctctctcactctaaatctagggatgtattatgcatccaaaactgagtgtgagcttattatagtacttgagctcaaaaagtaccaaaaaaatatataagatgatgataatatataataggattgggatgcaaat

SEQ ID NO: 66696 - DNA, 900 bp, Cannabis sativa
gaggctgttgaaaaagtcttcttcgaaatagttgtcatttatgtctatcataattgtaatatgaaacaacatctctagggaactgttgtataaccaaattattgacctcatcaacacagtcgtttttggggattaagatgacacgatttatcattgtgctaatactagcattatattgatccaagtcttggaaaacatcatttataagaagttgaattgaggatttatcatttatgtatggacttatcattgaatttggtaatttaacaggatatatatttgaagtactattttttccttctccgatgcacaaaagaaaatcaatgaaagttggatctgagtaagctctaacattttgatttaaacgaagctttgtaaataggggccaaagataagactttgctaaacttgcattgataataacttcttttagtccacgttgtacaacaggcaaaacttgtctaaaatcaccccctaacacaacaacatttcctccaaatggatgtccacattcagtgctatcttgtaacatatggtcaagtgcttcaatagttcttcgatggcacataggagcatcatcccaaataattaaacttatacgacgcaaaagttttgctaatcctgattatttactaactgaacacgtaatgtccttatcaacagcatgtggaattttgaatcgagaatgtgcagtacgacctccaggtaaatgttgctaggacgattaaatgttgtgatcgaattgttgataaaatagacttatatagaaatattttaccagttccaccagggccatcaacaaaaaatatacctcccttccttgtcatgactctctcaacaataatatcataagcatttttctgctctacatttagaaaggacactaaagacaaatctttt

SEQ ID NO: 66697 - DNA, 2484 bp, Cannabis sativa
aaattttaatgctatgataaaaaatttaataatttgataaatattatattcacacatacgaagttatcaccatacagtttggaaaagatccatcgacttatgaaatctttatcagggtggatctccaacttatttttcttctaccttaacgatgtggtgatgatgaaagattaagtaatgttttaggaggaacgtgtttattatttaaagtgttcactcaagaattatttttatatgtaaaaatattgtgtgtggaatacattttccctaagatacaccaagcgaatcctatgataatgtaaacaaaacattcaaggttgacattatataaatttatttgtatttttataagtttatatatatttcatagtgtcaattgtatttattgaaacttataaatattattatcggtagattttggttataatgggttattagtttaactctacgttcttgtggtttataagttgttttgagttgtagccactttcacttttcacacttgtcatcattgctaggcgttttcctattactttcagtgataccaactaatttattaaaggagctaggcaagcatatatgatatgagctaaactacgttatttgttatattcaaaacattatctatgtaaatttttttaaaaaattaaataattgacaatgttaaaaataagttcgaaattttttaaacaaacgtgctaaattgaaatatcaaaaattttatttttagtactgtaaactattcaaaaaatttctaaaacttaactaatagtaaataccactataaaaaaaaaatattctatgtaattatgaatatgaaggttaactaaaaaattataattagcactactctcattaaaattatattatcagagtatacaatacaatacaaaatataatatggtaattgttctaagtaaatagctcaagaagtaagaaatctcttatcaaaaagtccaattaatgtccttgcattcacacacaaattaacctaagtaatcctaaaactaactcgcaaagcatttacacaaattcaaaataccatgctaaaatgtatgacatcattagaacataaagtccgaaccctagaaagaggcgtatcctaacataagaaggcctacaagagcaatacttgaaatggcaatctacaaaaaaaacaccgatattcggattcgctaaaataaaagtgatatccaaaaggaattactaaatagcttaaaagataagatatgactgctctagatgggccaatattgaataaacgagtatctcttctaaatgaaaatagattttcttcgaaaaggagtttttttgaatgttgcaaataactgcaatccatacatacatacacatataaacttccctataaagatcaaatttggtttcacgtagaaacagtaattagaaagaaaagataaaaagaaagatccattttacgaaagaaacaacctatcaagcaattgaagaagctttaatgggctcgtatttatctcccatagcaccgcctttctgtttctgaaactgaatgtaccgcaatgtgcttgcgaagaatgcatctgtggcctgatccggtgtggttgagtcactttgcaattcggttgtaatcaattccatcaggctttggattgaagcaacagttatatgtgggttacccttttcgaagaaatagaggtacctgtacatacatacatacacagcacggttagcctaactaatttttaaccaccaaaaaaaaagggtaaaagaaatttacttgttcaatatctcaacaaagagtgccactgaaccggtgctaccacgagttgcacttgacatttgctgagcagcatttgcaattcttagagcacgtttcaggcatattaaaaccctggttaaagttaaacaagggataataattaaaaataattctataaataatgaagcccttaattttcttaaaccatgtttgctcggtaaactcacctctccccgtccttcatgttttcttgatcatcaacccaaaagagatgtgcacaagaataaacagctctgcactgatcaggcttctttaaaagcttcgcagaatactgcacggttattttacaagacggaaaagaaatcagtagcaaagactgcgagttaatcccatgaaaatttatagctctataaatttcggtaattacccctgtagccttgtgtgttaaagtatccctgttctcaacaccaaagacgtgcatcctttgaagtgtcccaattatcaaatgtagtgcggttatctgtgcttttgaatcctatcacagcaacagaatgcaaacacaaaattattcgaaaatagataaataaaattttccgtacataaaacagaaggaaatggaaataggtacttaccgatatttcctcttcatacaaaatatatgcttgggtgaaaaattcataggcaacaggttctagctcacagtcatttgcagcctgattaacaaaagaagagaggttaaactaatgcac

SEQ ID NO: 66698 - DNA, 1953 bp, Cannabis sativa
aactatcgtctgattgaaactttcgtctgatgcaaccaccccgcaaccacgcagcaaccaccctgcaaccatcatcttactgtgtaagtgtataagaggtattttggtaattaaaattacataaaaggtataaatattgtccacaccttatagaggtatttttgtaaataaagtgtcaatttatattttttatgtaataattctaataaaaaggtggaattccacttattcaaataggaccacacatgatcctaaaggtacgtgaaagcttccttttttgagcggccaaaggattgagggagactcaagtatttctcaatagaatcacgaatagacacactgagcaaggaagtgatttgatttttgatcacatcagtggtattgggagagaaatagagcgaggatttatcatagttgacaagttgacccgaagccaggctgtaatcatggaggcgatccttgatatggttagcagtatcaggggatgtagcgctaaaaagagtgataacatcagcaaagaataaatgggagatgattggcaccgttcgggaattcttaagccaatggcgtgcttccgtggaaggcgttgacaaagtttctgagagatgagagatgagaggccctcagaacataagagaaagagatagggggagagtgagtcgtcgcggcgaatgtcacaggaggggatgacaaatccaagaagctgttggttgattaaaaaaagtaaaggtggcagtcgagatgtaggtcaaaataagattgatgaacttggaagggaagttaaatttttccatgacctttctggggaagttccattccatgcaattaaatgccgccatgtcaagtttaagagccatccaacccactttactatgcttgcgatgagtcaaagagtgtgtgacttcttgccttataatgatattgtcaaagattaagcgattaggtaggaaagcactttaggctagataaataatacggcagaaaattggtttgagacgattaaccagggtgcgggagataattttatacaatgtagagcagaggctaagtggtcgataatccgtgatggaatgtgggtgactcttttcagggacgaggataatgatggtattgttgatagatgttagattcgtgttttcgttcaaaaatctaagaactgcttggatgacatcattccctaagagattccaatttatttttgcaaaaatgtgccattaaatccattaggtctgggggattaatcgcttgccagttggaacaccgcttgtcgaacctcgtcaggcgtgaaaggagattccaaacacagcgattttgtagcagtaagcctttcaaatatactagaaagaacctaatccatttgctcacagttaggattttgacttgtgaagagttgagtgaagtattgttcaataagggtcaaagtgctttgagtatctgtgacagttaagccatcagattgtgtaagtgagcatattttgttcttggcacatcttgaggaggcaaattgatgaacgtatcgagtgttcttatcaccaagcttaagccagttaattcgagagcgttgctgccaatactcttcttccttttaaaggagtcgatcaaggtccccttgaagttggcgaaaaagaagaagatgggaattagtgggttgaggatgattttgagcagcctgtagctgagattggactttcttaatttggtgtggaagaggaggcccgatcgatttttgccactcggagagggtgtgagcacaatgttgaagtttgtgacgaagataagagatatgattgtgatcacaggaatcaagagtggtggcccaagccttacgaaggcaagccttgaagcaattctcgactaaccaactattgtcgaagtggaatcgaggcttatgaggctgcatactgttaggttatatttagcctatgtttcgggtttgaaaagtaagcattttct

SEQ ID NO: 66699 - DNA, 1232 bp, Cannabis sativa
gcaaatttttgttaaccaaaaataaatagccttttcgtaataaattctctacagaaattaataagtaataaatgataagaaaacatcagatatttttacgtggttttgtagtttaaatctacatactccacaagtccttattattagggatatttattaagtacatactacaatctcacaatttgaataataataattctctttcaaatttgtcgtcctttttcccctggaatctactcttatttatagaaatataggttggcagttacttattttggaactgattcaaatacaactgctcataaaatgtggataatccccacgtttcatttaatcacatgtgggataatatctaataactacccaactgctctttagttttatcctttagactgttattgctaacatgaaaggttacatctcttttaatatgagtttttttccttgtccatcttaagaagaatgctaagtgttgggaaatagttcatctcgtcatattcttttattagcattagcattgtgaggtgatcttcttgctatgtgtaatgcgaggctgttatgttgttaaatttattatgctcgagtggatgaatatctctttcttatctgtatattttgagtcatgcatatgtctcgttaatctcagcttaatagttattatatttgtctcgcttttgactatatagtcaacaagttttgaatattatttatcaaacctctatgtaatgataacgtgttatttaatatgtaattattgatataatattattatacccttagagttaattcatattccttttgttgggcatgtgtcagcttctggagtacaaccgaattttgggtataacacatgtattgcacttaacatcacttaattaaacctaattaaaaaacatcaattatatgtgcattgcgcgtaacatcaacttagtttatatatatacaaagataaaaaatttagtttgggaaaaaaaatattaaaaaaaaaaaagagaaaaagaattggaaaaaaataaaaaagagaaatagaaagagaataaaaagaagaaaaaaaaaatcagcaactaactttaaaaaataaataaaaatgtcagacaaaactaattaaaaaaaatataaataagagaaaaaataaaaaataaaatgaagatttaataagtaaaaaacagtaaaaaaaattaggattaattacacaaaaatacgttaattgtattttatttatggatatatga

SEQ ID NO: 66700 - DNA, 918 bp, Cannabis sativa
tgactgatccttcattgttgtttcttttttcttttgctcttcttagctagaaaaggcaggaatcgagagattaaaaaataaaaaaaaaaactgattatttgtttttataatttatttataattatttataaaaaatgataatatattaataattatttttcttatttttaaaattagttaataaatttttttaaaaaaattatgaagtggaccaatacatgagtaacatgtggcatagaaatattctcagttatatttaacagaaaagtagtaagagaagtgagtaaaactaaactttgggtatttaatccgttgaaataaaagatgtggtatttaagtgtataaaattaaaaacatttagtatttatgccgcaaatatcttattttttttataaaaaaactacaataacataaccactattccaaacccaaatatgataaaactacacccaaatatcacaatctgaacaaatattatacacaacactaataaatataaataaaatatattagaaaatagatctgaataaatacaccaaacaaattaaataaaaaagaaaaataaaatatataaagcaaatattagatcggagaagagatccactagagtcaggagagacgacatgcgcgtcgaagccaaaacctattggaggagggagcttgtggtggtggataaagctgagcattggttgatttggtcgatttttttctatataaaaatccaaaatttcgtttttggtctggatttgtgcaatctgaaaatcgaccgaccaatccagaacctgtcttaaaaccaaccgttttaaacctcggtttgggcggtttaactcgcccaaaccgaactttttttttttaaaaaaaaaagatctattttttttctataaatacattattctacattttacaactacaaacata

SEQ ID NO: 66701 - DNA, 1682 bp, Cannabis sativa
taacaaaaaaattaatatatttataagaatgcctttttttagttaaaacaaactaaataattttagaatttttcgtttatacacttcaaaacagtttttttttttttgtgtatttttacataattttacatagaaactcctataacaactaacagagcaacctaaatcgcaactaaaagcaattcacatagaaattattagagaaacaaccggagcaacctaaactttaaattttaaaaagaatattaagaaatagcatatagagtaatttttcaataatttttattattagaatcatataaaatttttatttcagtataataaaatatattataatattttacaataaacaggataataaaagatagaacatttattgttatttaaatttaattatgacaaaataaattagaaagaatattttgattttttttaaaacaaagtaattcattttattataaaatattattgtgaaaaacaattaacatatacacagttctattaggtaaatataactctatccttttcctttataattaaagaaaatattattcatttaaatttaatatgatgaaactcacacacctgagaggctaaatgccttattaattggaagcaataaaggtaaacaaaggtaaaagtggtgttgtgttttctccaaactcttcaactgtaagcgaagatgagataaaaggtattcttggcatgaatacactaagcgcaaaggagatatatcttggaaactttttcttttttactgaggaagcgtaatgatttccattttctaaaggataaaattcttgctcgattggagggttggaaagcaaagtgtttatcgcagggtggtaggacaacattggttagttccattttgcaaagcattcctaattaccatatgtctactgctagaattccaaaaactgtttgtgttgagttagataagattctagctagattttggtgggctggttgtgcagataaaaatcgttattgtgctttaaagagttggggcgatatttgttagcctaagatgaatggcggtttggggcttcgaaagttcttggacatgaatatggctttattggcaaaactttgctggatatttcttcaaggtgaaaacaaggtctgggtgaaagttttggtagcaaaatactgtcaccatctggacatgtggacagtaggaaaacacgcaggagattcttgagtttggcatggtcttttagatgcatgcccgttacatatgtaaagatggggctgggtaccttattgcgaatggaagtactgatctatgagatcgcccctggatactaggggaatcgatagaagaagtgaaacgcagtttccaatatagaagaactcatgtgttttggaatgttgcagatcttttcttggaaggaacaacagattggaacgtggaactcataagggcttgttttgaggaaaaaatggcagatttcattctttatataagaccgctgcaggaaggaagcgatgttctgttctggcaggcttcgaagacgggtactttttctgttaaaagtgcctattgggtgagtcaaaagttcagattccaagagtcggatcccatgtggagcaatttgtggagatccaatttacaccctgtctaaaactcttaatgtggaagatttggtctgatattcttccggttaaggttagattgg

SEQ ID NO: 66702 - DNA, 1129 bp, Cannabis sativa
aattttatgtgtattattatactatatatgatataatataacctccaacacataatatatattaatctcctattaatatataatttgtcacattaaaatattttaatctatattatatgataacaaataatataacaacaatcacgtttcaaaatattgaatttattgataagttttacatttctttctgattattcatattagtgcgtcaattaattattattattatcattttagttctgataaaattcgtggaatatgcttacttcaagttttatggacttattcaccatttggattccaatgcaaggttttatgatttgtgtatttcgttaatattgaggtcaaacctctgtttctttgttctctttattatttatttattttagaatataattttaaaattgattttacatttcatataatattatttgtgtttgtgtttttgtctattttggttttgttttatttttcacttttaatttaatattatattattctttaataattaaaaattcattttcaaagatttcttaaagatttcaggctgatggatgctgccattgttgaggtcagtttctgttcttcatgtttcggctggtgggttttggggtgagttacttttggagtaattgtagtggtaatttgtgtgtttatagtcacttgtaacaaatttttgatgattagaccatgtttaatgatgttaattatgatttatttttaccttataaaatatgcttttattaaaataaataatatggcctttatttttagatttattttaattttattttatttaattatgtatattttccatctttaaatagatttactacatggccagatttatggttggctttattgcgtgaatacgctatttattgtatctttatggctgaaatattcttgatttcagctttttttttttgaatggaaaataatattttattaaccaacaaaatctgttaccaaacaatgtaacaattcggtaggaacagaatccataccaaagatacgaccagaaaataatacagaagctcttgcaaagttatgagctaccacattagctgatcgtttaacaaaataaatagaaacatgttttaactccaacaggagttgtttacattca

SEQ ID NO: 66703 - DNA, 1649 bp, Cannabis sativa
tttcttcgatctcacgcaattcccataggttcgacctcgttcttcacaatctccatactacaataaagattcgtgcgcttgcgagttgataaatgtgaaacgtatcatttcggtatacaacacactcccacccaattctccgcctcgtttccatccctactccctagttggaattagattaggttacttaattttctttgcaatgtaactttaaaaatatttgcaaagaacatctatatacctaagtcttttaagacaattatcaaaaagaaatatgcattgattaaaaggtaattaatgacttgtttatttttgtcaattgagatagttaagaaagcaagaaagaagtcttttttgtataatcccatatgaaactttgtcaagggactagagatttagcattttaaatgtgaagagaattacaaagacatataaatgctacaaagaattaagaagactaagtaagcctcccattaatgacctaacctataaggacttgttggccttagccatattcaaagttgaaaaatctaagcaaaatcagtgccatccatttatgatgatgatgatgatggtcctgatgatacaaatttggtagaaaggttcttcttttttgcctaatttttggtgataatcttcaaattttaatatctactatatcatacctacctagttatctactactaaccaatttggaagctcttgaaaaccaaactaaatgtagccaaagaaatctacaatcacaagcagtgaagatttgacatgaatgaacaatctcagcaccttctaattatattcgagacatttcttccaatctcttctttcgtttgctctgatacaggaccatctccaagatacatactaaagaaagcctctgaagaaagaaggaaaaaaaaatgagcttaagattgtttacttttcaccattgtatcaggtttttatgatctgttccgaggaaaagtgcatatttcgggaaaaattaaaatgacaagaaaaagcagatacagttcacttactacacaaatccttgctctgcactgctccaaccttatcacctccaactgcatgtataatagtgtaaaaattaataataccgaaaatgggaaacgaagcataatgctcatctttgtctcaattcttgacacttgagaggaaaaacttgatgatggttacttactttcagtaatcaattgaccatcagctgttcgtcgaaaatgaattgttgtcccctgcaataataaccatatgttgatgtaacagccgataaaatagaatctttcgaaatcccaacaatgctataaaaaaacaaatggaataaggtttctttttaccgcaggcaaaggaatgtcttgtgtgaagcatgacccaaatgctcttaagcaatgataatcggtgtttgggttagcctgataaaagttggcaagaaataaccagagttagatactatgcaaagaactgaagctaagggaaccaattgaagataactaaccttaactaatcgtgctcgaagagatttctcaaaggcactgcaccaaaacaatgaaagatactttagcttgttaacttattttatcaagtaacacctttattgatcagtcgatcgaacatatgaactaacaatggcctcttgaatttcaaggaatacttga

SEQ ID NO: 66704 - DNA, 524 bp, Cannabis sativa
aatgtttcttttatattttgtacaactttttcaacatcatatatattgtggcgaattcaaaatttaagttgaggggagggggcgacactttttttttgtaagtgaggggggctttttttctacattgtataacatgttaaaaattgatccaaatttgtatttcagtattaaatgtagtataaagtaaaaaaaaataacaataaaaatattaggttcagtaattaagacactaaatacaagttttatacgtagagtatcaaaaaataaaattcaaatactaaagtattaatattacttcattttaatcaagtacataactaattcaactaattagaattgcctttcaggtctcaaaactcaactcagcatataattttgcagagcccatctttatcctcaacactaactttttttgtatctatttaatatattctattattatcaatgtttttttttatattctgtacaactttttcaacttcatatatactgtggcggatccaaattcaagttgagggaagggg

SEQ ID NO: 66705 - DNA, 930 bp, Cannabis sativa
  modified_base (241)..(246): a, c, t, g, unknown or other
attccgacaaattttccggcgccggcagcaacttcgacaaattttttggcaccgatcgctactccaacgacttttccggcaccagcagcaagctccggttacttttccagcatcaatgacaaataaaacttcctaaacaaataaaaacattaaatatgggatttgaaaacctaattacatatatatggcatatcaaatgccataaaaagacctaaaaataaaaaataccatataaattggnnnnnnttaaatgtgccatatttatcataaaaacttttaaaatctcatagtatgtgtaatttcctcaaaaataagtaacaatattataaaaatacttttagttggttaaataaacaaatatacaatccaaataaaaaaaattaaacaaatatcacttacacacatgcaacccacgaaccatgtttcctgggattgaaaccttcgtttgatgcaattttcaggaaaaaactcagcaacccaacacaaccgaaacgaaatccaacaagaaagagaaccaccattaattgtagcgatttcacctgagaagacaaccagaattaatcaaaacaggagctattttgaatttatgaaaaaaaaaatgtatagatcaaactactacggaactaaaattcaactacaaattcagtttaattcgcataaaattaatgtcataactttagttttcagatacatgaaatgcagatctcaaaaagttgaactggagttcccaaacactccaactcaagtataatctaaaaaaaaattacatcagtactatagtaaaatgttaattccggtgtattttcgttgtttttgaaatttctaatgaagaatttgtacatattaaatcacaaagagacatgtagatagagttacgtatgtggaaacattattatgatttctaatgtttcataacagttgcataaacat

SEQ ID NO: 66706 - DNA, 1460 bp, Cannabis sativa
ctcaaggtactgagaacaatcaaatttttcattccttttttgcttttaaccatcaagacatttgtccttgtctttgtcggagttcatcattttaaaagtacagtaagtttatcccagagagaaatgcttatagttgttcatcaatcaatttgttccgttaaacaatgtcttgtttgctattcttagtaagatttggcaacatgcttatactggaacagattagtttgaggcctttgtttgacttgatactagggccaagaggtaaatttcatatatgttttctaaagcattgttttttctattggaatttggaatctcttaaaacattatcaccctatatggttgggagagtatgaatggaatgcaatgaataaaattatattttcattccatctctttataatttagcacttaggaatgtaaatgactttttcgaaatgcattctatgaagcaaatccttgtattattctattattattatcattatttgaatgctttgttttttgattttgctaaacatcattatatgcattcttgttctactattatattattattattaagaataattagtatttttgtctctgaactttcgacactatctgattttgttctttaaaatatatggctggttaaaaattcctcctaaaatataaaagtttcataattatgtctcttcggttagattttgtttttttttagcgttaaaattttctcttttatcgaaaaaaattaattttaaaaattctaatattctattttttttttatagtaattgtaatattttattaattttgaaaaaaatgatgaaaattattaaaaaaaaaacttgataaaatattaattttatttaaaaaaaaaattaaattattcttaaaaatatttttaaattttattttatttataaatacttatcataaaaaattaaattaaaatgattgagaatctactaaatgatttaaataaactaagattttttaaagaaaaaattaaacgtatttatatttataaatttatatcttaacaaataaagaaaagtaattaaaaaatcaataaaaatataaagttattttgaaaaaaaaattatacattaaattaaaaaaatgttatgtttacttaaataaatttacattttttgattaaaataaaatatactcaagtttgttattgtaaaatctaattttaacaaaaattgtattttaatattttttttatatctaaatgaattttttaatgaaaaataattttttttaaaaaaattttctaattagttttaaaatttcaatttatttttaatctttttaatcattcaaaatgattttttcttaagatctaaattaattttttaagatttactaaaaaaattattaattttttttatttttattttaagaggtatgatttgatagttgttaaagtttagggaacaaagttattaatttacaaagaaatgtcagca

SEQ ID NO: 66707 - DNA, 990 bp, Cannabis sativa
aagagagtttgtttgaggatggtaggtgggcggagagagtaaacacgtgtggtgtgtatgtgggggtccctcccaagtgaagaaaggcccacaacccagcccagcccagcccagtgcagtacatttgttttgtaggctccaatccaaatgtgggtttgtgtgtgggttgggtttaagactcaattcagctcagccacatccacgcacgcctctaccaccataacccgttcctatgtttattcctctctctactcatccatacataccaaactgagcttaccataacactactactacctactcctcaccgaaatctccaaatatatacgtatacatatatgaattattaaatagaatatagggataataacactacatactcaaatttttaattttcttacttttatattgtggggcgtaattttttaaaaatactgtgtaagttttatactgtatattgtgttaagtttttactgttgttctactgttattttttagttgttccactgttatttttagtcattctgttttgtgctctactgatattttataaaagtacagtacttttaacaaaatttctgtgtgagtatttttgtaaaagttactctaaatttcaatattttttgtaagttttcctagaatatatttaactagtttcgaaccatcatcacttaatttggacgttttggaactccattgtttggttctggatctagagggactccattcattattctttttttttttttaactgaaaatccattcattattccctttatatttgtatatataattatgcgtgacaagcttataacaatgcttatccggccacgtttgtgtgcgtaaacgaatatctagttatatgtctattctatatttatgagaaattcctttcgggtgactttttatttatattaaaaattaaataattttttattaaaaataaaataatttatgagaaattcatgaatcactttttatttatatata

SEQ ID NO: 66708 - DNA, 1887 bp, Cannabis sativa
cgctcttccgatctaaaattttcataaaaaataaaaataaaaagactttgtgatagactttgtttgtttggtgattctatttatggttaaaaaagtgttctttgtatgattaacgattggagtttggaaggaacacaattttataataaactctcgttgtcaaacataagtttcagcgagaagataaattatatatcttagtgcaagcggtaaggtacatctattaatgtaattgtgcattgtaatttatctttattattttttttattattaaaaattttatttagagtttttctttatttgaattttgcgacatggctattatagaattgggtatgtggtaagtgcaaattgcttattattattctctcttattttttttatttttattttgtataataaagcaatttggttgatttttgtaataatattgaaatgtcgcatttgtaagtttgtcttcaaaatttaaattaatttttatttagctctaataaagtagttgcatacctcatttatatagttcatttagcatatatttttgttattggtaaaatgatgtgttttttagaattcatcaaagaaaccgggatggaatggaattttcttgaaattatttatcatcttgtataggattgaaggaattttattcatttatttatttgagatttttaatttattagatgctgtaattttatttggtctaatgtttgcaattttatatttaaggtttgtctttaaataattatatttattgttttcttatattattttgtaagaaatttatgtgtgttttatctttggtttttagtttgtacttttttcttagatggacctcaaattttacgagctcgtagaagaaatttttgatgtgggcattactgtggaagaaatgaaagggcatttatccttttctgatgggaagttggatggtttgaataatgcagaaggtagtcgaatggaaaatataaaatcagaagatataatgctgaactcattagcttcctctttttttgaggaaataaaatgtttggacattttgttatcaactcgtaggagaaatgaatgtttgaagatgacgctcgtcccaaaagatgagggaagagtagaggatgggttgattaagagcaacaatgattgtgttttaggcaataatgatgtgtaattaatttatcatgttaataagttttatttttctctatttgttatgtgataaaagtctgattttgaaaaaaataaaaagtacttgatttatttgggagatgtgaagctggaattgacaagatgatacattgtaaaaaatttatctatgataaggtgaaagttgctttatttttgcaatgcctagttttaaataccatattttaattttctataaacctagtaatcagattgaatttatacaaagatatgatatttttgtcaatatctttataattttttatttttttatgtatttattgggttgtgttttttttctatcctcatccattttctagttgcatattattaaaaaattaaaaaaaatcattataagttcattctttttttaattacatatggttagaaaactaaaaaagatatttatgcgtgtatacaataaaagtatacttaaaagtaaaaaaaaaaattagtattttttccatttctttttttttattatttttgtaaaaaaaaaaaaaaagtaactttccttatatattaatattacaaaatgattaaaaaaataatataaaaagaattaattaaattttgctattgaatatggggtcacacataaaaaaaaaatgtctgtatgtagagatattttttatgactctacctaagcattatcctataatataatatcttcatttgaaaaattatgatatttctaatattatatttcaa

SEQ ID NO: 66709 - DNA, 1952 bp, Cannabis sativa
aaaaacatatggactatgatgttcatctgtaatgttattttattaattattttaaattttaatattaatttgtttttaaatagaattgtgtatatattaatattgtatatataaaatgaataataatatataagttttaaaaaaaattataaagttttaataatgtatttaaaaaaataataaaatttgaggtaaaaaaaaattaataaaaaggtaatataagtgatttgatgaagttaaaaatagatactctctttagcctctcaccatagggaactgtaaaaatattttcaatagtcatatgtcttgcattgtgggacataaatgttaaacttttaatgtctaatataatgaaggactttaaaaaaaatattgaagaaaaaatattcactttaaaatattgaagaaaaatgttaaatttttaagcaaagccaatattgtagtattgaaggaaaaataaagccaaagaattaaacaaagtatttcaaataatatttgatgcatgacattatcatcaaatggaatattaagctatttcttcattataaaacacaaaagatattaaatcatggatgttataaaaaaatatctagttttgtgtaaaagacataaaattaaactacttagccataataataaaaggtgaggataggtcctctagaagagttgatgaagagccaaagcatatccaattttgtctagtgcttaccacatagtttgtagaaaatctttataacaaccaatttgattgggaccaaaaaagataatgacattagaaagggtccaaaactcaagctctagatccatcttaaaatgcttcatatatagttcatatattgatgattcattttcataaatatatgtagaaagagtaaaaagatagagataaagagaagtatgagatgagtatgtttggttattaattatgttctaccaaaatggaatctaaaccaccaatgtgaagaacaagttgaaggacaagaggaaaatagatcttacttagatcttgatcttatgtgaagataaacataaaaagtagtctattcactactctcataatcacttttttttatgtgtctattgataattttacttaaacctgtcaccatcatacatcagataagacaagacaacattatcttaggcgctccattaagccacttggtaatgagagagtatttttagctattgtaatttttctattaaattagttattaattgtgctcaatttgcaattggacccattaatctagactaacatacatgattgcttataaatagggttattttataattgtaaaaggatttgatttttagttcacgagtaaaaacgttattagaacttaaataaactttcgttgttgtaattaaatttaacattgtgaatagttcaatgattatttttaacgggttgaaaagttcaagaaacacaataatacataaatcataactctagtaagcaaaaatcataaataactttttcatatagaatttcattacaccaaatatagtatttattcaaccacacgaggttaagggggcatgaataagaatattattatgattatgattatgattattatttgagtcttattaagtcaagagttggtttgaggaaggcttgagagctttgttgaaatttaaggtactccttaattgaaatgggtggatatgctggtttttgggcatgtgcttttaacaattcttctattggttcaatctttgtatccatagatgccccatgtaccgacacaattgatattcttctgcttttcttattcaccactactctatgcttcacactcttgtacatctcattgcttaaaatctgccacatcatcaatttatattattaaagctaattaagatttttgttcctaaactttgatatgtactaaatcatgcctctgaacttttaaggtcggtaaaaatacccctgaactattgagatt

SEQ ID NO: 66710 - DNA, 2469 bp, Cannabis sativa
  modified_base (420)..(424): a, c, t, g, unknown or other
  modified_base (544)..(547): a, c, t, g, unknown or other
  modified_base (574)..(589): a, c, t, g, unknown or other
  modified_base (2112)..(2134): a, c, t, g, unknown or other
cggtaataggtccgcccctaataaccaaatttgttgtagtgaggcccactatgtatggccgaccacttaagctatttttagccattatttatcttttaatccatataatttaaatcttaaccctagttgaaatactataagaggaataagatgactatcattctcataacctaatccaactcaaataacctagtttttattctttgtcagacaactagaaattgagagccttcttctatagtaatttcgaattcctctttccttcttcttcattaatttcgagccattagtgatagagtacatgcccactcatatcaagtcaagtactcaatcatagtgtgaaagattgtgaagaatccaaccaaactgaaggagagaagatctaggttcagatattgataatgctctgctatagaaagnnnnnaagggctagagatctgaatagaagcagtcattatattccgctgccatcaatgtaaggattttttaatctcttatgtgtttatttcatcgtattatgaaatttatatttaggatgttagannnnagaattataatcaacatacatgttagnnnnnnnnnnnnnnnntaaaatatattccaacaactggtattagagtcatggtaatgatttacttacatgaaatatggatttaaaacgatgtttgtatgatttggatgtgttcatgttggtttatgtgcttaattgatgaatgtttataaattacgaatttcccataaaaaataattttattttcgttctagtaataatttatttggatttcttgtgaaaacttaagtaatttcagtttttacgaaacttgattccgattaaaaatgagaaagatatgaaggtttgaaaattttggtccattgggtgttgagggtggtgctctcatgcgcaccagaccctcggacaaggtaagctccgagcgcgtatcctcggacaaacccatgttcgaagacatggtgcccctcgattcagacatgatacgcacgcacctaaccctgaaagacgccgaaattcctcggccatagaccttacattcaccctcgcccgcgcacggaacaaccaatggtgattttcacccaaaaaaatccaaattttgtgattttttcaccatttttttagatttttcaatttcaaatccttgcatatcaatataaaatattaattttaatatttgaacccaaatatcaaattttaaaattaataatatttaattattttaatagtttattattaatttttaatattttaagtttaaatttaaaaaccagttattttatatttaattatggttacattttaaaaatttgttaatttcttaaaatttacagattatttaataacaaaatttgatattttaatattagatatattttaaatcaaaatatattattatcattttaatttgaagaattatattaaaattatcttatataataaattaaatattaaataactatagatttgaaataaacctagatatttttatagataatcttaccataatattttcaaatttataaattgattattttatgatataatttattatttataaattataagttagaaaaatgatatttatgattatattatatcattttacttatcagaaatttataaataatattatatatatatttaaataacctaaatatttttgtagaaatttgaaaaggcttaaaataagatattttggaatataattttaaaaattattatttatttatgattttattttaagataataattacctaactatatatatattataaaattgatttatttgattattttaattttattaaattataagatcagaaaataatataaaaaaatatctagttggttatttcatatcatttatcttattagaaatttaatttaatttgataaaataattcaaatataacttaaatattttaaaattagtttaaattttgaaattttgaaaagatattttaaattgtttcaacatcttaaattttcaaaattagttggttatttaaatgataatttaataatatataattattaatggccaaaaaagttcggggggaatttttaatggccaaaaaagttcaggggcacgatttagtannnnnnnnnnnnnnnnnnnnnnnattactaattagccaaaaataaaacattattacttacctattttattgaacttctaaattgttaacatttttcatagtaaaatctcacctttcaacataattttttttgccatagaaatttgtagcttctaagaaccatcatttagcatacaacgagatggtctggacacaagagaatgagaagatggtagaaagttaaggttaatcatctaagattataattgtaatttcatcattaacattttaggagaattctatttgcacctcataaaatgataaatacactttattattaaaaaaaatataaactgaataatttttaaaaattactctta

SEQ ID NO: 66711 - DNA, 1255 bp, Cannabis sativa
tttgtgtgtttaaattttctatgtcattttcctttgaaaaaatctatattattcttccttgaaaaaaaaaaaaaagttagttatcataatatttttttaatatttttttttgaaagaaacatgtgttacaacacacctaaaaggaaggtagagaaccattccaaattaactcattatctagtccaaggcccatcctagctatcttatgagctaaaagattaaaatccctaccaacatgagaaatggttagacttggactgaacgataacaagttcttaatgctacaaattacatcaccaaatacactattaatccaattacaagtattaagtttatctactatagatttacaatctgtcatcaagacgtccactggaaatcgaagcagttgagcccattggataggttgatgaacggctttagcttctgcaacagcaggaggaacaagtccagaaaaaggggtagagaaacctgccttcactctattacaaccatccaaaagaaccacgccaatactatgtctttccctttgagaatcagtggctgcatctgtgaaaagtttgaaaccattggaaccaaatggttgaaaccttgcagagactgagttacaacatggacctgatcttggcacctgtcttagctgcgcatccaaatgttggaaaaaatatgcaagactccaatcaaaaatatctttaggaggaatagaaaactgtttgtgtaagacattattcctttgattccataacgcccacaaaaaacaatataaaataccaagagaatctttatcttgatcaacaaccaatcccataaaaaaatcatttagatccatgtgtttattaatatcataataagaaacaaacctggaagatctccatgcctttctggatctgaagcagtcttgcatagcatgtttgatactctcatgggcaagtttacaaataggacatagaggagaatcaagaactttccgagaaaaaagagaagttgcaacgggtagaacattcgatgtcattctccagataaataatttaatcttgggaggaatagtaggagaccacacacgagaccaaaactttttagaagaaatgaaagaggaagaagaaggaatatccagggaggaggaagcaatatgataggcagatttaacagataaaacacctaaacttgtcttctcccaaatcagagagtccctaccataacaccctgcaactggcacttcaagaatatcattaatgatagaattatcaaaataagc

SEQ ID NO: 66712 - DNA, 1215 bp, Cannabis sativa
gggccacactagaccaagcatgttggggtttaccagcgttgaactgttgtaactctgtttttccgcataggccggttagtgtaaagacttgtaatattttgtcaaatattttgggtattccgaaacatgtaactttggtttgtaaagttaaaaattattgcaagtttattttcactctattttcgtttaaagtttaatttctcgtgcttattttattagtaattgcgtttatggattagggttccttaatcatcttgggtagcgtgcctaaaagttagggcgttacaaattcacttggaggcattctgatatgatagggatagaccctaaagtgatctgtcatcatttaaatatcgaccctagttacctagcaaaaatacaaaaaagatggcccttagactccgagacacaaggggcacttaaagaagaggttgataaattattgaccaatgactttatacgcaaggccttttatccctcgtggatttcaaacccacttcttgtcccaaaaccaaacgactcctagagaacttgtatcgactttttaaacttgaataaggcgtgtctaaaagattgtttcccactacccaggatcgacaagttagtggatgcaacagcaggacatgagctaaagacttttatggatgcatattctagatataactatatctaaatgcatatccttgatcaggagcatacaagttttgtaacgaatatgggactttattgttataaagtcatgccatttggtttaaagaatgttggagcaacgtatcaacgactagtgaatggcatgtttgagaatcagattggacgaaacatggaagtctatgtcgatgatttgctggtaaagtcaataaaaagtagagatcacactaaggatctcctagaatgctttgagatactcagaaagtttaatatgaagcttaatttaaagaaatcctcttttaggtttttctcgggaaaatttcttggtttcatagtaaatgcgagaggagctgaagctaacccaaaaaaaaacaaggccctaatcgagatgccctcaccaacaaagctgaaagaagttgaagctttgacaggaagaatggcagcactaaacagattcatctcgaaattaacgaataaatgccttccattttttttaatgttttatgagtcaataagagaattgaatggatagaagaatgcgaagaagattttaaaggcataaagaag

SEQ ID NO: 66713 - DNA, 1423 bp, Cannabis sativa
cacccaacgtcgatatctttgtcaaaggtaattcctatttttttcattaatttttaactgtaatcattttttttatgatttagggttaaagcaattagatttaaggttaggtctatgtttttagtgaagaatatgtgatttttgagatttttaagcttgaatctgtgttttggggagaatctgtgattttttgcttagttcgatgcaggtccgatgtagacccgactcaatggtaagttaaagttggaggggtttaaagttgaagaagatagcccgataggtccgatagtagggcccaatggccagtccgataaggcccaatggccaataaaaattgattggccatcgggccctatattggacctttgtcttcaacctatatccaatttttacatcacgatgcattgggcctgcagcggggatgcatcagacctgcatcaggcctgcctagaaaatgcatattctaatccagaaatcacagataaacactaacctttgacattgggtccttaggtcgtggtggtcgtggagaaaggggtcttcagtccgtcagttacgatgatcgtcagtcgcagtcgtcatgggtggtggagaagggtggtgtttgggtcgtgggttgtggtcatggtggtggttgggtcacgtgaagagggtagagagatagtggttgtttgaaagaggatggtattttgagaaaaagaaaaatgttgacctatttggctaatattgatatatataggtttaagaaattaattttaaggtaatatatgcataaaaaaaaatcgaatttcccaccctaaattatagctataaattataaatgtgagccgtctttttcaagcattgaagtacaatattcaattccaactaaagtaaaaacaccacaaaatgcaataatggaatatggatggacattaaatttaggtatacatattgaagcatttgtagataaaaataaaactcagattagttccaataacaaagtataaacacgagtaaggaaatgaataagaaaaggttattatttccgaaaatggtttaggtacactaatgtgctatgtaatttactataccatttattttacttttcagtttttaaaggtcgttgtcataatttggcaaatgtaaaatagaaaagtagcatatttgaaaaagcttctatttgatactttaatgtccacaaaggcacaaaatctcactttaatttgtgatatgggctcaagactcataaggtccaattcagctactcaggccttgctgttgctgtacttttcgaaacagtataatttataggttataataatggggttcttacaaaagtgttaaattttgagtaaaaatttataattttactgcacgctatttttttttacaaaaatactatctttttataaaataacgtaaaataacaaaacagaacaat

SEQ ID NO: 66714 - DNA, 859 bp, Cannabis sativa
  modified_base (823)..(824): a, c, t, g, unknown or other
cgtttctaaataaaaatatcactcctttagcttaatcctttatattttttttttaaaaaattatcttttttattcctttagtaaaattatttttaaataaatttcgtattcctttagctaaactatcttttttcacaagataatgttttttttctttaactttagttaaatcattttcttctatctctattttttccaaataaatttttctctcctctagttaaattacctatttttcctaaataatctattaaatactttagtgaaatcatttcttttaactctatttttccaaataaaattttcaattctgtagccaaattctctattttctcaaaaatattttttattcctttagtaatatcattttctcccaattctgttctttcctaataatttattattcctttagttaaatcattttttcctaactatcttttccaaataaaatttcattccttcagccaaattatctatttttattcaaaataatcattttattcctctctctctttttttttttttcaaataaaattttcactcttttagccaaattatctattttctcaaaatattttttttttatttcgttacttaaatcattttctcttaactctaattttttgaaataaaattttcattccattagccaaattatgtattttctcaaaataatctttttattccgttagttaaatcattttttcttaactctaatcttttgaaataaatttttcattccttttagtctaatgatctattttctcaaaataatcttttttattttgtttgttaaatcattttctcttaaatctaccttttnnagttctcattcctttattcaaattccctatttttc

SEQ ID NO: 66715 - DNA, 2321 bp, Cannabis sativa
tagtctgcaaggcaaattataattaaatttcttgggcatctcatttttgtcttgtgtggcagattttttcgccgattttttttattattgtatatttgtaatttttaatattcaagttgatgaaattcaattcatacttttttgaagctgttataataataataaaaaaaactttttgattcaattgcgatgtattattgttttaatttctacactacatatgagcttgagagaatgaagaattatatagtaataatattatggagtttaatttccataagaattatcttaattatcaatgccctgaaaaattacaagtaattatcaattcaagaatatcataataactagaatcacagaatataacgtttttgttaattatttccattaataaaagtcattttactgattagtcatatacttattttaaattaattaagattcaattttgtccatgaatatttccagaaagatatatgaatattattgtttttttagaaaggatgaatattttatttttgttttcagaaaacgttaacatactacttaattaatttttttaattaatttaaataacaggtatatatgtttttatttatagaaaacaaatttcactttcatacatcttagtcaattgtcattattaattaaaagattactgagaagaaccctaaatatatattattatattcatcatatctgaaaccgctaaatctactcaccattataaataaaaatatacaactattaatgaagatatatatgagcactcctttttctttttcttttttgaggaaaaaaagataatcctttaaaaacaatacaaaaaaaatacagatacattaaagtcaggtatatgtctatatatatatatatttaactacacaagatttatgatcaaattttgaaccaagtgctaataaattattaatactctcaatgcaatggtaacaattatacaagtacacccatatatattattatttgaaacaatacatgatatatgatgaaaaataataataaaacgcaacagacacaaataccagaaatatatatgccaaactataataattatggatgaaaataacatctggggatatatacaattaattaatacatacattccagaattgttaattagggcgtcagcctaattgcagcagaatttccagggtcctttgactcatccattgaattttatggtgtacatatatatttgtttgccatctggcatgacttaactaactataatattatatgtatatataacttaatatatactctaaacttagtttcgtccactttctccttatccaaacataacatatagtagttaattatagtatgtttattatagttttcgagttaattaattaattaattacgaacccaagtttaaagggttgatagatattttaatgataatcaatcacggattacctaagagtccaaataaattagaataccactgttccattcatttcagcctcagtggaaaaaattgtctaaaaattcggctacatgatataattttggcaggtttgtaaacttgtataacactgtatctatatatatggtcccattcaacacgtatatataattacagatatttataaaatattccctttgtaaaaggtacaggtccccacattagaattagatcctttgaaggagaaaatgtctcttatcattaattaactaattaggcagtttttcaatctcagtcttcgacaccctgctgaaaattctcactatacacaagatcattttacaaaaataattattcccattagaagaagaaaaaaaaaactattgtcatgtcaccatttctgtataaataaatttcatctgattttagattcttaatcttaacttaatattcatctacttccaattataatacgaagatgcatgtcttggtcgaaattcgtttaatgattaataatatatattgagatacgtacataataattcagagttggacgcatcatcatgattgtgtgtgtgtgccatttatattaattaaataagctcatttattcagattcgtatcaaccgttggatttgtacattgctcctagccttattaaaatttgcattatttaatgtttttaaacctataacagttaatttgttataacaagtgttttttattttactgataattaataataggaataaataaataatgaatgctaaaagagagtggtggactttagtggggtggtaaggtaagtcttgtcttacagattgggtttaccaggtgggtatgtgatttttttttacttggaacttgaagaagacccagataaatattaaat

SEQ ID NO: 66716 - DNA, 723 bp, Cannabis sativa
aatctaacatccaatatatgattagattggatctaaataaatttaaaaacatgtggtccaataaatacccctaaataaaataattgaaccgaagaaaacatgcaacatcattttctttgtaagatgccttctttttttaataattagcaatgataatataaattaatacaatttattatttaaagttttttttttaatgaacaacagatcttaatattatttaaagtttgatgacaggttttgcataagtacaaaattaaaataagagaaaattacaacatgcaaacatgtaatttaaaaaataataaaattaaagtaccatttgtacacaactactgataattgtaattgttttagcaaaaaaaatgtaatttattggttgatggaagcatacatattaattataatttataagtacatatatttaaataatcacatgatagatgtgagctttaaattattagtgttaaaaagcaaaatcccatattgaatcagagaaaatattcaacctcatcacaataattttttttttattttcttcatttatagtatttattctttatttggtaagtctacggaaaatattatttttaaaagaaagaaaatcttttagaaaagatttcttcatatataaaacaaacatttgatggtaattttttttttaaatctggttatgaattgtttagaaatggaggtgtattgttatatatatacatatatata

SEQ ID NO: 66717 - DNA, 955 bp, Cannabis sativa
aatatgtcactttatattaaattatactagaacaatgtaatgtattatggtagtgttagacttggttcccagtgtttttcttatttttttatgggcttttggtgggggtatagtgtatattgaaaggaggtatggtattaaggactcataacaattaaattttaatataatttagtaaggagaaatgctaaaagtattatatcactattataacaattaagtattagatctcatattatttaatatattaacttttatgaaatatcgttaatcatttttaagacatcatctcataataatactaaatgccactgatatttaataacaatgctcttatgtgacatgtattaagctcttgtgatattcacaactagtgagattttatcattttctttaaatatatatttatgtagttttattaattaattactaacttttgtaatgtttttcttttcctaaaagatttgatagaattaattagtttgatgtttcaattaattaatgaagtttgatagtcaacaattttttttttttttaaaacttttgttagcgtagtgttcctagtggttccttgtcctattttgagcattggaagactaaggtgtctaacactaatatgagatgacaccatataattagttagcagttttttataatttttattaaaataaaataaataagattcaatatttttttttttgaaggaaataagattcaatattaaattacactaataacaatattacaatttaagtacaatgagtaagttttcatgtcaaaaaaaaaaaaataccatgagtaagttttaacaattctcaccatatttactacattttcaagaaatataaaattatgtttcaaaatttgacacatgcataatattaatgcgaaattttaaaaataaattattattatcattactttagcaatgactattttttttttttatatatat

SEQ ID NO: 66718 - DNA, 808 bp, Cannabis sativa
ttgacttaaacaaccacttcgtaattgtcgattgtaaaaaaaagtcatctcaatcgtgcatcatccaggaaatttcggagactaatggagactcgaagcttgacagaaatcaggtttttcaatttaggtccgtggagacttgcccagaaatgtctccaccatccaactgagagttctagcttggaactgtcgtggtctcaggaatgcagcgacagttcgacaactgaaggagcttatccggaagttcgatcccgaagtcttagttatttccgaagtaagactctcaaatgaaaattttaactgcctaatgtctaaaatgcacttctacaatctatcgtatgtccctcctttggggtcagcaggaggtctcgcagtgtgttggaggattggagtcgggtgtttcatccaattcgctgataaatacaaaatcattgcatgtattacctcagatcctccagataaaccatggctcctaattggggcttatggtcctccctcttatggagaaaaagaagcctactggaatggaattggagattttataagtgactgcatcctgccagtgatcataattggcgatcttaacggaaaacttatggatagtgagtgcctgaactatgtcacctcaagtaacattccgtgatattcctttgatcttagaagaacagttcgtcgcactggccttattgacttgaggtatcaaggggtgaagtatacttcgttcaggaaaggatcacgctctccgacgggtacctgcttgaaaagagctaggctcgacagggctttaacgtctgtcgagtggaggctt

SEQ ID NO: 66719 - DNA, 793 bp, Cannabis sativa
aaacactgcctcaaatccaccacaggccctaccacagatgaagcttgaagcttggtatcttgacagtggatcttctcaccatgtcactcaagacaatagtaatctccactagcaacacacctacaaaggcaaagaaaagatcgttgtaggtaatgactcttccctatctatacataacattagtaatcgaactcttgctgcaagaaaatccctttatctcaaaaacatacttcatgttccagctatcacaaaaaatttgattagcatttccaaatttactaatgacaataatgtttctgttgaattcaaggacaatcactcgaagatccctctccttcggggtgcccttaaagatgggctttaccaactagcacccaagtttactcatcaagcaaatatgtctcctcagcattccaactcctctgctgcagcaaagaacaattctttgtctcaagcaaatactgtttttgcttttacctgtaatagcaattctgctacaagcaattccaactcttgtaatataaaagattccaaacttgtatctttgtggcataatagacttggccaccccaatattcaagttctcaataaagttcttaaatttcttaatatttctactactgacatgtccatttttcatgcttgccaatatggcaaactttaccaattttcatttcactcttcccacaacagtactcattctccatttgaaattgtgcatactgatctttagggaccatcccctcatccttcacccgagggtttcaagtactatatttgctttattgatgat

SEQ ID NO: 66720 - DNA, 659 bp, Cannabis sativa
ttggcacgcttgaatttggacttgagataaaaaaaaagtacaattgtaccacatagcatgtcaagatatgatttggttaatactatttataagaaaaagttattactctaaatgttatctcattaggcaacaatataaaaaatagttattactctaatctaaagatattgttaggtttcttatttatcgattgtctcatcaggcaatgatagtgacattgagttacctcattaggcaacgatataaaagttttctcattaggcaacagtgagtgattgttactctattaggtattagtttgtcttttagacaaatatttgttattattaattgtttatgctggataacgtgatttcttgcttgtgaattaagtatatgagaatcgagttatgatataatgagtatgtctatttatatttgtgtaaggatgtaagttgtttatgtttttgcttttcttatcgagtctttgtgactcacgggtgctttgtggtgtaggtaagagattgaacaagctacagaagccatgagttagaggtcttcctcaataaatgtacatatcagtgctgaaggctagagacctgttctaggagggatgcacatggtttctagcagtggtgttagataccacttggcctgagtcaattctacctgaagatatc

SEQ ID NO: 66721 - DNA, 1678 bp, Cannabis sativa
  modified_base (49)..(52): a, c, t, g, unknown or other
  modified_base (102)..(110): a, c, t, g, unknown or other
aatttctcataaaccatttatttttattaataaaccattttatttttannnnaaataaaaagtcacccataaatttttcataaaccaagaattctgttatannnnnnnnntttatatagaatagatactaggttgatgttatgtataattatttttttaattaggttcaataaagtgatgttaagtgcaatacatgtatgtttaatttttgatatataaatattttatttttattgtacaaattattgtttgtaaataatttttgtctgtatacatacttttttaagaatctttattttttattataattgaattttttatggtttgttttttttttttgttttttttttaatatatttttcagattgtgaaaggaggttcaataatttttgccacattattttattttggtttgcaaattggagaaggtgatttacaatttatatttgtgaaaagtatattttctgttaaattggaattagaaaatgtatgttatatagttgtgttaataatatcactaaaaatatatttattagttatttgataatctgtattttttaatggcttatgttaattcttttgtggaatgtcatgatataggtttaaaatattgggtatgttaatatagagttgttatgttgttaaattttgagtagaaatttaaaatattttcttataaatttaattactaaaaaatttgttattatacaaaaaaaattaattatttatagaaaaaaaattaaaataaagttggtagtaacaaagatgacacgaaaaataattattttcattttgtaatggtttccatttatttaaagttaatgctaataattggagataattggagatgagcattttttttttaaataaaaaataaaaaaataaatggtttataaattatttattaaaaataataattttaaaatgttaatatttattaatttttttaaataaattttttatttattaattgtgtaatttcaattaatatttttttgaaaattattttaatttaagagtaaatactattttagactctattgttttgttaattcacaaaatagaccatatattttctaaaatggtaaaaataagactctgaggtcaattttcaacaattttattttttaatataaccaactttaagaaattttaacacgaacagatacaaaaaatataatcagttttgtcataacatcaaattattattaagttttattttgacaaaaaattagttcagagtcttatttgtacacttttaaaaaatataggatccattttatcatttaacaaaacagaaaattgatcaattggtaagttttctttaaaatagtatttatcttaaatttaataatactagtatttttgataaagtaataaatttattagtctccttctcagatctccttgagaaattcaaaataagtttatgtttggaacctttccactcccacacaagtacagctcccgacatagatagtaccatgagaatgttacaaatagatctcaatgattgtatggattaattaatttatgtaatcatttaaatatttataaatacaatatttgtgtatatgtatattttgcgaaagacagtattaacttgtttgaattaaacgtaatattatttttttttttttgaaaatgaaatagtaacttcattgaataattagcattc

SEQ ID NO: 66722 - DNA, 932 bp, Cannabis sativa
gtggtgtttattcaaagttttggactttagctcaaaaactatgatttttgatagaatgtggaaatagttgttgtgattgttaatggtgcttgagtttgttttctggggttattacatggtttcttagggtgaattaaggcaggttcgatgcttgttagttagatttaaccaagcttgagttttgaactcaaagcttggagctctaatgccatttttcatatctctggtttctggatggttttgatgctttagaattattctttggggtatttagaacatgtctggaaggtttggtatgatttggggttgaatggaatgagttatgaatttttgattgattcttgcgaggaaacagaattccggatatgcaacctgaattccggatggggttcaggaattcccagaactggaattccggttgcagaatcggtctgccggttgggggatttttaggaaccctagttttctagtttttatgcggtttagggtattgccatgctttttattcatagggaaacttttagtttctaattcaagtccccaggaagtgatttagcgtatcacttatcagtgttttgattgttatggtttaggagcctgtaaagcgccgtgcagtttgttccactcaggttgactgacacacctgaattcggaattgagctaaaattagtataacagtatgcacatatattacatgtttagcgtgcatgttaagaagcctgttagattacattagatatgtatgtttgcttcgtaccattcgaccatatcacatcggttgggctagagcatgactagcacctggactatgaccactgaaccgagtataggctgatactaaggttggtggtactgtactgtttgaccgtatcacattggttaggctagagtatgactagcagctggagtacgaccaatgaaccgagtatagg

SEQ ID NO: 66723 - DNA, 758 bp, Cannabis sativa
actcttaggagtttttcttttgggatagttagtctagttgggacctctccaagcagttcatgggggaggaaccccagctccctttgaatgttaggtagttaggatggctgacttcttggattttcttcatttgtatagaaaccatgcctaaacagactcattgagatgaagctgactcaaaggaggagattagggagtaggaaaatgctccaaaatttatcctaaatgatactccatgggagatcaacagccacataaacatgctcaggatcttcaataatctgaggaagtacgagacacaatgggggcttgaaagtgttctagggctgttctggaacaggctctccgttcacagggaaaggcctagcaagtgcatagaaggaggcttcagcgtctggagctaggctcatgttgagtttctacactgtttgaagaataaaaaaagagcatgtttagggtttgtattattgaagttggatatgagcaaagcttttgtagagtggaatggcattcactaagacttttcatgcttaagatgggtttcgctacaacttagtaaatcttattatgagatgtgcgacatcctaaactctcacttttaaaatcaatggtgcagttaaaggctcaattgtaccttagagaggcctttgtcaaggttacctaatgtcaccttacttattcttaatttgttctgagatactctcatctttattaagacaagtggaaaatgttagaaaactcaaatggttagcgatatc

SEQ ID NO: 66724 - DNA, 833 bp, Cannabis sativa
  modified_base (683)..(685): a, c, t, g, unknown or other
tcatgtgtatcattatctgccttaggatgtcatttcctatctcatatattaacatttaaggatcatgaaattgtaaagctaaaaaattctcaaaagatttgtttagttactgatgcaatgtagctattagttattgttgacggtaagaattcgtcaactaaactttaattagaaaataaaatgcaaaggagtgaagatgaaaagtttaagagaaactcaaaacattaatggagaaaactgatgttgtattgaatttctaaactcccttacaaaagattatttgtcaacccctttctcaaatgaagagatgggtatttatagagagctctaatggctccaaaatacaagtggtcccaaaattaagggacaaaatatcttttgtaccatgagggtcagcgtgtctgatgggtagtagagtagtgttggttggatgtcagcttgtacctagagttagataaatagtgtctccactgcttgtagttgctgtattcgttgtacaaccaccttctctctttaggctttattggaggtgtactagctttaacagactcatcattggtcgtacatccctttagtattctttctatcaccacctatacttatgatgagggagcaacacttggtaatttggctaagtgttgagagagggaataacacttgggtggcgtttggtaacacttttnnnttttaattttaaaaacagaaaaatgaaaatagatttttttgtttttaaaattttattttcaaaaaacaaaaatgtgttctataactacttttgtttttaaattttaaaaacagaaaacaaaagtatgttttgtaaccacttttgtttt

SEQ ID NO: 66725 - DNA, 563 bp, Cannabis sativa
gttcagtgtcaattgtgccataagctgggacatacagttgtcaagtgctttatagattcgacaaatcattccaaggactagaaactctataatcttttgtaggaagtgccaatattgctgaagttgcacaagcctcaccaaaaatggttggtgactccagctggtatccagacacaggagccacccatcatttaacctctaatgctcataacctatcattcacacacactacagcaaaagtacactaactgtgccggcacagctttgtcagcgcaatactacgccggcaaaacatgttagtgaatcttgatcggtaaaggactttttaccggcgcgtatgtgaaatgtgtcggtaaaatatagttttaccgccaactaattgtgccggcaaaagtgaatcgccggtataaaaggatacccttatccgctctgaacctacttttataattttttgccaatgcaataatgcgtcagtaaaaaggttcgcaccatttctcaaattggcgcaaaaagttttgccggcactataggtgcgccagcaaaacttttcgcgccaatctgag

SEQ ID NO: 66726 - DNA, 1233 bp, Cannabis sativa
acttcaccatgaatagaatcattgatttgaaaggaataacgaacagatgaaacacatttcaagattatattcacccattctgtctaaattcactaatcgattcaggcttttgaactttaggaataagtgtaattagcgaatcattaatactttgcatatctgccactcctgatatacaatctaatactgctttagaaactaaagggacaacaatatcccggtgttcttgataaaacaaggcactcattccacatggatcagggcttttatccacaggcatactaaaaactgctcgttcaacttcttccaatgtaaaggtcttcgtcaatgtttcattcatgtcatttgtaaccacttcctcgacagcttgtaacaactcctcaatgctttcatttgtaggcataatcgacgtaaagagtgcagaatagtaattttttatgatatcacctatggcatcgttactcgtacaccacatatgatcttcattaaataaacctaaaatgcacaaccaaaataatcttaatcatttgatttataaaatacttatggcctaacaattcatattcctttatacgtcatttcctctatacatactttacctcattgatgtaacttgtatccatcaaacctatctatttaagttaattcataacacctttaagaacataacctatatttaaaagcatgttagcatagttattagtacataaccttaaccttaatgatttgagtttgaaacacctttcctcaacctattctgagccactcatgaaagatcactagttaaacaatttaatctatttgttgccctaattaaaacatatgtaaatcacatccaacaacaattatattaaattcttatccaaaatatactttactctatatttaatttacaataataattacctcgaattgtattattcgttcttcgtgcatttgccttcttgtggaaaaatttggtattccgatcaccagcttgtaaccattggacccttgccctttgctgccagaagacctcctcctttaacagcagatcattgagtttttttctccaattgcccagatctttcgctggaacatcctttactttgcaaattgtgcatttgaactacttttttttgcgcatcttaaatttctcgaaataaagatccatacttattgtgatgccaagtatccaggtttgaagcacattgttgtatattcttgatagttgaaatcagtggtgtattttcc

SEQ ID NO: 66727 - DNA, 586 bp, Cannabis sativa
atattggtggtgttatttctgagggtaaatattggtggtgttatttctgaggctgattttatgcaataaaagctttttacatgaatttttgaaacgaagtttgtttgattttggggtaaaaatatttggagtaggaaaattgatgccaatagttttaattaatatactgacaaagaagttttcgagaaccaattataaccttcttcgtgttacaaaatgttaaacatgttccctacaaattccaactttaacatctactattactattctatattattgttacagcaacacatatagtttggccttaaagtaagtatagcacattcatgtatgttttaataatagtagttgtaggatgagcctcaaagtaagtatatagctcattcatgtatgttttaataatagtagtagtagttggatgaggcctcaaagtaagtatatagtgttagaatatttttatgtagtaacaagtattgtttacttagtgtcggtattagtatataatgataactatataaatcggtaatgtatggtattattattaggccatattagaatgcatataacgtactaacacgctcgggac

SEQ ID NO: 66728 - DNA, 736 bp, Cannabis sativa
aactacgtaaaaaactctcttatcatttattgccattcttattattattattttataattaattttaaagtttatttattacagaaaaggatcattatttagttaacttgttaacagttaagtgcttttgttgagagtctttgtaataaaactaaaaaaaataccctccttgaaataagttcgaatcattcactcttggcagacgatactccacgaaacaaagaagatcagccaggagagataactcatcatcctggaaaggagccccagacttcacacaggatgaataccattaaaactcctcgtttttgaagaaatggtggagattttgatcaaactggggaatagatcctagaaaggtgaagcaaggatgcttatgatctaactagatatgttccattagtggaactagaaaatagacaactccgacagtatctggctgaatcaagtggaaggaatacaaagctgaagtgtgagacagtgacaacaagggttgcacgaggtgatgcccctctaaattaacctgatacatctgctagatgacctcggggaagacccagaggctctcaaaccaggagacatggggacacccttagagggaacaacccagggaatccctcaaacacacaagaggaacaacctaagaacatgaaagacatcccaatggatgaagaaaatccccagaatcttgaaaacacgattggtgttggaggaatttagacatcaccgaaattca

SEQ ID NO: 66729 - DNA, 4797 bp, Cannabis sativa
aattgtagaaactaaaatgacacgcgatattttatacgtggcatcaacaatccttgtagattgccactagtccatagggccacacttaaagataagattcattagttaaatttcaacaagtacaaagtaattgacttaaacaaataattttgccacaagcttgatgtattcctatttgctgaatgaatctccttaagacaccaaggtttgaagtcccttaaattacttggtgaatgcttgcttcctcctgatgcaagacttatagaaatattctcccaaagatagcggtgcttgcttcctcccgaagcaagacttgtaaaaatcttctcctgaagatagtggtgcttgcttcctctcgaagcaagacttgtagaaatcttatctcgaagatagcggtacttgcttcctcccgatgcaagacttgtagaaatcttcttccaaatatagcagtgcttgcttcctcttgaagcaagacatgtagaaatcttctcccgaagatagcggtgcttacttcctcttgaaacaagacttggatgaactttctcccgaaggttgttctttatattctgtactttgaaatttatttcacataaaaaaaatctcaaagacacacaaactcaccaaggaataacagaactatcctttacaaaagaaacattctcttctataaatataagaaattaaaaagtggaagagctcaacctattgttgctggtttaggtcatatttatagtgataaatgacatccaaaaccaagctcaaaagttatgaatacaaagagaaaatattaattagtttttttttttttttttgcaaaaactcctttaatgacaaaattttattgaacagatatggaaaatgtgcagataaaatcctaatctgtctagttagcattatgaatctagactctaccaaagtcaagttcatccccacaaattttcttttagacatcacacaacttaactgaagagattaatgtacatcatatcaaaaaatgaaaataaatcaattgcaaaataaaagtacaaaaaacttgcatttttctctaagagttttttccttttttttttttgtaatgtaaattataatttttggtaaatttttatacttttacatttaaagattttttttatatttttacgttgttcataaaaatagtacaaaaataacgaaaaaaattgcataaaattaacaagaaaatagcattcaaataatataaaaatataataagaatataatatacaaataagaaaaaattaacaagagtacaatataaaaatacataaaaagaccgcattttatgtaaatgaaatcttaaaaattacaaaaatatttaaattttattgtatttttgtatttttgtattttttttattattattacggttttttttttttttaagtaatcctttttttttttaaccaaacacctcttagactaataagaagtatctcttcccttacccagaaaaaggtatctcttgacttgactttttttaaaaaataaataaataaataaataaaagaggaaaactcatcccacataaatgaaattggtaaattattgagtttttatttgataaaaagaaaatatcttgtgaattattacattttctgctaacgtgggtggtgattcatctttttatcctgtgcacctacttcaactaccaatatattacagatgaaagtgacttatgatgaacaatatttttacttttttcattgtcacagtaatgaaattgaaataatagtattataataataataataatttatttatggatagaaatagttaaagtatgaaaattgtagcatctatctatgttttccatttgtagagaatttatgatttataattaaaattctacaattcaatttgttgaaagatatgcaaataaagctgcccacgtagttcttgttttttcacatatcgtgttttttaagagtataatttgtctcaattacgtgctattgtaagggatgaagcttcattttaatgaaaattttattttcattaaaaaaaaattcaaaataatcgtattcaaaaaaaaaattaaaataatcaattagacgtaaaaaaaattaaatagtatgtgaattatttaaaattttctaaaacttactagaacggctactataatttcaatgtatacccacataaaaaatttaattttttattgtgaaaaataaagatgtcctagtgcttggggcaaaaataatgtccctacagtaaaattttttatacatgagcacaatagtctagggtaggggcggacccacattgtagcgactgccccctgaaaaaaaattaggaaaaaaatatatatgtattttagttagttataacatatatttgtattaaaagatgatatttataaacataatagtaagcttggtgtaatagttaaggtagattataaatatgttagagagtaaatgttcaaatcccactaattacacttcattttttttctttttaaatttatttttgctctctctgcttttaaaaaaaattacgctccccctcactttaaattctgagtccgccactggtctagggttgaacatcatgcgggttgattgagtttcgagttgacatgctttgagttcatgggttttgagtaaaaggatgaattcgtactcgcccgttcacgtgttgcggggttggcaagttcgggttgaccaggtcaactcctttttttctttttaaacctaaattttatatagttatttttgtctactttatttatttatgaaattaaacataacaccttaacctaaattctctagaagaaaaaacattagtttcaaattcaaagtacaaatatcaatccaaaccaaacaattaccaacaatcattcatcaaacttcaattcatgataataaaaactaaaaaaatcccaaaataaaatataaataaaattccaaagtctatcctatatagcctatagtctcaaagcacaacataaatatactgagtttatcctataaaagattatcacaccaacacaatttatattttttttcagagcattactaatttactacactagtagtgcctagcagtagcactacttagaggtggcatgttgcgattgaatagagatattccaatcaaaaatattacattaagttctaaaagatcaatacttaattgtaccaatagcgatataacacgtcatgcatatatttttttgtgtaagattttgaagatacaaataataaaaatacatcaaaaaaatcgtattttttttaaataaaatcataaaaatcgtttaaaaatatttaaaatttcatacacccagtatttttaattttttttttaaattatcatgaatacatttgcaaaagcatataattaattctcttgctaatcttggtgaattacacaataattgtggggaatttttcctttccaacatgaaaaattccaaactagtagtactaacctcaaaagatcagacctataaagttccaaaaacaaaaatagcatcattgttaaaaagaaacaaatgcattaacagagtggaaattttgacatttctccatatgaaaatttccaagctagtactatataactcccaaaagatcaaacctacaaagctccattaacaaaaatttcttgggagatagtaataccaaaaaaaaaaaaagaaaaattgcaccaataggttaaagtcacaagcataaaaattatgaaggagatgatacaaattcatgtctcataatggtcatagaaatcttcaacaatttttttgtttccttatctttttcttcttactaatcccagtgagaaggaagattttgatggggttcatgagtatctgaccccatgctaaacatcccagaacagtgaacaacatcagtagtggcaccatttccattagtgaccaaaactgagctcatgaaaggctctaaaccattattatgagtttgcagggtgggatgttgttggtgttgccctgccattgagattgaggagctaaggtgtgacattatgttgtgtcccaaacccatctcagatgtctgcacctgcggtggtgacggtgatgacagaagagagagagcacaatccgagttatggattcgttgtgctgttgtagaagtagtagtagttgttgttgttgatgttaatggcttgtcatagaacaatttgctcctaggcacctcattacattgttgtgacaatgtccttagaagaaggggatgatgatgatgatggcgtgctgaaacttcaggactatgtccttgcaaaatcgggaatagcttgttactactaccatctcctttgtagtttgtattgttgttgttgttgttgggagaggttgatcctagaaacatgttatgtttatcaagaaagggtagctgttgttgatgatgatgatggtggtggtaaaggagactggactctggctcggttttgactacacatcctccccagttggggttcacaaccgctgtagagggataaacgagtgaggatgaaaatggtaacatctgagtacctgcaaataatagtagaaagtattctcacttcccaaccttcttctctttccccgaaaagggatgatcaaaaggggctcctctaatgttcatgtttagttcaatagaaaaagtggtattaatgtgggaaaacatgagattataagcttttaatccttgggaaattaacaatagagctcagatttgtggctatgaactcatgatatgtgatcacaaggcataaaaacattaaggaattactcaaccaagtaaggtgtctagctagaatgattatgaaaaacagagtgactaacct

SEQ ID NO: 66730 - DNA, 618 bp, Cannabis sativa
tcataatcttcttgaggaggctagctcttttatggacaattaccttcaagcaaggctaaacgactgcatcaatagctcattggccaaggatcaatcaggcccttctgagatttggacccctcctccacatggtctcgccaaactcacaacagatgctacaattgacaggcgttccaacaaatcaggttttacgtgaattctttgtaatagcaagggtgccaccattgcagccattgctacccctttttgagaagtgggggaagcccacattgaagaagcaaaatctctaattgtctccctctaatggttccacaaagaagcattcccaattcacttcattgagacggattgcaaatctttagtagatgcaatggcaaacaccccgaacatcaagtcagtacttggagatcatctcatttcccaactgaggtcatttctatctttcttttcaaatgttcatctcaaccacattcgaaggacagcaaacactattgcccataacctggctaagagcgcgcttgggattgaagaaggtacttgttggattggtgatgaagctcgttgttactcttcaaatcttttagtctaacagcctcttttctctcaaaaaaaaaaaaa

SEQ ID NO: 66731 - DNA, 931 bp, Cannabis sativa
taattaaaacctaacacaattaataaaagagtaaataacatttttgctcttataatacaaaaatcattgatcggattttttatattttattaaatataataattcacaatataattttaaataatacaaaataatattttaaactcaacccaattttaaagtattataaatgaccaagagattcatgctagtactacaaaagttcttttttttagtcacaactcaaaagtaaaagaattgtgactaattataaatcataattcatatattgtgactaaaaggtccgtggctaaaggttagtcacaaaaattataattggttgtgactaaaaatatttttagtcacaatacttgttgtgactaaaactaattagtaacaaattgtatctaaatactatactgtagtcacaagtaacatttattgtgattaaaatcacattttactattggtttttcctgacgttttaaacagtcatttaaagtattcccacgaattctataactgttgtttatacgaccgtcgcaaaacgagtaaaataggtaactgttaaaaatcattgctactgtggacttctcgccggtttaaaattgtcgcctataacagagtatagacgaccgttttaaaccgtgccatatactataagcaactgtacataactacaatgtatatcatttagttctaccaaaaacaagaaatatgatctctaatcagacaaagtgatgtccctatcataaaattttccaatatataatagtaataagccattaaggataaacatttttatgttttttagtaattttcaaaattggtatgtttaaaatcgatagaagtacattaaaaatttataatatctattctatataaagtgtgtctatataactgaattcttgatttatgaaaaatttatgggtgactttttatttatatttaa

SEQ ID NO: 66732 - DNA, 1316 bp, Cannabis sativa
ttgtcatttaacaaaacacagggtccaattggtaacttttgtaaaacagagagtccaaaatggtatttaccctaaaaaaaattacaacatatatcaagaaaaggaaaaaaaaattgcttattgcttagttttgaaatcattagggtcaatgacttattcttgaactccagaaaaatttcaccgattattgcttattgctttctttctaaagatgagatctatattgtccatctctatcaccatcatcgtgggtttttgttgttttctcgctcgattcgtcagtttccttaattgggttttttttttcgatttttttcttgtatttagactattttttaaggttaaaatcaagggttcttttcataaatgggtattttcagaaacgcacggtggcagtgatgcgactgaatacaaatcggtaggtacgaaggaggagattgtggtggtggagacggagacgaagaaattggtcgagtcgaggatcgaagtgggtgagttgggtggggcagagggagtgacattggaggaggatttggtgagaatgaagcagagactggtgtcgcaagtgttggagattgggattatatttcactcagtcattattggggtgaccttgggaatgtcttagaatcagtgtactattagacctttggtcgctacattggcgtttcattagatttgtgaagatcgattcaatggtgcattcaatttttatagattattatctgtatatattgccagttatgttacttaaatataaaattatcaatttattttctctttcctcgcattttctcaacctcttcttcatcaacgtttctctatttagtacacagcacaagagatagaagagtctgcaacgacgtctgaaattggaactgatgttggaagcaaggtgtcccctgataaagtcaaagatacggtatgatccacataccaactctatttattggagatgtacaacatgttctacatgattttatatttacaaaattttaacttactaaaaagtagtacatccattatttgttttacaacctttgccatctatgcagttgaagtattatttttatctctgttgaatgtttggaatattcgtacttttttctattctgcgctaaagatgggtttaaggatctacgtattatagagttataataggatggttggccatagctaggtcctatacaactttgttttaccacaatatttgagaaatttggagcaaagaagcattgtgaggcaattgtttcctatgatggttttatgatgggtaaattgcggcataaatgcttaatgtttcagattttatacac

SEQ ID NO: 66733 - DNA, 753 bp, Cannabis sativa
tctagatcctggtaaaataataccaacagagtgctaaactcaagaggctttagcttgaaggctagatctcttatcatcactctcaatggcggctttaaaaagcttagatgccattacctttccaccacgcaacttgtctaagttcttagactttggcacaattagcttagctctaatgaactgagctacatgggggtcatactcatcaggtaaccttctacttctctgcaccctagccatgacagcttagcaacacaagttgcttacaactcaagaaaagtctaaattgggttgaaaaagtcaaagcaattttagaagaatttttcaaggtactaggaaaatgttttagaattttggagatcttagagaaaatattttaaagatttttgggagtctaaaactctttggagtaagatcaacaaaggaggagaagaagaaaattctaaaaaaaatggcatcaatttcgaaaaaaaaaatgttttttctaccttgggatgagtacgcttgaagacttgatgaagatgaaatttcaagaggctctctaaaggtataggcgtgttggagagaatgaagaagtgtaaaaattttgattgtcaatgctcttatttataagtgagttcaatctcctaatcctaaagctaatgagagtcttttaaatttaaaacttttaaggaagagctaaatgacaagtaaaagatataaaattatatcttttccctctcctttttagtggaattcgaaattcctatgcaa

SEQ ID NO: 66734 - DNA, 677 bp, Cannabis sativa
ttatcttcaaattcaccaacaagtatgttcctttgttcaatctactaagaggaagcaacaaagggtttgaatggactagtgagtgggagcaagccttacaagctctcaagcatcatttggccaaacctctaatcctttcaaaaccaatagatgctgaagaattattcatctatttggcaatcaccgggcatgcggtcattgctgctctagttcatggagatgaaggaacaatttgttcgatgtattacttgagcaagcatctccttggggtcgagtctaggcatcccccattaaaaagctagcttactgcttagtactgacctctagattacttaggccatactttcaagctcgtccaatcaaagtgttaactgaccaacaacttaggcaagtcttgatgaagtcagaagcatcatggtgtctactcaaatgagcagtagaactccctcagtttgaaatctcctatcaaccttgcccaacaatcaaaggccaaacattagctaatttcgtcgttgagtgcattgacattgaagaagatgaactcatgggtagtgaaggccagagtcgcacacctgagactacaacttagaaggactctagaccctcttagaagctttatgtagatgggttctccaatgcgcatgactctggcgcaggactcatcctcgtaaccccta

SEQ ID NO: 66735 - DNA, 1284 bp, Cannabis sativa
tcggtatcgtaaactatacaaaaattttgaaaaattacaagtagtacgaaaaaattacaaagtatgagattatgaaaagaaaaatggactaaaagattttttttttagatgtcaaaacagataaatccttttaaataaaaattaatagttggccccactagtaattagggcctggctccgcccctgaaagaaactatttcccatttggtgtggttgacttgtgctactttcttgtgcccaaagatggcacaggtcagctaggtggtttctacgccacttgggggccttcctcatttggttttgatgtgttgatgatgaaaaagtatttttggcaaagaatctccttctcatttggtccaatcgacctttacaacttgttcatgcgcaaagatggcacatgttggctaggcttgatgatgaattaaaaatggtttcattcaattgttttatgctcctttatgttagggtaccacatctatacaagtttcctttggttatttgagagtagaaacctatgccatctttttatgcaaaaagatggcacaggtcgaccatgcattgtggtgtggcctccttgtgcaatcttaactttatgtgaaaattctagcattgttatgcctaaataagttaagtccttgttggtttccttatcgaattggggtctctaggatgaaaatccttgtgtgggctcataaacccaaggttaggcacacttgggtgtgggtcccgacagggccctcaaataagatatcttaacttatttggcttttgcaagttctcgtcaaagtcacaagattgacttgagtttctttaaggtacagttggcttgtgggcccttgtgcaagagtaacaattttattttattttttccaaaattttggtataaaatttacccctgaaaagattttcttgtaagcctttcaatcaatgcttttgcaattttccaaaggcttgcgcaaaaaatatttatttgtggagtgcatgaatgttacttctcttttggagatgtgtggatgggtacaaccaatatccttagttgttgtgaataggtatgtatgggcatgaccaatgtccattgacttatatgtgtggagtttttaaagcacgtggcttctcctcagaatgtgagccgaaacatatctcatatcaaatgtggtagtcgagtagagtcatgtctctagctcgattttgagactttttccaggtttaaaatttcttgtttaagttttttttttttttaattcagagtagatttatatctcttgcttaaatttgaaattttta

SEQ ID NO: 66736 - DNA, 577 bp, Cannabis sativa
gagggagatgagcatgagctaacaatgtgagtccggtttcaaccacatgtcgattctttcgttcaacacgaccattttgttggggcgtatgtgaggacacaagagatcatgacagatgccatgttaagtaaaaaactgagagagagaccggtattcaccaccccaatcggtgcgaaccgattgaataatgctttgaaactgagttgaaaccagatttttgaaggtgagaaaagtattgaatgcttcatcttttgtattaagtagatagaaccatgaaaaacggctataatcatcaataaagagcaagaaatatttaacaccagttatggcagtaacgagagccggtccccaaatatcggagtgtattaattcaaaaggcttggaagcccgagatacagaatttgaaacactaagcctatgagatttgcctaattgacaagcagtacaaaaagataggcaatttcttcttgaaaaattaaaattacaagtagaggaaatgcgagaaatgacatcggatgcggggtgtcccaaacgagaatgccaaagatcaactgaggacttggaagtgtataggaga

SEQ ID NO: 66737 - DNA, 1020 bp, Cannabis sativa
gtaagacttgatatggcaaaggaagaaattttgcttacttagagcacctcaactcagcatgaaaattaaaaaattgtgttgaactaaaaaagaaaattgtataattttagaaatagtatttttctattccaattacaacactaaaaaaaagtgtatatttattattattattatttcataatactagaataccaagcccaagctgcaattataaacaaaggtggatggttttattttttagttttgaggaaaaagaaatatgaaaggaatatggtttaatttagttaccaccaaattatagatagtttgatggaaagttggtaactagggactaggcttccaagtttggtggaaaaagagttccttgggtgtcaccaaattgaaatccttccatttgaagtaaagttaaaaaaaaaaaaatatatattaaattcttgaagcttatgctgaaaattgactatgtaattgttagtacttaaactcaaatcaatcaaactggattgttgaggaaagaaaatgaatggaaaatgtggaaaaaaagaattcggaagttggattttggtgagcaaagaaaagggatagaaaatatagaaaaaaaaaaaaagaaagaaaggattttttcacaaatacataaaaacaataaaaaaattacaaaaataaggttgtatagaattttaaatatttttacgatttttatgattttttattaatttgttgttaatttttttattatctgtatgttatttttagttgttgtttatatgtcatttttctgttacttttatgtagtttttttttattattttcatgttgtttatataaagaaccgtaaaaatgtaacaaaaaaatctttaaacgtaaatatgtaaaaatttacaaaaaatactgtttgatgtaattattccaaaaaagaatataatgatctttcaacttggactgaatattcataattttcaaaataaaatctcacaatcctttgatctattatactgaatggttattactgtatccataagatgt

SEQ ID NO: 66738 - DNA, 713 bp, Cannabis sativa
aatagggttggatcaaggataatgtgatcctttggatcacagagctatgaccctcagatttgactcgaccactaatgtatcagctcagtgaaggcttaggtggaaattattggagtaaacctccacttacactgatatttaacttaatacaaggacagaaatgtaattacaagaaaatccctaatttggccttcggcctctagaatccctaacagaaattagttagaatggatttggtaatccacgcctaactaaaatctgtaactaatctaactaacaaatgtagaagcaagagataaaaaccctagatctatatatacctgcatctaaactcaaccaggtacggttgagggttcacttcaagatccaggtgctttaagcttgaaggagaagaaggagatgatctcgcatgcacaagaaaacaaacagagagttagaaattaagggagagagggattaaacacaaaatacttgtattaaataagagattaccagtctaaaaattacctgtgacttggaatctccattgatgtacttctgatcaacaagaaatagtggaatcaagctctcaactttgaggagcagctcaaacggagacgtagccaattttattggtgaacttcgggaaaaaatttggtgttttctatccctaaactttctgattttgtgtgtgtgtttgatcttagatcagatctgtttagatctgatcttgg

SEQ ID NO: 66739 - DNA, 551 bp, Cannabis sativa
tcctttacgttgtcattattcagtttatagttaataccttgactataaatggaataaaagaaagagagcatcttaaatgttttgactgtcttaccctcatttatgtatagtagaggaggcctattagtttcaataagagagagaaagagagtctgcagagtgtaagcctgtcgttcagacttagaccatggaccattctatttcagtattatctctttctcctttcttcatgaagaaactcaaaaacagggtatccacttggcaattgaccatctccttttacttctttatttctgtacaccccaacataaattttagtttggaaaatttgttatatcaatatctctatatattaatataatggaaagcacacaagataagggtacgtggctttctatcattttttttttcttcatgtacttttttaagagtaccatattaatgtactaagaaaatataattattcaattaagtttattttttttaatagtctcacattgtttagaaaatatagtgaaacattacacatacactataaataaattttttct

SEQ ID NO: 66740 - DNA, 1180 bp, Cannabis sativa
  modified_base (963)..(968): a, c, t, g, unknown or other
tctttaataatttatctataattactttctaattgcatgcttcaaatacaaatctagtatggtttaatatgcaaaccatagtctagagtctctttgaggtatctaaatatcttcttcacaattttccaatgggattctagagggttatgcataaattgagaaactttattccctgcatatgtaatttctagtcttgtcattacaacatattgtagggcaccaagaagacttctgaattggtgagaatcagcctcagggtcacttccgaaagcagatagcttttcaccaccattcattaatggagtaagaagggagtggcaagatccatcttagctctacacagaaggtccatgatgtattttttctagcatagatgaagactatagttaagatgctgaacttgaatgcctagaaaataatcaagttctcttaaatcttttaaggcaaaagattcattaagacgtaataatttgagacacaacaactgtagagcttcctgtgatcaatatgtcatcaacatatacaagtacaaatgtagagtgagaaggagagattttaataaagagagattggtctgctcgagctactgaaaatctaaatgatgacaaagggattctgagtttgtcaaaccaagctctaggagcttgccgtaatccatacaaggctttattcagtttaaaaaccataacgagattctctttatctacaaaactaggaagttgtgtcatgtataattcttcagtgagtttcccattaagaaaagcattattgatatcaaattattaaattttctatctatttgatacatctattgtcaaaataactctgatggatgtgggtttgatgattgaactgaatgattccgtaaaatcatacccatattcttgtaaaaatccttttcgcaacaacccttgctttatattgtgatataaaaatccataacataataataataataataannnnnntaataataataataataaaacttatcaaaattatttagaatttttaggtgagggtaaaatcacaatctaatatcaaaattttcatggtgttattaatattagagtaattaacgacgaaatttatggtttaatttttatacactttatctctttttttattagaacttcctttactttcctttaaaaatttgaggcgtcacttaaatattaca

SEQ ID NO: 66741 - DNA, 1010 bp, Cannabis sativa
  modified_base (167)..(178): a, c, t, g, unknown or other
  modified_base (303)..(304): a, c, t, g, unknown or other
cacgtgacaaatttttagtggtccacgtaattttaattattaaaatattttaaaaaattaaaaattataaaaaaaatacataaattgtaacacaaaatatatttttattttattttttttctttttcttttctcttttatttttacttttttattttttttttcttnnnnnnnnnnnntctttctttcttcttcttcttcttaaataacctaaaactaataaccctaaccctaattgcatctccttcatcctctttctctctctcgattttactcaatccattttttctcccaagcttgaagnngagtcccaaacatgcttccatcggagtacaaattcgttgaggttgttcgagctttaatggtggccgaggaggaggttaacagagagaacgagaacgagagagaggagagggtctgagagcgagagagaagaaaggagagggtctgaaagcgagagagaagagaggagagggtctaagagcgagagagaagaattttaatggtggcctaggtcgcgtgagaacgagagagaggagagggtctgagagcgagagagaagagaggagagggtctgaaagtgagagagaagagaggagagagtctgaaagcgagagagaagagaggagagggtttaagagcgagagagaagagttttaatggtggcctaggtcgcgcgagaaacgagagagaggagagggtctgagagcgagagagaagagaggagagggattgagagcgagagagaagaaaggagaggggggaggcggctgatagaagagggggggaggcggctgatggaagagaggaggcagctagggttttttttttttagttcagttaagaataagaaggaaagaaaaaggaaaaggaaaaaaaataaaagaaaataatttatttataattataatctttaaattattttttaaaaaaaaagaaaaggaaaagaaaaaaaaagaaaagaaaatatatttttttttctttttgattttttaattgttttaaatattt

SEQ ID NO: 66742 - DNA, 1650 bp, Cannabis sativa
ttatactaaaatattatatatttaggtgtccataaaaataccacgtataattttatataaaatacaatgcaatacaatacaacctaaaacgacatttcaaacaaaccctaagtctataatacactcgtgtaaatataagtttgggtatattcttttctgttttagtgtttaaattttttttttaaaaaaaataaaaattcaattatataaattatttaaaaaaatttatagttggttgaaagtaattataatgtagactattattataaaaatatatatatgtgaattaaatttttttctaaataaatagataacatgacacggtttataagtggtatgttgtactacattttttttttttttttttgaaaaggttataataataataataataataataataataataaacaatgaagtagttgagaaatatatagggtgtggttggcctcatgggaagaacatggtgatctttcttctgagccgtccgattggaaatattcagtgggttttttgctttatggatatttgctacttggcactatgcactaactgaaacattgatcattgctataattaattgattatcattatcttaaacaaaagtttggtcagaaatgtaggctgttgtagattaatataatgatccaatcttaaacacaatcttacccaaaacaaagtatgtaacagcttcgctaatttatttatttatatataaaccaaagtttggtaagcttaattcatctttgtgtttgatgaaaaattgggaatttgggtaggtaagaaaacattctcgacatataaaaattaaggtgactattaattaacatgaatgaaaatataagaataaaaataagaatagaaataagaattgaaattgaataaaatttaaaatatattaaaaaattaataaaaaaaattattaattttttttatgttatattagaatgatctttctttttattttaaaataaaatagtcattttactaaaatagtaaaaagaatattgcaaccaaacaaaagaattaaataaaaattatttcttttctatttcattagctccagtcaaataccatctaatataagattaatatagaagacccataaagtatataagctaattatggataaattttacttgatgaaaagatgggacattatttatatatgtaattatttattctgaaaaggtaaaaagaaaaaaaaaaacatgagaagtgggataagttaaaatattttatatctggttaattttatttgatttgataaatcatagaaattatttcattaaatattttaatattgatggttattattgaattaattgtttaattttaatttttcaattaattgttaaagaatcttgacaattaatgtgactaaaaaatttaatataacatctcacctatataaatataggtaattgattcccaaacttattactcatcttgtttttataaaattaatatcaaagagagctagagagaacttaggaaaagttcctattaatgtgttttctctcttattttaacaaactaaagatcaaatgaatatattagtgagatttacatttaggggtgtgcataaatcgatccaatctaatgagaaccgaccgattcaattacaaccgaccgccaaacattggatat

SEQ ID NO: 66743 - DNA, 931 bp, Cannabis sativa
aatttttccaacaaaaattgcgttttatttagagcttggtattgaaaatttgtggatctataaattcattttgaacaattgaacctttccaaactatttctttttaagaaccaaaaatacttgtgtcaaaataattgatgcctagaaaagcaaaaggccctgtacacgtaatggatcttgaagtactatttctgcattcccttgaccaaatctacccacattaggattactcattaatggttgatccagtttgatggattcgtcctctaaaacaagaacttcaaggcctataggaataatatcaatcacttgacatccatcagatgcctccattataattatttcttatccccttatttcttttcgtatgattttgcttaccatacccgccattgtagtgttataaatattattgttactcttactcccatcgggataaatttgaccccttcctctgttccagcctacatatatgagatattttaagagatgaacatctttcttagtagcggggtccgggaaaagaataggaaaggtgatttcactttattttttaccaggaatgggacctatcataagatagttttttttagtggggcaatagctctgaaaagacagatttttcatcttttctttgatctcgggcaaaatacagtcgggaggggctgattcgaacccctcaagtaaaataagaacatcacccacattcaagcctctttttttactattagcaagaatttgtttcagttaagatcataagaaattcgaacaactgcttcaaatatagtatcaaacaatactgcttgtgaacctcgatatctacgggcttgttagctaaatgacaattggcacatacaatggcccatcgcctcttgtggattttgataaccctgatgggaaaaatgggatatgcatttgaaataagagtgta

SEQ ID NO: 66744 - DNA, 965 bp, Cannabis sativa
atacttcaatcgaaccagatagctgaacagaactactatcttttcagattccagaatgtgcggggatgtcaccaactgggacgaagagactttcagggaaaccatattgaaggatagggagattcaaacctgaaccgttttcagaactgcttgggctcccacccaaaaccctaattcagactccatcgtcgtcgcctctggtgacggatcaccctgtgatatcgaggaggcatgcgagcccacttagcagaattgtgtgccataaaattttgctttcgattaattttcattagcttggagctttcgagagagagaacatcacttctgaaatgcaacaaagcaccttccaacatagtgaggcataattcactgtgtagattattaaagctagtaaccacaacctcattgtctcaaaagaagataactctcctaaacttgtttttcgttgcgaagtcagcagcacacaccatcatctgtgcttcagaatgtgcaggattagtagcaccaaatcatgtagagaagattgcatgaatgtggtccttgcaatccctatacactgccgccctgaaacgactaatctgaacagatgttaacatcagtgcagtaggcaaaccaatcaggcggaggggataaacgaaccaaatcttcatcaatgggaggaatttgacaagaggaatggtcctgaaattggtggcacactaatttgattgcctccaaaacttgtaaaaggtggaaccatgaacaacgttattgtgcgttctccaaataacatcaaagatacacagggcccccagcaaaaagctgtcaaaattgagatgtgggggtctattgttgttacagcgaacccactagatccaactgaaccaaccatcccactaaatggaatctgttctgattccccaaaggcttccaaaccataatgccttggcgaaagaacatttccagaacagatgtaacgatgattc

SEQ ID NO: 66745 - DNA, 658 bp, Cannabis sativa
aagggttagaagaaagatgaagtgtggtaatgagagtagttatgtaaaatgtaatcctatccttatgtggtttttgaggatatgatatgagaatttgaggttgtatattgttttgcttatgaaaccttataagtcatagggaaccacttaaatcgccaaacatattcatgtttaattagttgttttgcatttttaacaaactgacaaaaagttttcaatgtgaatttagtataacattaaaatacttttaagtcattttttgtttctattatatacttattctttcttcttggcctttactattatataagtatagatgtaaagtaagcttcaaagtggattggattggatagaaggtccattttgggacacaggttttgttcattttgataagttctgtttttattttcttccaatgaatattactttgcaatttggtccctcagaaatttatttttgtgattaagtttcttgagtttataaaaaagaacagtcaagtcctttattgaaatcataaactatctggttttcgtccactaaataatattattatttttgagaaaaaataaattgaaatatacaattttggagatgttaagggaaaagaaagcaatttgttcacaaaactatactgtcatgattcatgaataaatcttat

SEQ ID NO: 66746 - DNA, 653 bp, Cannabis sativa
agaaataataatattatgaaatatataatctatactatcaatttccatcaacactataatataaaatttgtaagggtaattggtacatgaaagtattatggagatttttatgtcaaacgtaattggtgcacgatatgaaagtgttatggaaatttttatatccagcctaattggtgcaggacatgaaagtgttatcaagattttttcatatccaatattaataatcataaaaaattgctagacatgaaaaaggttagcaaatgtaatacattatattttaacttatttattttgtcttgtccagcttgagtctcatttaaaaaaaaataatagaaaatgcgttgttcaccactttgatcacttgcccgcaagggatatgactctgataccatgttgagaatcttgggattgaatagtcgctagaaattttttttgtttgtttgttttgctctgataccatgttagaatttgggataaggtgaatggggttccatcccaaaaccaattggctatgagtgcagtagcccactcctcctattgcatattaaatagctactatcttaagggaggatgttagaaagtcccacattgctaatgtgtggaaagataataaaatatataagagtaatggactactcctcctattgccaatt

SEQ ID NO: 66747 - DNA, 1625 bp, Cannabis sativa
acatagagctttaagttcatgttatatagcttgtagccattgtttgtattgggcaacttgattatatactcataatgagcaaatactgcacatacaaaagccttacgagatgctgaaagattagaataatataaaaatttgtggagaggatgaggtgtagatgattgatcttgaattatagagtgacactcatagtcatgaagatagcttggtggtttatttgttctactagtccttcagagcgcaattggagctgcatgaggtgaagatgatgaagtaactagtgtagcagtgatgtcttctgcaatatctagtgctggtgtatcctacaaagaagaatctaaaccagaagagcaaggagaatgcatagggtaatcatcaactggtgtgtgagatatgtgaaatgaaggtaaaaccacatttgaaaaaaggtctaataagaagtatcattatttaatctgcgaaaagaatatatatgttcacaaaatactacatttttagaaacaaaaaattgactagtattaatattataaaatttatatcatttgatccattgggggtatcccataaaaacacaaggaggagctttaggatcaaattttgttttgtgagccgtgagggtggaggagaagactaaacattcaaaatttctgaggaggtttactaaatagtatttcaaaggatgttttgttagctaaattatgagtaggtgtgcgatttataagaaaagtagcaatcaaaacaaactcaatctagaattttattgcaaaattagcttgaaaaaaagacccctgacgatatttaataagtgctaattttttttttttagcaatagcattttgttcaggtgttccaacacaagtaaattcatgtaaaatgctaagttttaaaaacaaatctttgaaaacgggtttagatggattgttaaatttgaaatacttgaagatgcaactaattctctttaaaagcctaattcattaattcaagaaattaattgctggaataattaatatagcttaccttgatacttcacttaaatctacaaagtgtttctctcaaagctattacttgattctttattattttatttttttaagaacttatgaaatatagaggaggtgggggttttggtgtctatgctgaaggtcaaagagagaaatgatagataatctttcgagtttattaataataataataataataatgataatcacaataataaaatttatttaataaaggaatattttattatttcttagccactaagaaatttatacttctaagatactaggtcaaattccacctactcttagttactccaatacctacattatcaacttattataatattcccatcaattctatcacttaagcctgctatgacatttctggcccccgatcgagtctccaaggtcgtcaaacctgaaaatatttttattccacttataattcatattacattcacatatgttatataaatctccgtaatttaaaagttacgcttatttatcaacttatagcaagtttaaaattttatgttgaactagattagtaggatcataatcccacttgttgcttggttaacacataatataaatataaaccctaattaattaccattagac

SEQ ID NO: 66748 - DNA, 1671 bp, Cannabis sativa
ttcaaaggccggttgcagcagctggaaatggttctcacccatctgcttcgaatgaccataaacctccatggaaaccacctcctccaggtatttttaaacttaatgttgatgcagaacatgaccgaactacacacacaactggtctgggagctattattcgagactctacaggtttcattgttgctgcattttcaaaaaagctgctgggcagctttgattcacatgagatggaagctcttgctttgttccatggtgtgcattttgctcttccctttcaatttccacatctccatatcgagactgatgcacttcgggttcacaatgcaatttgtaatcccactgctgcttcctctgtttttaatgatattattatggatgtttctagtcttctatcttttttccctattgtaaatgtatctcatgtcagacgttcagctaatatggctgctgacggtttggcaaaatttgctctaggggtagatgaagattgtttttggtcggattgtattcctccgcctataaattctgttattgtaaatgactctttggtttaatttataatagcagttttttcctcaaaaaaaaaaaaaaattccagttttttattttgagattttctaattagtccttttttctttaaatgaatgttcttcaaaattataaggcacaaagttaaaaaaatcacaatcatacaaaatagtcactactcacgataattaggcaaatccggccaccaaatacgagattacttgagtgagagagctagttgagcatcaacatgagcagtgacattattaatttcattacaataagacaatgaaataaaagaaaacaacttccacacgaaagatatcatgaattgaataacaattccatactcagaaaaaatgttcttttttgctaacactttgaactagccgatgacaatcggagaagactttgacttgagtatagcccaacctaatatagagtaaaagcccttgaagcaaggctgaagcttcagacacgtgagggggcgagggaggcagtcaacagaatcgaggaagagtagcaaatagcacccaactcatccataaccaatgctcccagccccaccaagccatcaactgatcgtgtcccggcatcaacaaagaggttgaactcgcccagctgcagctcagctgccggaggatgaaccgacaccgaaggcccattctctgtccaagttttcaactcacccgactgtgcatcttggtatctctacaaatagtttaaagcccactgccccactaaatcatctttcaaaagtttgtgttcatggacataagtgtttcttctatgccaaatcctccaaccaagaacaaggaactcctccacttctttcttggaaagaaaaaacatacacccaacgtacgagaaggtcatagtaagaagaagcaacccctatcttgtccagaccttttaaactccacttctgagtttctttaagagatgggcaaagccaaaggacatgttgagtagttcattagatttcaaacaaaaagaacaaacatcaggtgttttaaatctaatgatagtttttaacgtcttatttcttccaccaaaacaacctttttttttcttcatttttgtaagggaataaaaaaaatcttgaaaatgtggaatgagtgttaagagttagttagtataagt

SEQ ID NO: 66749 - DNA, 939 bp, Cannabis sativa
aaaaaattctattttaaaaccaatatgtgatagctaaagtagccatattcttatagttcaatattttatcatttattaatttaagatagtgtccaataatattttcttttaaatggtaattattttttgcttatcaatcttaaattatatcagtaaatataagtgagaataggataaattatatacctataatggtagagagattaaaataattcgaaagcaaaatagcaaaatgatcttaacttagtggtacattttttttttagtttattcttacctttgtgtagatattaaagaaaagcaataacattcattcattttttttttttttggctggggataatattattcttttaatccaaagctaattgcttagtaatatgctctctgggttgcgttgcataaggtatactaatgattagaatgatgatgtatatacaatatattaatgtgtgtatatataatatattaatgtataaaagcaattctttgaagggccctttgcctatcatttcagggaatatcaactttgaacaaagctctctttcacagagtatgaatagggacattctagaaattgccgtcatctctgcaaactctttaattaaactataaattcttttagaagtatactcatcaatatgaatttaatgaatgcatctgcaatgttattgaaatagtaaacagtaacacccatttttttctttataagaaaaaaaattaaagagaaataaataaaatatataaagaggaaaaaacaaaggtttttgaagatattaatcaattaaattgttgatggatgtaactgggtcctggggataaggataatggcccttaatcttaccttcccacttgaagtgtattagactacatacggccccacctctcacttttttgtctggaagcaggtgttgactatgaccaaaattaaagaaaaat

SEQ ID NO: 66750 - DNA, 1300 bp, Cannabis sativa
cataattagtaaaattaaataaaactagacaaatatttttaaatctaacaattttatcaaagttcaaagaaaaaaatcataattaactaaaatataatataattaatatataatataattaataatttatataattactaccgttataattacagagtaatcttcttaagtatctagttagcaattatgtcattttctgatttctatagtgttttaatatgtaaactaattttcttactagtgaatattttttttcatattacttaaaataacttattctttaaacttctatataactttttttatttttattatttttacccaaagtctaaatttttgtagttatataagctaaagggaaacagtaccacaaacagacaatatcatcatcatcatcaaagaaaataaaaaaacattttcaacattgcctttcttcattttttaacatcaaataattcttttgaaaaacaaaaatggcagccatctaaaatttttataattcttggctagctttaaaagaatatgtaacactaacagtgtgaactgaactatgctgataatgctttagctcttttgccttgcaagaaaataataaataacacaacactgttcacactaatcacaaatggagtcaaaaccattgtaacccttttccgacttgagatattgtcatcgatcgccaccaaaaaaatcagcgaaaggttgaactacggttccctgttgctggaaaagctttacgacgtctaccttgagagaaatcacctaactcttcatcgttgttcgatgctcgacttttatcagactttttcttacccttagaatttcccgcgccacttttcctgtgttcttttgtattattctctccaaataggacctgcttccttgctgcttcataatcgaatggctccagtttcaagccaccaccggattcctgagttctttctacttgtttcgttttcctatcctggaaacattgtttgaagcttgatgacagatcggagagactcattggttcttcctctttatctatcttcgagctggacaccgctggattgttatcagcgtctttcaaggttgttcctgaatcactttttgattcctcggcatcagaattaacagtttgcaacattatgatatcgtccaatttagagctgaccggtaatgtgtttgcaggatgatcggaaactggaacttcaagggttgcaacaggtgcttccacaactggcttcggttgttcaaaggtgctggaaaaagaatggaatggtaagtgtactgaagctctaatttgctccaatgtggc

SEQ ID NO: 66751 - DNA, 608 bp, Cannabis sativa
gaagtcttttaaattagaatttttgtgagtgctcttagtttattagaataatgaataggagatatatatagtcttaatatttctttatacaaacatgctataccaagcttggtagctagtaaatgtagcaatattctagttttgatagctctagctctgtgattctgtagtgcaaaggggaaattgtcatttaaaattagattttggtaatgatgactcatcaatttgataataatgtcaatcactgctataactgaaaacacaaaagttaatattattctcaaaagttaatcgttatattttgtgtttacacttacacaaaatcatcaccaaaatcacatttgggcactgcagaatcccacttttcatatcaccccaaaaaagaaaagaaaataaaaaatctgaactatcctatttttgcctcaaaaaagaaaaaaatcagaacttttttaaacaagtgtccaagttcaaaagatttggtttgatcattggtgtaagcattataagacagaaagagtctctcatttgggttctccaccaaagttcatattattgttgaatctaatgggtactcttttactttgcttagtattgtcagttttgttgta

SEQ ID NO: 66752 - DNA, 1775 bp, Cannabis sativa
atgcttttgaaatctccatgacaaaataagataacatcatctgcaaacattaggtggtttcgtttgagctccgcgcatctatcatgatatttaaaatgtgatttggctccaattcaaatcattattcttgacaggtactccattccaaggacgaagagtaacggtgacataggatctccttggtgtagtctctttttcccctcaaaatatccatgaagagttccattgaacatcagagagaatttgggagtgcgaacacatgtcattacaagcttgacaaatttcataggaaattgaaaagcttgtaaaatttcttccaagaagtcccagtctagtgtaccataagctttctgtaaatcaagcttaatcatacaccctgctttagttgatctccttccataatgtcttatcagatcttgtgagatattgtgtgtgataaatctatcagacataaaacctccctgattctgggcaaccaaaataagaagaatggtttttagccttgaacgaatcagcttggttacagccttgtagattacattgtaacacgcaataggtctgaaatcagtaactgtattaggacatctacttttaagtactgttaatacggttttgttgatttctttgagaatatgtccagaatgtaggaatgacaacatagcttcacatatatcttgaccaattaagtcccagttctattgggaaatatagctagagtactcatccgggcctggtgccttgattccaggaatctcaaaaaataccttcttaacttcatcctttgaatactccttcaccaaccattcaccctgttgcttagtgactaaggggccatgttccataactccaataattactgtcctcctattttccattttattaccaagaagttggtgataaaatgaaagaaaggcctctgtaacttgtgttggatcatttactcttattccatgtttatcttcaatggaacagtattctatttttcttccccctctctctgatactggcatgaaagatcgcagtatttttgtccccatctttcatccaactgatttttgatttccgctgaaggaaagatgacagacccttaagcaggtaaccataattctgtctagcagccatttccttgtcaattagttcgtgtttcgtaggctatgcttgtaacttcttttgtacatcatacaactcttctttagcttgtggagcagcttcttggatgttagagtattccctcttattcaaatctttgagagctgcttttagaatcttaagtttggagatgacttgaaacatcttggtgccagaaatctgttggttccgaactcccttcactatttctacataccgtggatgggaggaccgcataaaaaaatacttgaaaggcttttttccaccaagaaattcgagatacacaaaaataattgcaggagtatgattgaatagtcattctactaagaaaatggcttcagcattgggaaattgatttaaccaattctagtttgcaagtactctgtcgatcttagaccaaattctatcattcccttgccgtttattgttccatgtgaaggaactcccactgaatttaatgtcttctaattagcagtagttcacacagtcaatgaagtttgttgctccattatatgttactctcttgccaattctttcttccttgttcaaaatctcattgaagtctcccaaaatcatcaatgaatcttgagtagctattgtctttaaatctgaccaaagtatctttctcccttccatgtcattgaaag

SEQ ID NO: 66753 - DNA, 727 bp, Cannabis sativa
cactttaaaaatgtagaacaataagtatgaaaaatataataaatacaaagaatgcaatataataaataaaataagaataaaaaaagaaataatttaatcgagacataatgagcataaaataaaaatattatttaatctaaaaaaaaagtatataagagaagtatttctttaaaaaaaatcgaccaactaaaatgctcaaataaacaaatacctaatttttggtaaataatcaataatatatttacaatgtctatgctaccaagtactgcagtaaggacattagtaaactttgagctactctgttcttttcttgtttgagaacttttttaaaatgatagtcacaatagagcaattccccaattatttgtcaaataacactgttaaacaccttcagtcatcttcaaaattctaagccaaaaggacacttacctacaaaaaatagtatacataagcacaatcccctattaaaccaacgttctttacctttagaccatcttaaacaaacgttctctaccattagacgacaattcattttgttaaatgggctcacatgttacgaaactatcccttcaaatcccctattacacaataaggcaaccccagatcaatgtgggtgagagcatgaattagaataatattcatgacaagaagtagaacattacaatccacagataatattctcaaaagtacacaatacagggaagaaaatgatgcttgagaaagaata

SEQ ID NO: 66754 - DNA, 893 bp, Cannabis sativa
tgggaagataaatttatccactttgactagaacatcttcgatgacccctcttggatgagccaacgaccgatcagccaattgcaaggttactgtagtaggcttcgcttctcccaaatgcaatcttttaaaaactgacaaaggcatcaaattgatgcttgctcccaaaacacacagtgcatttatcccctctattctcccgatggtacaaggtatggtgaaactcccaagatctctgagtttaggagggactttcttctgtaatatcgcactacacccctcggtcaatgccactgtttcatagtcctccattttcctcttcttggacaagatttctttcatgaatttcacatagcttggcattttttccgaggcttctgcaaaggggatgttaatgtgcagcttcttaaatacctcttgaaattttgagaactacttctctaggttggtctttcggagcctctgcgagtaagggatctttacatagtggtcaatgctgataggtggagaagcttcctttgacgcgaggccctcagtagtcttcttctctgctggtgtcagtgccagttgatcctgaacctcttcttccacttgttgtctctcattaggcccttcatacttcttcccacttctcaaggtaattgccttacagttttcttttgagttcacctccgttgtggtagtcggttaccttgagggcaggtcgctatttgtgtcgccaattgccccatctgattctccaaggctttaatggatgatctagtttctgtcataaattgtagcaacaaatttgtttgtacactggaccctccactagaaccttgttgttgtggttgttgttgattctttggggttgatttctctattgatagaactcctgttgttgctgattagag

SEQ ID NO: 66755 - DNA, 713 bp, Cannabis sativa
aaataaaaagagagagagagagagcgagagagagagagagaggcgagaatgagagagaaacattgttaatgatattaggcttttttttaaagagagagaagcagtacatatactgccttttttttttttttttattttattgcttttctttaaagaaagaaactgccttgttttctttaaatatttccttttattatttcttatttattttttttatttacatattaataatatttttacttttcattaaaaaaaaagtaagattatgatatagtcacgcgccaggtgcgttgggaaatatttacccaattacgtttggcaggtcactatagagtaatatttttttaagtaataaaaattaaatacttttgggttttactctatagtggcactccatatttttagtgactcacattacaagagactaaccccacatatttagagtctgattgtgcatgtcactaaaaattactcttaactgtttagtgacccacacttttgtgcatgtcactaaaaggctatattgtagtagtgtatgttaacgcaaatttttgttaactatattaaagcctattttgtgatggatttgcatagaaataataataatactaaaagaaaaatgaaataacacaaagctcttttacgtggttttgcagttaaaattttgcatagtccacgagtctatcttattagatttttctgatacaaaacta

SEQ ID NO: 66756 - DNA, 1221 bp, Cannabis sativa
agatcacaatctggttgggtgtttcaattgggaaactgcacagtgagctggaaagcaaacctccaaaacattgtagctctatccactactgaggcagagtacattgcctgtacagaagcagtgaaagaagccatatggctcaaagaaattatcagagaacttaacctagaccaaaggtgtatcgagatactctgtgacagccaaagtgctctgcacttatcaaaaaaccagatgtatcacgagagaaccaagcatattgatgtgcggctccacttcatttgagatgtcatagcagaaggaaaagtgaagctcaagaaggtttcaacagacgacaatgcctcagacatccttaccaagccactcaccactgccaaattcagacattgtctgaatttactcaagatcactaacacttgtgatctgtaatttttagtttactgttaatttctacatttctgtattttttgattgttgtttacactgaataaatcaaccaaggtggaaattgttaatgtaatggtcagtttattcagttagcagttagggaagttagttagttattgttagttagctttcctatttcctaggcaagctatatatactgtacaaacacatttcagtatgtaacttgtattcattcattgatatagtgaaatacaactattctttcccaactctctctctctatttttttttctggtttgaagaactggtttcagttcaagtgtgcaatcatgcatggtatgcaaaatcattagaaatcgattgtttcccaacagtatatcagccatgagtcagagctctctcagcaatgtacatattaaccgcgatgtctcactttcgatggataggatccaccttttgattatgttttggaatgtgactattttgtaatatcggttttgaaactagttgtaaaagtttataaatagtgggtccctgtactcaactgtattttgtataaaagttatatttttagtttaatccaaaaaaatttaattaagctacaattttgttgaactgatggattaattataaattaatttataaaagcccagtggcgttgttatgagacagtgcgctacatcctttgacaatattatgttgtaaatcaacagcacattaattcaacatgaacaacaccaattcaattcaataaacatcataaaagaatgaaacttaaagcaagaaatcaaagacagatttttatccaggttcggc

SEQ ID NO: 66757 - DNA, 651 bp, Cannabis sativa
  modified_base (124)..(129): a, c, t, g, unknown or other
  modified_base (486)..(490): a, c, t, g, unknown or other
tgtactatttagactttgtgttttacaaaaggtactaattggatctgctgttttgttaaataacaaaataaaccatgtattttttcaaaatagtacaaataagaccctaaactaattttttgtnnnnnnaaaatttaataataatctgatctaaatgtgttatgacaaaactgttttcattttctgtattcgttcgtgttaggacttctcttcaagttggcattatatattgtggggtattttgttgtgaaactagttttgtttttaatttatttttctgtgttttaggaattgattttctctttattttttttaattataatcgattaagttattgcgtgttactcattatgttatataaacagttctattttagttataattaatttgagttatttcgtgttatttgtttttattcattataacacctttataaaaccggttatattttaattataactgttttgagttattttgtgttatttnnnnntattcattatgttacagaaccggttatatttcaattataaccggtttgagttatttttttattcattatgtcataaaaccggttctatttttagttatatctgagacatctacttttggtaacttttccagcaacaatgacttttttggtgatttttccgg

SEQ ID NO: 66758 - DNA, 620 bp, Cannabis sativa
tgctcaagggaacacttaaataagaactctatgtgctagcagacaatgctaaagcttctataagggatacttcaagacagtcaatggtttatacttgtagtcccactgctatggtttgtaatagtcaaattgacagtagcaatataacaagtgactatgattataataattttcatatgaataaagctacaagtcttgatctatctcattactctcctattgcctaccaaaccaatcacaaaactaatattaatacttgtcacaacaagcttggacactcctccaaacctattctcaacaaggtgttaaaatttgtatctcagttctatagaccaattagccttttacaatgcttgtcaaatgggtaaaagtcataaattaccctttctcatctcaaattcaagagcctctcaaccactaaaattaatacacattatttatagggttcatcacacatcaagtctaaagatggctatagttattatgtctatattttagatgactataatcgatttacttgaatttattcattagttcttaagtctcaagcttttaacatgttcatcaagttcaaaagcattgttgaaaagcattagttagttttctattatttgctcctt

SEQ ID NO: 66759 - DNA, 1236 bp, Cannabis sativa
  modified_base (1198)..(1204): a, c, t, g, unknown or other
aaaaaattacgccccctcactttaaatcttaggtctgccactgatcttacttaagggccccatgacacctctaagaaactcataaaaatactaactgaccatttggtgtcaagatccacatacctaagtgtaccccacctaggatttatgggctcgtacgagcattttcattctagagacctcaatctaccaatgaaacaaagtaatttttgacttatttaggcataaaatgattgaaactttaactaaaacttaaattagtcaagatggcactagaaggtcatctcacgattcatagtcgacctgtgccggtctctactctcaaaataccaaagaagacttgtcaaaatgtggtccctcaataccaagaagtacaacacaagtgaaagaagccatttttcacctaagaatcaagctaaataataataaaaaaaatacctaaatataatcttgggtatttttgctgccgtttacacttacacttatcacctatgtgagagtgtgtactcacgggaactatgaagggtcaaataatggacttatccccctccaaacaaaaaaaaaaatccatataaaaatatatacgtatacaaaaattataaatatatatatatatacaagacttttttactgtggggaattttctaaatgccctatttgtaggaaattaaatagcttgttctaattggataggtgcattgtgtaatatcatggtcttgaatacaatatattaaaattaagattaattaaaacatttttttattcttttgaaaaaaaaatattttttattcagatctattttctaacatttgctatttgattaggagaaaaactttgcatcatcttccataccaacatatggttgtataattccttcaaaaaaaaaaaaaaaacatatggttgtataattgatcggattatatcaaattccataccaaccttcatattgataaccattcttaattacttgacataaaatttgtttttttttttttaagaaatcacctaacatattaatcaatggctatctttgtttgtgtgttcttccaaactcaaaaatctataattaattaatggcttcattttctaacctttttcaaatttttgtatgtaaatgctacttagtttttcaaatattttatacagtaagttttttttaaactgattttatacagtaaggtggcgtttggtaacactnnnnnnntcagttttctgtttttaaaagtagaaaagtga

SEQ ID NO: 66760 - DNA, 1051 bp, Cannabis sativa
tactgtttgaacttttttatttacaaaaatacttctttagtaaaaagaatatattgttttttgtttgtattatagttattttatagtttattgatagttgattaatagttgttttctcgttttttgttttactttttgctgaacaaaatgtatttttataattttaagattttataaacttattttcgtaattaaaaaatttaagccgtaaaattataaataaaatatatataaaaaaagtatttttaaaaacttctcataaatatatgcaccgaaatactaatttttttatcgatcttgatcagatgtaattagctaaaaaaaatattactgtgtgcataatgacagagccagagtaggagcatgtagccctctaaacaaaaaaaatcttatgtattatatttgtgaaaaaaaaatataataattatatatagttaataacaatttacctcccaaattcattttttaactcgataaacttaaacaaaaatatagcatacattttttaaaacaaaattaattaataaaaaatttagaaattcaaccttcatgaaaatggcatcaccatttggaatcttttcaaacatatctcctcccacatgctcaacacctgcaacaatacatataattagtattaattaaagttatataattattaatttttaccaattttttttaaattaagaaatatactattttagatattgtattttgcaaaagttattgaatggactttctattttgttaaatgataaattaaaacttatatttttcaaaatagtactaaatagtactctgaactaattttttttttaaaaataaaacttaataataatctaatctaaaagtgttatgacaaaactgattatatttttttacatctatccgtaataagaattatcttcaagttgcataataataaaaataaaaattgtcgaaaattaagttcaataacttatttgtaaatatagaatcttttttatcatttaacaaaataaaaaatctaatcgataatttttataaaacgcaagatttaaaatattattaacta

SEQ ID NO: 66761 - DNA, 1177 bp, Cannabis sativa
ctcccaggcgtcgaggaagacccagaaaagcaaccacgcctaatcctgagaccgaaaccagtcctactcagaaacgaaaaggaaaaacgattcctactacggctaagctttcctccacacctaagaaattcaaaacgaaagcatctaaggcgaaaggaggtttcttctcttcaatcaagaaccagtggcacgggaaagactttgacctgaaaattgatctaaataatcactttgtggtgattgagaaattagctaacccaaccacttcctgccgattacaagaactgccagacaatgctcacaccagcgatgtggatttttgttttggggcttcgaagacttgcccgcaaaagtctccacaatcgccatgaaaatcctcgcttggaactgtggtggactcgggagttccacgacagttcatcaactgacggctctcatccgtcagcatcaacccgatatgcttctcatctctgaagctcgcataccacaaagtaagttcactgcaatttgtaataagctgcattttactgggattcattatatcccgcctattggtttatctgggggtcttggattatgttggttaaaaggggtccaatgcaaaattctatcagcaaataagttagttattgtcgaaaaaattagttctgacccccaaggaggaaaatggctggtcttgggtacctacggcccccctcatgccacggacaaagatgaattatggcgctcaattggagacttggttctcctagcaacaaccccaatacttattgtaggcgatttaaatggcaccttgcaagattcagaatgtatcaactatgctaacagcagtaactcctcccgttatgcatttgactttagaagaatggtgaatcgcaccggcctaattgatttggggttcgttggttcggattacacttggtctaggggcaatactcgctccccaggtgcagggtctctcaaacgggccagacttgaccggggccttgcctccacggattggcgaatgttattcccggctgccatagtaaatcaactctcatcctcggtttcagatcacagacctatttttctcgacacaaacggtggcgtgatgtgcaaaggccgattattcaagtatgaaaacatgtgggctagggaccttagatgctgttgggtagtcaaggaagcctggatg

SEQ ID NO: 66762 - DNA, 656 bp, Cannabis sativa
aaatctaactagtgttgagcccacttcacggccggccactagtgcctatttttgctctatttttatcatttttttattctaaataaatcaaccctcaggtaccatagtccttgttatggattacctgactcgaagcatacaaaaagcggccagagataagaatttcaggtaccatcccttgtgcaaaaaattgaaactcactaatctttgttttgcggatgatttagtgatcttttgtaaagggaatgagggttcactcgctgcattaaaaatctgcttgaagaatttagcaagacctcgggcctttccattaattttgctacatctcatgtttattttgggggtgttgctcaactgacactgcttgctcagaaaataaatctctctttaggagatttccctctcaagtaccttgggatccctcttagaccaactaaatggaggcttgaggattgtgggtcgatattgaagaagatgaaactcaagctttattcttgggcaaataaacatctatcctatgctggccgagttcaattaatccattctacattgataggattaaggaactattggatgagagtcttccttttgcctcaaagtgtgataaaggagattgagaaactttgcaggggcttcctttggggtttaaaggataa

SEQ ID NO: 66763 - DNA, 631 bp, Cannabis sativa
  modified_base (137)..(139): a, c, t, g, unknown or other
taaaaataccgctctgaatcgcttggacacacaccaagctatctgtttccaacatgactctattctacgaatgagttggaatcaaactcaaaacttctttaatgcctattatctcagcaatttcgggttgaacacannnaatcttccccttcttgaatgcttttactatagcaccatgatgatttcgagctacacaacccatgccaaagcgccccacataaccaaaaaaaactaacaagaaccaacaagaatcgaaccagaaaaactaaagggaaagactaaagaaccatgtcaaaaaacaagactaatggaaaacttaattagttccaacacataaacacggtcacatcatataaaatcaaataaagaatgtactccttgtaattctaaccccataaaacactaaatagaatattagtaaaaggggaattaataagtgaaacaaaactaacgaaaacaaacaaaaacgttccaatacataagaggagactcgtacgatcaagatgacggaaacaaacaatcttagacggtggccgtcgttgatcggtgacgctagctgatgtgaaacgaagagaagggtctcgactcgcctgtgggttgtcgtcgttggtcgcagaagcttctgggttat

SEQ ID NO: 66764 - DNA, 1083 bp, Cannabis sativa
aaaatacgttctgtaaccacttttatttttcaaatttaaaaacaaaaaacaaaagtgtatctgtaatgttcattttcattttcattttttaattttatttacagtcggatctaggtctggggttagattcggattcagttcagaggctggattcagttccagggttgtagggggatttaggtccgggtctaatcgaagtacaaactattgattaagaaaaaaaaattgtttaaaaaatattgaaaatgacttttcagtttgtttttaaaattttgattctcaataaaaaaattgaaaggtaaaagcagttttatagaacatgtttttgaaaaatatttttactttttaattttaaaaacagaaaactgattaaaaaagtgtaacaccaccttaattaattgatattctctacttctaattttagcttttagtaaacggttaaaagtaagattgggcatccaaattagatcttaaaattcaattcaattcaagattaatttttaattagaaatctaattacacacttaaattttaatatattaacttaaaaatatgaagaaaaatagttaaaaattaaatattactttctatttaaatttaatactctatgaaaatataattaaatacaattaaatgcaattaaaagtttaaaataactaaaacaaaaatattgctaaataataaaatagaacaaaaattcatgaaaataaatacacaaagtaaccattgcaaattcaacaaaaaaaaaaaaatctactaaaaatataattaatatatatttatttttaatattttaataaatataaataattttttaatatatataaatataattagattaaatcagtttttaattgaattttaatcaatttaattataattaaatatttaattttttgtaattaaattagatcgaaggatgtctacttctagttaaagtattttttcttaaatgtatatacagaattaaaagctgaaaatcattataaacacaaataatagttaattgctttaatttcggaagcttcagcagccgaaaatacaataacatatcactcaatcaattgttgtggtttttgacag

SEQ ID NO: 66765 - DNA, 605 bp, Cannabis sativa
ttttacgtattgcatgctttacggtatatacgtgaccaaacaaaatttataattgttctatattttatattagattaattagtatggcacatttttaactgaaactacaacgcagttcttccaaaaatatacattaattgacagtttgactgagcaccaaataaatataaaataatctctcaaaaaaaaatatgaaataattttacttgattatatctgtattacttttttttggggttttggagagatattttttttttgttggagattctttcaaaaaaaaaaaaaacaaaaataacaaaaaaaaaaatacaattatatgaaaatttaaatatttgtaatggtttgatgttatttttatgatattttcgtgtggttttcttgtcagttgttaataacagtaaatttttttattaaaaatagtaatttatgtaatttttcttattatttttttttgagatatttttgtatatattttatttttcttgttattttttgttcaatattttcactttaggatttcctccatacgattgttttgggatagctggttgttaaagatttgaaagggaagtttaaataaataaaatatacattacattcaa

SEQ ID NO: 66766 - DNA, 1473 bp, Cannabis sativa
taactgaagtttagggttaagtctacaatttttttacttaattttcattaatgttggtttatcagtagcataagttagggggtatcgatgcaaaaacaagagagaaaggaggagttgagaatgtgtagaagaaaaaactagattttttttttaagatttagcttgacctagttttttctagaaaataaggatgatagataaatagtacctaaaaagaaagactctatcatcacaccagatattagatattgaatggaggtatggttgcaacaacattaaactgtggagggcgcaggcgatggattattgaacttttgttggtttccatgatgaggaggtctaaactactgctaactttattgctgaggtacattaggccttgcagcaaccattttgtttgcaaaaactgcattcattgacccaacctaagtttattctcttggtgggaaaaaagtctaggggaattgccaaaacaaagggactaggtgttggaacttggaagaatgccttttcctactactcttgagactttagacgaattccatctactaacaactcactgaccattgaatcaattgaaggaaatggaatttgatgaaaaataagagtcacagagtgcttcagagtcatcacaaagtgccattaaaaattgaccaatcattgtttttccctacaagcaatataaggtgcgaaagctcgtagctctatagacttggtaatagccaattgatccaaaaatatgtcataattaagtaaaactcttgaatattcatgtttttcgatacaagagctgtaatatcggattcctactgatatgctttgcaaagttagattgtgtatacaatcttgcaagatgttcccaaacttcattcgttgtctcatacttggctagttgcgtacctatctttacaaagttacccaagtgataattttcgaattattcacttctcaattttgtaaaaaagttgcataatatcacttgtgggtttaaccatagttcgagagatataactgtgcatctttttgccttccagtacgaacaattctttccatctaacctaatgctaatggactgaaggaaatcatctatattactagccattgcagaaacaaaataaaccttcaaatgctaacataaacaatagactgcatatttcataatctaatgaaaccttaaaattccaaattaaacacaaagttcacatactcatggctgccatggtgctccacctgtaccaaagttatggttacgctggacaaaatcaattccataaaccttgtctggatactgtaataattatgcaaagactgctcatccatagaaccaaaagagaaagtgcaaaatatggagagagaaaagtagaggctagaatctattgcaaaaggttttattactagaataataacaagcaagcctttataaacggaaagagataataaaataacatgaaaataaggagaaaaaaagagcct

SEQ ID NO: 66767 - DNA, 3002 bp, Cannabis sativa
tcaggatcagggtccgggattagggttgttgacaaataataatagtagtagtaatgttgatgagtatttggatgaagaggaggtgtttaatatgcctggattgctggatagtttggctgaaggtttgatccttactcctccagccatgaaaaaaggttttagttgggatgattacaataataatggtttcaatgattattcttctaatgatcataatttttctctttggtctgaataatcatcatcatcatttatatatatatttattgatgatcgagttagttcttttggagttataaattcgttttattttaatttgccagccccatcaagttgtctccggcaaaagtcagcctttcatatggaccatcaatatcttgttgatcgagatcagcttgtcactactacaaaaatcataatttgcgtcggtcaacacgacggtcaacatcgaggaccgacgcaaaatatagaggctgagttattgcgtcagtttttaacagacgcaaacaattagcagtttgcgtcgattgtatattcgacgctaaaatgtaaactgacgacaaatgtaattttttttttaaaacatgtttattttattcttctattactaaccgacgcaataaaagtgagcatattttattaattgatgcaaacttattaaatatttacaaaatccctaattctattcaaagtttcattttgcaaaaacacatttcgctgctctctctctctctctgccctaaccccacaccccatgaatggcgatcaaagcttgccccaaaccccatgaatggcgatcaaagctcgcctcgaaccccgatgcttgccccgatccctcttctctaagttctggtcatcgacgcaacactccacctcgatcctagctctcctcccgctctcgctctcttctccgttcgagccaagctcaacccctaacattgtcgttttctcttaggccaagcttccacaaaataaccctatatattcaggtatatatatatatatttatttttaaaaattaaaaattttggttgtaaaatctggttctccaaaagccaagcttagagcattcggctcccaaaattcataggtgactggggaccatcactttcaactgatgcaattttctctgcatttttttagggtttttcaattcaggccccaactgaatgtgagccgagggtcgaagctgaagagtggaatctcacagaggtaaattgggacttgatgatatattgaagcctgatttgataatgccattgatagagacattgccattagagcaacatttagcattttacttaccagaggtcggtgataaataacgcgttgtctgaatttgttgttattttcctactcatttttgtcatataattccttttggggctacagggcagtggtcatcagaggatatattggagttgttgcaaagcctgcctttccgacagcaagtagattcatttacgtatgtagtgacgaatttcaatatgcatcccatgtgtttagcaatagctttttcttatttgcattacttaaaaaaattcaattttacttggtttgtattacagtagggacaaggtgtgtctcactagatgcctagtaaaaagttaaaccgcttgtacaatctgttgatggagaaaagggtccatgataatcaactcctaagttctcatgtgagtgcccatttttgtatttatctgtattttatttatttggtattaaaagacaaaacctttattaaagttgggttgggtgtaccgagacacctatcctaaaaatccattttaaaacatattatgatggtcaatactttaatggatatgtttgtcaagaacacatggttctatatctcaacttattgcccttcaatcaactctgcataatatcagattatgttgactgtttttctttctttcttggtttattccaggtaaccactgaagatgggtacattcttagcattcagagaattccaggggtacactcagtttccgggataattatttgcttaggtactttgaaatggacagataggcttgactcagtttggtattgacccaactaactgtaagtgttgttgatatatatggatttgtgttattgttaagtggtagtgtgtttgttttaactttgtctttcattaatttgcagtcaaatttacaatactatccattctggaggtgccaagctcatcgttgatgccctccttcagcgcttccttcccctcgcacgatgtcgtattgagacggctcaagcacaggtctagatttttattttatttttctcaaaaaagttctgttgatttgttattctgtatgctacctttgtttttgtcgctgtagcgttatagtttgattgggtacttatctcattatgctattgatggaggagtcactggggaattttgtttatggctttactgttgtggtgaaatgttttggttgatgtttctcttctctggttcgtatattatttatttttgattatgttgctgtattatggtaaattgtagatgttgtgtgaagaaactgagaacaacttttggttcttgtgaagaaattgtgaagcattatgtgtttatgtgttaatctttagttgtggaaagaaaatgtataattgtaggaagtattagaaacccacatataatgtgtacgagtcattgaatttctaaatatattatatctaaatcttaaaaattaattatctgggtttggcgtaaaattcagttcaagtttatttttaggggtttgtttgataaaaaacttaatgggatgaaagataattaataatattgtttttaggtctaaaaactttatgtattgattagaaaaggaagtttgaaaactaatattgattggatgcaaaagttgggttggttggattgtgaggtagagaaaattattccaaaagtgaaaaaatagatgtatacatagatatttatttatcagtttgactcaattagaagaagtagcatgcgaacccattatatatataatgaacag

SEQ ID NO: 66768 - DNA, 750 bp, Cannabis sativa
  modified_base (401)..(402): a, c, t, g, unknown or other
aaattattaaattaatttaaaagcttaaattaaaaataaataaaataaaaaaaatcatgcattttcaaatggttgaactcatgtctttgtacttgatgtaagataactttagggataagttaaaaaatacctcatttttgtatccattaatcaataatactctcatattatattttttttaattaaaatatacccacttttttgagtgggttgcctaatataccctcactctctacttaagtctagcatataatttgcattaacctaatgagtttaatgaaaatatcatctataaaagtgggtatatcttaaagaatatgaaaatagaggtaaaaattaaaacaagtaaagtaaagtgagtaaatgtaattttctcataactttaccacttaggcaagttnnatgggagtgttattggttgcttgtgaggtttgggcttagggttaggatgaggtggaggagagagacttaaaattttagtgagttaatattggatcgtagctactggctatctacggtgcccaacaatttttgtttttttaataaaagaaatgtattgattgattactttttttacgagggtctgatcccaatagcaatttatgttgcttccgttaatgatggtcttacaccataattatattgttggctgtatataacttgaatattttatacttttctcgctacaattattgtttagtggaaaataaaattaatatataaattcgaaagtaaaaaataattaattaa

SEQ ID NO: 66769 - DNA, 574 bp, Cannabis sativa
ttcaattacccgaatcccctttagctacgtctgcaaagcctactattgtgagtttctccaacaccaaagctaaagggacgaaaaaactatactcaaggctctatttttaatagtgcatagtgctttcacacttctcctcacaaaaaggaggtccctagttcaatcgcccctccgcctagagaaaaagccatttaaaaaattaaaattttcagtataaaattatcatataaatttttttcttaatattttgggagaggtagggggaaaggccccttaggagccttactagctctgcttcttcgaatgtcaatatatatatatatataaatatttttatgttaacttttatatttatagaaaaaatatcttttagttaggttgtattctattttgttgtttaaatgctcaccaatcattgtaaattatagtatttttacctcataaacattaacaataatgaaattgtatccccctctaaaaaatatgagtaattcatttttttaaaatttctcaaaatattaattcaaatcttacaaactaagaaaaaaataataattttgaatgattaagaaaa

SEQ ID NO: 66770 - DNA, 1176 bp, Cannabis sativa
actgtccagagacggaagccttgactgggggccaaagtgcaaaagaaaaatttatagggggtaaattataaattttgaaagaaaaacctataaaaaattatgaaaaatacactaaaatgtctttataaatcaaaactttggaagagggcaagatagatatataatatataatttatatatatcttgttgtagcgattaaatgtggttatataacaaaaaatatatatttttttttttatctataaaaatattacaatttaaatttaaattcattacacatatatttctttaacatttatcttatattaaatgatataaattgtattttttttgttttaacatggcaatttaaattcaaatttattgtatatgtctaaaaaaatatctttttattatcatttttttcgaaaaattatattatcatttttaatttccccaatccacaatgtttcttaaagattcactatatattgtgatgtagttagaaaaaaaaaacatagaaaaagtgtgatgtttgtaaaaaataaaaaatattataaaattgttcattgtcaaaaaatatatatatatatatattataaaattaaaagtgttaccatccaacaaaaacttaacaataaattttaaaaattattatattttcaaaaggtacttaaattaaatatttttaataaaaaattattatttattaaataacataaaaaattaattatacaactaaaaatatacataattaaaataaaagtataagcacaaaatattaatttaatatatttatatgtatatatatttatcatacactccattttccaaattaaatttagaatatataatttattattatttgatataattattataaattaatttattattatttgatattataaaccttatacaaattttgattattaaatttaggggaacatatactatttttttaattttttttttatatttacagtatgggtttttaaagtggttgcaacactagttgcatacaataggggtttctatacgattttttgttgcaatttacgttgtaccacgctacttgtaataaggacttctatgtagaattccgtaaaaatacaaaaaaatctgatttgaagtgtaaaaataaaaaaaaccccttaaatttatcaaatataatacaataatatttaatttttcaat

SEQ ID NO: 66771 - DNA, 978 bp, Cannabis sativa
agtgtgacaaaatattaattttgtaaaattgtaacatacattatagagttataaaatgtgtgtagaatgatcacaaaataggagttgcaaatcctttaatttgttgatcacttaaatatgtaatctttacctttttttcactcttaaattagtaaaagatgttattaattgtctatgaatatgaatgaatgatatctattgaaaatataggtgttggagagttaattattcatttataaggtgtataaatggtttaaaatcaagtaggagtaatttagaacactttggagaagaattgaccaaaactgaaaaaatggtaatcatacgtttttgaaagtttaagagtctttctaacagtctaaaactcctccaaatcatccaattcataccataaatactcaatttatgattggtaacatccaagggctttatggtggtcattcatgttcatatgagagtaaaaaatctataaatagaggtcatattgttcacttgtaagagatgtagttgaaatcattttgttgtagttagaaccttgtgaggatatgctcatcattagatgctaggctgagcatatgaggcttgataaatccttaagagcattctagagtttccctaagtgtccatatgagggaggaaataacttttaggacaaaagtccttgagccttggttaagcttattatgcattattcttcttctgctctagctttcttgtaatcttgatgtaatatttttatttgtattttgagtattttgattgtaatcttcctattccctcttgtaatgagaatatttttcaacactaacttattgtgtaattacatggttaaacaaacatgttgatcgctgatgtcttcatgaattctgttagaaaaatatcaaatataagatgcatcctctcattaccaaatagttttgatatagagctccattaggaccgatcctgaaatatagtgggtcataggaaaaagaagac

SEQ ID NO: 66772 - DNA, 1109 bp, Cannabis sativa
tttgtaataactgacgctataggggcacgcatcggctgacgcgtgtcccctatggcgtcaattattacaaaataaccgatgccataggatttatataaccttattcagccctttgtcttactcacttcatcttctcccctaaaaaaaaataaccaataaccccttcacgaaaccctcgcccaaccaccgcctcccatctcccatttctccatttttcattcctttttacccatttttttttaaaatgttgcatttttcatacccaataacatatccccaaagtttgatcgtcttttgttttgtttttcaggataaatcgagcttagaggtggtggttgtggtgattttagctttggctgccgcttttggtggagaaatcgttgaatctcaacgtccattaaggtataaatttaatctctaattattttagtaatttatattactttatttttatttttgtaaatttttttaggatttttcttgatttttaagattgtgttattatggtggtgcgtggtggccgaattttggtaataaggtaaaaatctaaattttaatagtatatatgtatgtattttatgttttattgaatatgtatttttattgagcaattaaattgtttttattacattaactttgtgcccctaattactcttttcttctaaggaaagattctgtctcggatggtctcatttggtttaggaaacttcttgtaagagactgaattctcttatggaaagttgtctaactttggaaaacttgtctttccctttttataattgatgatttcagttttgacatgattagaacagatcaaataaactttatttgacaggtttgaagtctaattttgtgatcttggtccattttggaaagcttcctttctgatcttgatctactgctgcagaacccgattttgatgctgcacattagaaattttttaagaaagttttctacagctgggaaattgtttttgtggttgtctctagggttgctatgttctataaatatgacctagagtgcatccaaattaattttatctcttctagtctcatattttcatatctttctttgtgagaagagtgttttatttgtaaaaacctaaagtg

SEQ ID NO: 66773 - DNA, 787 bp, Cannabis sativa
tattatagtaaaattaaatatcaggtctcatcactttatttaatatagtaaattataaaatatcgctaaaagacgctagttcgtggtggtaggcacccttgtatgtacctaatagctattattataaaaaaatttgcttttagtcacaacgaaattttgccaaaaaagaaaaaataaagattaattataaatcattatttttattttgtaactaaaagatctgtgactaaaagtataattagttacaaaaattacaatttgttgtgactaaatgtatttaaatatatttttgtcactaaaattaaattagtgataatttgtatttaaatatcattatattttagtcactagtaactttttatggtgataaaaaatcacatttgattaacaaaaattgtaactaaaatattttttttaagtgaatgttagacttcattaggcgaattggctcgcagccacactttatatgtgagcccaatgtggaggtcttgttcacttttataatagtggaatttgttatttgaagaactatgaaaaataccatttttagtaaattattagaatattaccataatttgaaaacttgagcagtttctgataagatattatcagatgagcaaaacaataattttaccaaacatgagtaatattaattagtatggattcgtaaattatatatacctaatataagtaattagtgttggagctaaaagttcaattgaatgaaataaaggtaacatttaaactatgtatatataacattaaaaataagagatatcactggtta

SEQ ID NO: 66774 - DNA, 922 bp, Cannabis sativa
ttcattcaaccgtcagttgatgaatctcattgatacaatatgtattttctaagaactcagcttgatgctagtggatgaggatggtatcgttgaggaagaaagtcgttattcgattagtcttatacttcttattaaacttccaatgaaaagaattttatatttaagtttgaattgatggtctggataaaattaaattagttgtgtgctagttagaaataaagaatgatggatgctagatataatttttgtattttattgacctattaaatctatctatttggtgactacatatactgtggggatattattattcttttgtattaatgagtgaacgtgattttattactaatattttgttatcggtataagagttactcctttattgttaaataagtattttgtgatataaattaaagggtaatttataagtgttatcttcttacaatggtcaaagtgtgatctttgaccacccaagttatgaatattatatatttgccacgacttagggcttgggttgcgacaaggtaagaggtgctcttatgacccaagcgttcctaataacatctttaaaccactcgagcttgatagttctaggagtaagaacccaaaaaaaaatacattaggctttgtttttgtgatcaagaatagggttatcttcaacaaattcatggataacatatttattttcagtaaggaataaactttgaaggtagaccaggagcattgttttgagagaggagatactaatcgagggatgtaagggtaaggatctataagaaattcgaaagtttaaatagaaaagaaaggagacattcgtcataagaaagatcttgtagtagaagcttgtagtaggcgaatccaaccgtcccttcaatcatttgagaaaagattcacgaaccctagccataatcatcattctcat

SEQ ID NO: 66775 - DNA, 952 bp, Cannabis sativa
tttaggccaagttttaagtcgatgcctcaaataaatattttaagaatattatactaaatttaaggtgttagtaaagttagttttataaatatataaatattactattatttattttagattaatttaaatataaataaatattaatattatttattttaaaataattgaaattatactaattttaaattaatttaaatatatataaatattaatttaaaaatttgtaatactattattaaaatatttatttcaataaagtaataagtaatttcctttaatttataaaattttaaaaatatacttaataaaaataaaaacttaatatataactaagtattggtacaatttatgattgtgtgaacacataaattcacaaatattttctctcctaatttgaccattggactttcaaagtaggcaaaaacataatatatattatggacaagaagcatgtaaagctcatcacctctaaagctaattagaccagtagattactaattttacattatagattgtttaaaataattcttggtgtgaccgctcaccaagcatctgtgtcataacaggcatgacctctttactgctttcctaaattaaaggtgacaaacatgatttggaccaacaagagcttctctgcaagtattgtctgtagaaacttgttatgtatatgtttgtactgtacacaagtattagttaagtctagtcactctccagttagaactagttaggaacatatacttgttatctatttaggaacttaggcaattatgttggtttctaaatagattatgtctataaatagctcacactcttttgtaagtaatgcattattgtaacacttttattcagaactcaataaaaagagaattcaaggtcgggtttagattgatctggaatctatttgaggtgattgattcgtgtgaatgttggtctgatgtgtctaccaaagga

SEQ ID NO: 66776 - DNA, 1544 bp, Cannabis sativa
tggtgtcacttataaaaaaactaaatagtacgaatacaatgctctttaattagagcaatgctctttaattagagcaaagataatatattgtgaatgtgtgatggtattaaatttacataaaattaggattgttgccaaggttttcagcccaaaagttctcctagcttctttttaatttcttttgagaatttttatttaaatatttatcttataataaggcccccaaaaaaatagaaaaattgtttaaaaacttatttaaattttattcacaccccttaaaagctagagatgtttatgcatcagattattaaaaaaaatactaattaacttatatatagggttaaaaacaattaattatgattaagagaaacaacaccagtaataattaagttaatttcataatttgttgaagcattaattctcaatttctacatcatttctttttgtagatttagtatacataaagaaaatatgcattaatattatgtagggactggttctagatttgatgtaccttatatatatataggctctgtatatttatatattataatatttccgaattacaggagaaaataattcattagatcttatatattattctctcccattaatataaaaaaaaatgctatttctaaatatatacacaaagttgaaaattattcaaagggaaaaacaatagtaaacataaataatgatgtgatgtccgagtgatcaattaattactttcaaattttttaaaaaataaattaaaaaatgtaaaaatgtacaaaatatccatccaactctagcaaaataaattaaccattttatcatgatcgagatcgagtttcccagccgagccgaataatttactgagccaagttcaagccatccccaaaaaaacagtatctaaaaagtaaccatctcaaagcaaagctatgaaacttggctaaacttcattgagccgatccagttcttaacatgatgagccatatttcaacaactctttttccaattttacccttcatttttttaagagctctgcttagaagtggtagatcagccatatttactcactggtagccataattcaaaacttaagccgagccaaaaaatttcaaggagcagcaggagcaagactaagatgcaagtccaggcccaatgcatcatcaaaattgggcccaccatctcctttcgaaaacctactcaacgaaggcccatcaacccttaaattatgggcccgtgagtgttgttgttgttgttgttgttgaacctgagaacccatcgtcaatgtagaattatcccctacatcgctaccatacgataacccaactgaacccgcacctctcccaccgttcatcacaggaggaaacacacagccatgcgacacgtggaaaggaggagccgaacgcggaacataaacccacgaaggagaagccgccggtaccattacctgtccagctggcgaaagaagatgcggcggcggcgcaaaagccgagattatcgggtttctagcgtaagaaacggcggcgtttcggctcgcttgaagatgagctcgttta

SEQ ID NO: 66777 - DNA, 904 bp, Cannabis sativa
actactagtatatatagccaacttgtatagtagttagctttacctactaagtacctatcttatatcccacatttaaaatgactattgtaaaagtagatagaaaagtatcatcatgaagaagaaacatagattatttcttttggtaagtaacttttcatttctatgaaacataaattacgtacaacacatctataaacctttataaaaaagagaataattctttgggctttttatagtcaacttacaaatataacccttcttcttataactaaggtaacaactgtcaactattcaaggacatgtgtgataagttgttgcatgcttgtgcttcctttctaaaaagatactcttcacataagtttatttttgctccacgcgtcaactctttaatgccaagtgtagtagatatgtgtatttttttttttttatcttttcttatctataaaagatacacagagtcttcaatttattcatatttagcttcatctctctctctctctctctctttcactttcttcccttcccctttatgcgccattgatcccctgtatttttgcttcatttggcttggtctttaaggtaagagaccctttatttttctttgggttttattctctctatttttttttttattttaattcacggcatattatctctctctattctgtgaagttggttgatttagtcttgaaggaggtaagagtccattttatttttctctagattttgtgaagttgcttactaacttagtattttgatgagatgattaccttatttatttaggagttttggtcatgttttattttgatatatttacactttattgtttacacataattttcagggtgcttcgtaaaaataccattaaacaaattcgtccaaaaataattcataatttgtaaaa

SEQ ID NO: 66778 - DNA, 1286 bp, Cannabis sativa
  modified_base (247)..(261): a, c, t, g, unknown or other
gtcacattgaattcgtactactaatacatgtatatgaagattgattttgcattaaatttggttaaaatgacccctaattcaaaaaattaataatattcttcatttcagggtaaattttaacaagtttttcccctaatcttacactcgttagttttcttttaaaatctcaccctacacatctcaaaaaattgtgaaatttcacaggtgcaaagccaagaccgctgtgcatcacttttctattggacannnnnnnnnnnnnnntagttttcaagcactaacaatcaatttcatcgaaaaatagtgaaaacctcacgattctgatagtgtcacattgaattcgtacaactaagacgtgagtatgaagattagtgtcgccttaaattttgttatattgaccccctaattaaaaaattttaaattttaaggtagattttaacaagttttttttcttactcttgcactcgttagtattctcttaaaatgtcaccctacacatctcaaaaaatcgtaaaatttcacagagacgaagccaagactgttgtgcaacactttcccattggacatgttgagagaaaaagtagttttcaagcactaacaatcattttaatctaaatagtgaaaacctcacattttctatagtggtactcctttttaaaatgtggctcggaccaatctcgaaatatgtttccctaatagtcacaatgaattcgtactactaagacatgcatatgaatattggtttcacattaaatttggttaaaatgaccccctaattcaaaaattaaaaatattcttctattcagggtaaatttttacaagttttttttcgtacacttatactcgttagtgttgtctttaaaactcaccctacacatctcaaaaaatcgtgaaattttacaagaatgaagccaagaccattgtgcatcacttttttattagacacgttgagagaaaatgaaatttttaagcactaacaatcattttaatcaaaatagtataaatctcacatttctgtttatgaaatgtggcccgaacccatctcaaaatatttttctccactagtcacaatgaattcttactaatgagacaggaatatgaagattggtttcgtgttaaattttattaaaatggcatcctaattaaaaaattgaaaatattcttctttttaagataaattttaacaagtatttttctgactcttacactcattagtgttctctttaaatctcaccctacacatctcaataaatcatgaaattttacagggacaaagccaagaccatttt

SEQ ID NO: 66779 - DNA, 849 bp, Cannabis sativa
tttttgtaattggattggattggatcggttcggttcaattggattggattggatgatgcccacccctaattagaacattagggggaaaattattctattatttctaataaagaattgtaaaaaagtccacaaaaacattaaatttttattcaaagtatataaaaactctattaaattaaataaataaaataaagaaaataattaattttatataacaagcacttataaaagagttttataaatatggtatatcggtattctttattctaaatttataaaaataaactttaatacagtagtgtataatttgattaaatttagcacatgctaaaaattgtttcaaatttaccactaaatataacatgggctaatttttttatgcaaaattcactgtaaagaccgcctaaccttaatatgttgaattattgaataattagggtttaattatgagattgaattattaattatgatttacacatttgtggagatttatttaaattctgcatgtactaattatgctatatatgtgagtttcttgttttttgtatttgtgctcggtagaagtgaaacgtgatgttgggccattagagagtcactttttatatggtttcgaatgtttttaataacaggccagcatagttagggcattgatagtatcgaaaatagacgagtttggaatgacaaaactacccttgggtttccatttattatttgtttatttgttaagggcaatatggtcattatgttaggatgtcttttgtcattttgtggcattagtgtgtcctgtaagtaaggtaattagaggttaaattaatattgcttaattcataatttgaaagaagctagaaa

SEQ ID NO: 66780 - DNA, 591 bp, Cannabis sativa
ttttcgaatgaatttgttggtcaagaaagttttaatttttataattacgataatatcgtatttaagacaataaattataaatttagaattttggtcgtgcttcaattggaggaatatttttctgaggtgaattctattgttttgaacgaatttattaattaataaattttatgatttttattcaaaaaaaaaaattaatatttattgagtttattaattacaaatgtcatgtttcatcatcacttgtttatatatatataggagaacatttacaactgagatgttaacaaattaatgaaagcaatttagctaatttgttacatatctaattcaaataaatatatttaagaggtagtaagactaatgagaaggcatatttttgataataattgaataagactatgattgcaataattaatttataaaaatatatatgagaaaatattttttgtaattaacttctatttttgaggctttttatataattatatatttttttaatatctttatatattaaaagtgtttatctaacggcaattcttggtttaacgattcttgctttaacgattttttttttatttagccttacac

SEQ ID NO: 66781 - DNA, 567 bp, Cannabis sativa
caagtcatttgttgtttgtcttaggctccgaactgttccacttaattctatgaaaagagttgtgtgtcgcatgaacaactaattcatgagtagctatgatagtcagactacaaatatgaattgaagacgcttcaaaaaaaaattggaaagtaaactagtactatcttctaacgagcctaaattattacaaaacgaatatcttttataaaaattagagatcaaactaaacaacctgactcaataaaattaagtcaaacaaccagtctagcaccacagctacaagtttggcttgaaaaatacattaaaataacatttacatcactaaaatataaataagataagaaaaataaacaaataaatcttagaccgaagaaataaactttccttcccttcctctagacatggcataccatgtcaataaacatgagattaattctcaaaattaatttgtgataagtgaaatagtacataatcttatatatgattcaatatttttatctttctttaatccatgtagaacaatattattcaataatcaccaacaacaacaaaacataaaacataaca

SEQ ID NO: 66782 - DNA, 1119 bp, Cannabis sativa
tttttttttatttatgtttgcctaaatcacaattgactcatattccctcattgatatcgtttccaatgtattcaacattgtgttgctcatatactaattgagcttgatctagttcaaacttggacattgtcaccattgtccatttcccccttaatcctctatcaacctcatctgggtcagttcttggctcgctaattcttattgcctcaatcccggccatgtattttaaacaaaatttcacagcctcttcagatatgtagcactcgaccatcgatgcttcttgacgatagtggttatgcacataacttttaagtaccttcatatttctttcaaatggatacatccatctcgcccaaaccggcccacacaaccttggttctctcactagatgaacaattaaatgtatcatgatgtcgaaaaaatatgtcggaaatttttttcgagattgcacaatgttttgactacatgttcatgtaatgcatctaacttatccaatttaattccttcacgcacaacttattaaagaaaatgcaaacatgtgttaaacactctcaaatattttttggcaagactgatctaatggtgattggaagaagatgttgcattaatgcttggcaatcatgtgatttcatacccataagttttaattcagcctcatttaccaagttattgatgttagaggagtaaccatcaggttctttcatattagcaaatgattttcaaaccatttgtttttccttttgggacaaagtgaaacaagcaggaggcaaatataatcgttcacctctcttctcaggtgccagttattgtcgtatacccatttcaacgagtctaaatgagtatttaaaccatccttagtttaaacttttccaatatggatgataaagaagattgactttctttgaaaccaaaatttgttttcttatttatttgcgtctttccatactttaaaatctacaagttctacttgttgggagaatttgttcccctgatagagtggaaaaggagtcatatctccctcttcagtaccatcaaattctttcttcttccatctctcaggatgatttgtaggcaagtaccgtctatgacccatataacatattgttaggttttatgccc

SEQ ID NO: 66783 - DNA, 947 bp, Cannabis sativa
cttacgtaagtttatattttaattaatttctatttatttctttcaatttattttgtattaaaattaaccatttaatttatttgtttgttttaggagcaaatggttgaaatagcggcaactcaatcagcgcccattgaagatcagcctgatgagactgctgtcgatcctacacagtaccctcgagacttgcctgttgtgacgcaagtactcgaggagcgatctcgacatttaagaggctttggccatctccccagactaaagggagttgggtccaaaagagcacctgccacgaattcttcagccccactgactgttacaatggaacagtacgaggctttacagaaaaaagtggaggaagcagagcagaaaactcaatatacgaggcaacaatatgaaacacaacaactctacctgagatgattccaagatcagtttgagtaactttctcgagctgtctcgggtttcaacttgccacccatggatcttgcaccattgcccactcctcctggtgttggatcgtcatcgcctgctcctggtgctggatcgtcatcgcatcctcccgagactcagagaaacaacgacgatgacattactcgcctatagatcattagatattttatataccaattagaactttactttttttatcatccaattcgaacattttttaatgttttgtttatagactaattttagtacaacataatataattaatgtttgtttatcttttaatgtaaattatgtttttttttttctaaatattaaatataatataattaattttgggtttataatataaaatataatataattaattatatttaattaattaatttttttttaaaatatagttttgccagcgcattactacgccgacaaaacgtagcataattaaataattataattaattaattttttttaaaaaaatagtttcgtcggcgaaac

SEQ ID NO: 66784 - DNA, 982 bp, Cannabis sativa
ttatctgtaagtaaagtggtaaacaatttgttttataaaagtgaattgtggattataatgtatttaataagtaaaacataattagtatctaaaagttgttattagtaatagaaagtacattaatttcaatatatcccaatattattgtctccccaagcataaacagataaaatatctcaaagtttggctttatgagcttcgttctaataaaagacaagtgctcaatctgtttgagccacatctaatcctaaaattccaaagaccaaattagaatatcaatcataagttacagtaaagtatcacatcagatcaataatacacatgttaattgattttagaaaacagaattttgttgagacaattgaagtagtaattcaagttgacttgagttcagaatgaccatagttatgcagcacatacacacctattttatgcaataaaagattccattaaatcacttttttgtttgaattgataaaagacgtaaacataacctcactatccctcataatatcgatgcttgcatcttctattggtcgaccatcatcagtgttgaatgttgcggtgatatactttccactactaataactggaaccatttttttggcattcacctttccatgagccatactgctccctaaaatgaacgatgtgagtttaaaagaggacaaaaaaatactggtgtttgctcccattggtatatgaaaatgaatatgaaagcaaaatttttaattaaggacaggaaaaatgtaatctttagatcccatcaaggcagagtttttcaaaccacatcacaccatactgatctctttctacacccgaaaatattgcagcatagtatcagatacaaaccccccacttgaacactatcttggatcataacaaagaagccccttcaaatgtttggagcatattttaagatcaaaatacagttaaacaaatactttatcaccgacattgtctaaggatatttcgctcttca

SEQ ID NO: 66785 - DNA, 1062 bp, Cannabis sativa
tcttaattagccttattattattatttgcaagaaaaaggttctatcctaatcatttcaacaataaccaaataaactgtttatcaaaaaaccaaaaaaaaaacaataatcaaatactttttttttaaaaggattgtcaagaataaacttaaatattagggtagacttttttttcttcatttttgtccatgataaaaatatattaggtggtgtttgatttggtataacagagtaataatagtaatttgataatgtaatggaataaaaatataataataggaattaattacaatgtttggtttttgtagttaaaatgaatattgtaatcataattattgtatttggtttagtatgagaatataaataaaataaaatatgaccattatatgcgatgagcaagtatgtttctcttgcgataagtaaagatcgctttacataagtttggtctgaatgactagtactagtgttcgacgactccttaagaacttgcaagttttaagttgttaacaaatggaatgtccaaatatgctaacaagtatgatcgcaaatattcgttaatttaaacgcccaaaggcccattatgtgattaaagcaccacaaagtctgggagcttgctttttggaatatgggtagatgatatgcaattttgtaagtcgcagaaattgctgcaattaagacaagaacgaatgaaactgttcttatatttattcctttaaatgtttatcttaattaatttgtgtgtagttcaatttgatcagttatgtaatattaatgggaatctattttctacataaaagggtgatccaaatcaaatagactgaactctgactgaaccactattatttattttttttttaaaattttctgttcctatttttgtctattttataacctaaactttgagtactcatgagtattctaagtgaataattacataactgtaaatagatattcttgctttattcgaatactcactttttttttttcgtattagtccaaattcttctaataacactagagtatttagatcacatactacatataatttaaagttataatggaat

SEQ ID NO: 66786 - DNA, 744 bp, Cannabis sativa
tgaaaaaaaccatcgctaaaaaaactataaatggtaaccagtactataaggaacggtttaaaaccgttgcctataacagggtataggcgataattttaaactgtcgggaatttcatattggcaatagttttgaatcgtcgcttattctgcccgttttgcgacagtagtataggcgacagttatggaaactggaaatactttaaacgattgtttaaaaatattggaaaaaaccatattttatagtagtgtgtaattttttggttgtttttgtatatttaagaaataatgccaacttatttttagtaaactcaagttggtttaactaatatacaccagttccccaaatataatatattttatataattgcataaacgaataatataatattcatcaattgcacgaaatatgtattaaaaaattaggtgtagcaatattatactacattattactatgattatgttttttaaaattcagcgctatatcattcacgtattttataattttttagtatatattttgactgtacatattcttacttattatataaaatattataatatatatacgtatactgtatacatatattattcaactgtaaaattatgcaaaatacatttattataattaatgagatgataacttgtaatacctgcttttcgggtatataggaagatgctcaggttgtttgtttacaaaatattatttataataatgaaattgtgatggtaacaataatctggag

SEQ ID NO: 66787 - DNA, 1008 bp, Cannabis sativa
acctgccacaaatactacaagtaggatcaatcatcatacctatatgtcgcaagtttgtctttgccgggagccaatttcggcaaagtttccatccaaacaacttgatacggggaggtaattttagttgccaccacatcttccaccaagcatgaatgttgtccatgtccgagcaacgagtagggctaagatttatttcctgagccactctatatccacttttcaccaagtattgtccatttgtagagaaaggccaaacaagttaccttccatttgtgtatcaataggggtccccatgatccaagggatatcctcttgttggaaataaaggtgtagaatatccttattccactcaccatcttcattaagaagattattaacagtggtgtgagggtccaaatctggatgacggtagaggatggttccattggggcgggggatccacttatcctcccaaattcgaatgtctcttccattaccaactctccaacgagccccttctttacttattttccgaccccacacaatttctttccatatacaagaagctcccgaggggcatttggcattgaggaatgaggaggtgggataatatctattcttcaagagccaagccagcaaagagtgaggcttatgaataaggcgccacccttgttttgccaaaagtgcttggttgaaatctgttaagcttcggaatcccaagcccccttcttcttttggcttacaaagcttgtcccaagtactgcaatggagtttcttattatcctttgtatctccccaccaaaagttggcagccaaggagtggaggattttggtcagcttttttgggatgcgaaagcaactcatggagtaactagggatagcttggatcaccgccttaataagaatttcttttcccgcttgggataacattgtcgctttccagctcttaagcttgctccgaactttgtctttgatcacctcaaatacctctttctttctccttcgaacaaaactaggcagccccaaata

SEQ ID NO: 66788 - DNA, 1124 bp, Cannabis sativa
cacatttaaaatccctaatctcatcagcctctctcttcctctctctcaactcactctcgctcaacccacccgatcccaaccccaaccccagttgacggtgacggcgtacccaatcgacccacggtgacggacccagtcgacccacagtgaccgacccaatcgacggcgcagagcttttcgaccctatcggtccaatcggacctccacgaatcggaccatcggacccatgcaacttgaccatcggacccaacctgtcggacccatcagacctatcggacccatgcatcgagaccatcggacccaacccgtcggaccatcggaccccatacaacgtgaccatcagacccatgcatcgggaccatcggacccaacttgtcggaccccatcggacccttttcttccccaatggtttctcagatccgatcttcttcatcatcatatttgatctggaaaagtatccgatcttcttcagtatatatatattataatactgtattattattagttaatatataataaatacattatgccgcggagcaatattaatatggtgacagtattagtaacggaccaaagggagggcggttcctctggtgggagagcggtcaggaaaggcgcatggaccagagaagaagatgatcttcttagagattgcgtagacaagtatggtgaaggcaaatggcatcttgttccacttagagctggtatatatacttattattattattattactattggtatacctatatatgtgcatatatatatatactagaaaaaaagttacgtgcaatgcacgtataattagttttatgttaagtgctctataatttaattgagaaagattcaataaataatcatataatttaaaatgattcaaaaactaattttaattactgtgtggagttatttagaaatcagtagtaaaaggttaaattcaaaatttacaataaaagaaagagaagagaagaataaagattagcttaaaatatatttaaaatataataatgttatagatttattcactcttctcttaattttatcctcaattaagtcatgagttagtgcaaatacatttttaccacacttactttagatacggaacttgaaccggtgataataaaat

SEQ ID NO: 66789 - DNA, 750 bp, Cannabis sativa
ccagtattataacaaatttctaactgaatatagttagtcaattaactgttttcaccagtggcttcttctttagcttcagcaaacaatctgatattaactttgtcaatccatataaagacgcgcttggaaagttatattgtaattgaatttatatgtaattagagataattatatgttttgacatgtttgtctgactatgtaattacattataattgtgtaattgtaggtaattaaggggttccaattacactctctaactctcatggcttcccatgagaattgagtgtaattatagtgtgtaattactataaattttctattttaaatattaattattaaaaaataatatttttgtgtgtaattactatttattttgccaaataaaatattaagaattgataaataattatcactttatatctaaacatatcttatattttaaaatatgatgtatatatatgtatattgttacaaaatttaatatttttagtaggaacaaataagtttaagactaacatagtgaatttctcccaacatttttttttcattttttctaaataacttcattagtgcacttggtgtgacttttagcatagcattgtcataacgagaggcatggtgcccaacaccactaaacatataaattggtgtgatttggtactgtgtctaatacagtttatttaaattcaaaaatacagagaatctgatatattaaattacaataatagtaatattccttttagcaatgt

SEQ ID NO: 66790 - DNA, 1186 bp, Cannabis sativa
atatatatttttttatatttttaagatattttataaaaacaacataaaatccaaacaatattaaaataatatacaaataacaaaaaactaataacaaagaacataatttctgtaaataaaattttgaaaaccataaaaaatatttaaaattctgtacggaatttttgtaattttttttttgtttcttttttgtatttatgaaagaatctcaaaaaatagtcacttttctcttgatatatgaaaaaattgctctaagaaaggtggaatgggccattaaatggggttgggcttgcttagttggagctgaagtaaaagtactggagttgggtccaattgaaaccctaagcccaatacagagaaagcttctcaacctcccaaaaccctaaccactagtaaggctttagaagcaaatctcgtttcacctctgtctttctaccgaatagctacgccagaggtcaaggctctcctcttctctgccacggccgcatcatcatctcgagtgggttagggttcatataagcaaaaaccaacttctcaacaatggcgtacgctgcaatgaaaccaacgaagcccggtctggaggagtcacaggagcagatccacaagattaggatcactctctcatccaaaaacgtaaagaacctcgagaaaggttgtctcttcattccctatattttatatatcaaattatgctgtcaatgcagttctttttctactgtaatgaatttaacccgtttgaggattatctatactgtactgttgaaaatattttatttcgggaggaagtaagcccaatattagactattaaacctacttcagatgtagaaactttattgataagaatttttgatttagggggaaagtaagacaggtagtatcaatgaaatgtttacgccagggtgacaagctcatttgcaatgtaatgtattggaaggaatagtaatgatattagtttctgaagcaaacagaaggattttgttttcaaatttaccaaatttgttttataattgtaaaggcaatgcgaaagagaaacactttagggctttgtaaacataaactgtttttagttcttaatcatataattgcattttagcacatattttagaaaaaaagattgcattttgctgtaaacatatgctcttgattgcaaatttgtacaggttgtttacaaatatgtaactgttt

SEQ ID NO: 66791 - DNA, 1643 bp, Cannabis sativa
  modified_base (58)..(59): a, c, t, g, unknown or other
atttttgtttttcaaaaacaaaacttttaaaaataaaaattttatttttatttttgtnnttaaaaaataaaaataaaattattaccaaatgaaaccaaagttgcttcattgtcaaaaaaaaaaatcaaatctatataaaatagggttagtttatagcacacccccgaaagaggtgttttagtagacttcctatctcttttggtatatatgagaattttttagtctattttttattattatcatttacattatagttatttaggactacctgtaaattttttaaaatatctgagtagtttacaatactgaaaataagatttgcatattttattgcacatataattgtttttcttacacgtgtgataagtaattattttaactttatttgaagcacggtatactattcaaaatttttaaaaaatttaaaaatgattttaaatagctacaacgtatacaatcataaaaaaaattggattaattttttttttctaaatatcaaacaaataaaaattctacaaaaaacaaccctttaagagatctagtgcagaaattccttataaattgtggcctaagtacggttcaaacctctcacttccatatcacaagtctaaaactatatccatatcaaaacatttagccttatatagattttaattttatattttccaaaatctttcaaaaaagcattatagagatcttatatgtccaaaatcttccaaaaatttttatgtccaatcaaaatctcatatcattttttgtaatattatttttttttttgctagaaatgttatttaattataaaataaaatataaaaatttaaacgagaattgtgtacggaggtataagagacatgagagtgtttaacctaaggtataatattgtaattggtgtaactgattattcgtgatactcatggtcaaatcatgacagctcacatttttttaaaaaaagtgacaaataaaaaaaattatatattatatttgttttataatcacatgttaccttatatttcattatttcaatttttttttcatcatcttaagctattcatctctctctcatgttcatcttcttcttcatgttcttctttattttatttttttgtttacaaatccatacaattgtttgaactttagccctcaagatgtgcttgatgagagagagagagcgagagaaagaccagtagacagagagcctatctcgtgagaatatcttcaagaaaaacaatacagaggaagaagaagaacagtagacaactcaaaatttctaagtaaaaaaaatctcttttttctttatttattttttttagaacaacataaactttactgggtttttgttgtttttactaattttgttttttttttcttttttggggttatagttagttctgattttgtgagtagtttgtattgtttgatggctcttatggtttattttgttattgttttattattgttttaatgttgttatactgttgttttctttcaattttttttaaatattattgtactgctctatttttaatagcaataggaaaataatgaaatttgtatgtaagttatttcttcagtatcatatagttcaatacatgttcagttttcttttattgttccactgttattttttagttgttctccttttt

SEQ ID NO: 66792 - DNA, 983 bp, Cannabis sativa
  modified_base (733)..(737): a, c, t, g, unknown or other
ggtctgggtctgggtcaaggtttgggtcagggtccgagtcttagttcgagtctgggtacgggttttttggatcttggtttgggtccaagtctgagtcaaggttcaggttcagatcttggttctgggtcccaagttcgtgtctgagtctacgtctgcgtttaggtctaggtctcgtgtttcaatccctgtctaggttttggtcggtatttgggtctggttatgggttcgtgtccatgtctaggtccgaattccactttcggtcaggggcctcgtctttgtttgggatcgagtcccgagttcatgttcaggttctggttcgagtcttagtcctagtctaggtctaggactgggtctgagcccgagttccggttctaggttcggtctagttctgggtccgggtcgaggtccaggtcacactcacggtcatgttccacggtcctgattacgttcttgttcaagtttaggttttgggtcccacgtttgggcctgggtctaggtccttgtccaacttcgggtccttctccgagtccctaatcaagacatcgactaagggtcttgtccaagccccggttctctgatcacgggacaagatttgcatcccaatcacgggtcccagtcttgtttcaattcatgtcccaagtcagggtctaggtttaggtctaggtccaggatcaagactggggtccagttctgggtcacgatcccagttctgggtcccgagtcatgttcaatnnnnnggtctgaattcaggtctgggttcgggtcttgagtcccggttcgggttttgatttagattttggaccgaatcccagggtgggtctttgaccaagtctgggtcttggtccggttacagttttgggtctaggttaatgtcctggtcatgtcttgttctttggtccttatccgcttctagtttcgattctagtttcaactcacgggatacgggtttgggtcgagtttggattcgagtctgggttcgggtc

SEQ ID NO: 66793 - DNA, 1224 bp, Cannabis sativa
  modified_base (965)..(977): a, c, t, g, unknown or other
gggttgaacacatccaatatttcctttcttgaatgcttctactatagcaccatgatgattcggagctacacaacccatgccaaaagacaagactcgaaccaaaaaaaactaaaaggaaacgactgaaaaacaatgtcaaaagacaagactaaagaaccatgtcaatagacaagactaatgggaaaactaaattagtttcaactcatatacacgaaacattaaaattaattaaggaaactccttataattctaacctcataaaaatattaattggaattaaactaataatagtaaattaataaatgaaaataaaaatatcaaacagaagacgactcttgaaccccaaagaagaagacgttgatgtgggaatgagaaaaactttggcatcaatcaagaagatcaatacaatagtcttctccttcaaacaccatagttattcaaatactaacaacttgttaattaattgttgagaatgatgaagttaaagattttaacaccaaattatctcttttttctttttttaatatttatttttatcattttttctaactacaatatgatttttaaatgtcatcatttttaaatgtgtaaaccatatattcaaaattaaaaataacttttagcttttttcctaataaatcttttagtttcttttttaaatattgttaataaaaaaaaagagaatcatctcatataaatatattttttaacttttttttttatttttacggtttaaattgttccggtagttgctatgtaaatttaatttgtaatttaagttgctccgttaattgctatgtgagttggtatatggatttccgtaaaaaatacaaaaaaaaaaactactttaaaatatataaataaaaaatcccttaaaaatatatttaaaaattattaaagtgagagaatgtgtgaatggctcactcttttagttttttactacaactaataataataataataannnnnnnnnnnnnaataataataataataagagttatttgcggcataacccccttaaattgtcaagtttttgcaactaacccctaattctaaaattttagtggtaaaactccttaaacccatattctgttagcacttaaccattttcatccatttttaggtgttaagtgttgggcactgtgccctaaaaaaaactctatttcaatgtaatttttatcatttaattatcaataaagagacagaagtattttcatcacttat

SEQ ID NO: 66794 - DNA, 760 bp, Cannabis sativa
cattatcatcatcatcaatatgtatattagtttttatatacacaattactattaattcattcatattcatattaaacaatgatatgaatttcatcattataattagtttgatgtacattttaatttattcttttcttaattctctcataatattaattttttattaagttcataaatattaattgattagataatatataccctaaattttaaaaattatttaaaactaagattatcatacttcttctactaattggttcctctaagatagatgacagtttttaagtttaatgaaggtatgtaattttcaatcttttttatctaatttttattttgatttaaaattttcattctaataattatctactgatatgtgtgtgtttttaattaacaatcttacatgataattcataataataataatccattaatttttaaactttatgagttttaaaggctcataatgcattgttactggtatcaactaaaaattattatgtgataatatattctttctttgcgcttatataattgaagaatgcactaaatatttgttttttgtacttgaaaaaaataatgtcctaaaattttctctttatttattatatatgaaagccaaaacttaatatcgaactctatatttttataccattcttatttttttagtttattatgaacactacattgttataagattatttttgttgttgttgttgtgttaagatctctaatttgaattattttgatcaatttcagcatg

SEQ ID NO: 66795 - DNA, 875 bp, Cannabis sativa
tattaaaatatgagttgaggaataattctttcttattttaacacatataactagtgatatatgattaatggacttaacattagtatgattaaatttagttaaaacaaatatgtgagcttttttatttaattgaagtcttattgaagagacttactccaattagagttttgttgctatgtttcttcttttaattctataaatataattttattatattccgtgggtgtaaggatctaatgaaggcttgaaacaggcgcattacagaagatcataactttctgtgcaatctctaataatgacttcaaattagtgtttacgctcatcttattatcatcatcttcttctttaatttaacaaatattctataaaatatgatttaaagttttttatattaaagcactactgaaatatgtttagatttgttattatttgtatttcttaagtgttttataaatcttaacactttggccttgttcttcacttaaaaataatcaaaaaagctgggttgttaaagggttggatagctttaaagatgcttcctaattctatgaattgcttgtggagtgtatggatgctcttatgaagcaagacctggaagaattttttgtgttgcgttggaggatttggtatcgtcgaaacacttttgtccatgagaataaattactctttgatgatttggttagtcaatgggctttgaattttctgtggcgctttcaatatgctcaagctaatttggctcccgttgttaatgtgaggctagtggggacggtgggtggtctctctggcatgcagtttgagattttgggtttgagtgattttaacctgtttgtggatgtagatcaatgaggtacaagggcgtgtggggcttggggcgg

SEQ ID NO: 66796 - DNA, 1622 bp, Cannabis sativa
tggaggcttgaagcggggacgttacaggtactctacaattgattagcgatatgccttaaaagttattatcttaagttatatgtgacgtcctcatacttgatttcacctatagcgatataacatcgagaaggatgttaggcaccactagtattttttagcatttctcttttgataaataataaagggctctctattagggttatgccctaaaagtagataattaatgaattttatattggagattatataaaatacaaatataatataaatgaatatgttaattatagaaatataattaataaatatcagaaaatttcatattcacatagagaatgtatgattttgtaaggaagtgaaagagaattaagatcatactatacgaatagcataagttggtattgtactaaagtatgtaatttttaatatagaattaccaagtacagtttacttagcactatactttagtggcatgtgattttgattcagtcacatatgtaaataaacatttagtgaaggtactatgaataatttgattatgcacgactgaaccgatatgaactaacatctctatcgacgtgtcattaatcataaaatagttattcatatcacaatgatgatcattagtagatcaatttaaatctcaggtattcatgaactcttgtttatgttcatggtgaccataacataaggttattactttcacattaaagtttcttatagaagatgattcttacaacttttattttagaaacttaatagcatgaatgactgggaacatattatataataataagtggaatccaagctttccgaaacgatcaaatattagttctctatagtattaattatgggagtgattacagttggatccaaatttaagattggaattataaattaatagttcatattgaattaatgatatttaaggaattgaagatataattagaagggtaaaatgataattttgaccagctctaattatgaactaataaattaaaggacgaactatttatattgattatatcaatgaactactaaaatgaattttgtaaatataattatatattgtcaaagagtgtaattttatattatagtgaggtaataatagaattaatcaacgagattattttattgatgagttcaataataatctaagattttttgcagcttcaaaatttagatctatatgactctaagatcacctctgtaccatacagtataggaaaaggtttaatttgagaaatacttattttgagaaagaattaatttttatagaaaattattttcgagggaaaaataataattttgaatgaattattattttgtatgattattcaattataaagtgaatcattaaatttttttaaccatttaattttattcacttaaaactaaatattagtttttttaaaacaaaaattgtataatattatgagagagatatattattttaattgaaaatactatttgtttaatttagagttaaataagatattattgagaattaatcaattataatttattgtaaaataaataaataattatatttatgataaaattgagaaaataatttttagcattaaatatagccgtgtaaaattaaggccctgataggtttcaag

SEQ ID NO: 66797 - DNA, 768 bp, Cannabis sativa
  modified_base (58)..(59): a, c, t, g, unknown or other
tagaatcaatagtataatttagtagtaattagtctaattccctgtggttcgacctcanntgtgtgagtttactacttgattgcgtatacttgcgtagtgattacaaaattaagcaacatgaagaccccaaaaaaaccatcataatgggaaggaatctacttccgtccataagagaaaacattgtgagtacagtaaaaaagaactaggatgtgctgggatggagccattctaacatgaatggaattgactgtaacaccatttgtcgtgctttgaacattcgagaggatacaacaccaatcttccttgaagtggatcccaaaagagatcctgacctcttctgtcagttctctgattgaaccgtctcattattagatcgttggcctcccagttgcggcgatctaattctgcctggtgagatcaaatgattcatccatccacttaggaattcgcatctctactgaatgaatacatcacaatcagcagtgtgtggttcttcaattaggcttgcctggcctacaacttccttgagtctggccaactcaaggtcttttcctaggtccagatgaggctttccaattgctagctcgcccactctcgagcctatttctccagtgtagaactggatttaaggtccagttgttgttccaggaggctgtcgcccctaggtccttccttcagtgggcgccaatggtggatctactattggaggcaagggcgtgccaattggatccatcgagatagtcacgtcaggctggccaggtgtggtgg

SEQ ID NO: 66798 - DNA, 918 bp, Cannabis sativa
ccctgaacatttacatttataaaattttagtccttctattagatttcatcctatttttctattgaaatactgatatgtctttataaattagtaattttgtctcctaaactttaacaactatattaatcataccccatccaaataaaagtgagaaagattcaactttttttttttgtggtaaatcataaaatattaatttagatcttacaaaaaattatcttgaattgctaaggaaattaataaagaaaccaaaattttaaagttaattaataagcaatttgaaaaattaattattttttattaaaaaattcatttagatttaaaaaagtatattgaaaattcaatttgtgtacaaattaaattttacgagaacaagtttgagtctatttgtttctccaaaaatttagatttgtttaagtaagtataatattttttttagtttaattttttagatttattttaagaaatattttatatttttattgtatttttaattatttttcattattttttaaaatatgtgtttataaatataaataaaataaactttcaaaatattttttatgaataatttagattttttaagtaaattattttttttgattaatttaatacttttatcaattttttaaataattttttaagaattaataaaaaattaatatttaaaataaacttttttcaaagaggcaaataaatttatcaaattttataacggtaaaaaaaatagaacctaatagaagaggtatgattatgttaccactgtattatagtggaaattgttaacaggtatatatttaaagggacataatcaagtagtgtcaaaagtttaatgggcaaaaatgctaattattctattttttattaatgagttaccaaccccattttgctaggaagactttattcatctccataaat

SEQ ID NO: 66799 - DNA, 1159 bp, Cannabis sativa
gctggtgtaaggattgataacataattgttgtaagagttgctaacatgtggttgatatatgaaattgagttgctaacatgattgttgtaagagttgctaacatgtggttgatatataagattgggttgctataaaggttgctaaaataatttttgtatgagattgagttgtaatacgattgttttcaataaatattaatgatttttttttgtcactctattaggttaatttatacattgtatattgaaacataattataaaataaaaccaaataaatcatagactcatttttgactcaaatttagttcaaaatgtactccgcttattagagatggtgtaatatcacaagtcatataagaattttaaaagctcttatacggttgtactaattcattaatgttcttaattgttgtgattggtcactaatagaggaaatagacatcattggctcaacccatataaccaccaacggttttacctaactctccgttatgacagttaggatcgggttattacatcaaggctataaatagcccattgctacaacaatttcagtagcaatcttgggagaatttttcagaatgttttttagagttagtttagtgtgcaagacaaagagagttttgagtgaagttgattgaaaacgaagctatgcttcttgagtgattgtgtcaagaacgcactgtatcaacattgtaattctctcttctagctcaataaagatttcagcttttggggctgttccagcttaagtgattcatcatcacttgttcgaacctcataattctggttgtgtttgattcattctctctatattcttgtctataattgctcattaatcattgttcatatcttgtttatagttgctggtttattcatttttttgttctctgatttttgaatcaattcaagttgcaaataaatttgttagctttattcttgattgattccttattttgttttgtgtatgaggtgcataatcaagcattgatcacatcattaattaatataaaaatgataaacaagctcataaataaggtgatcatcatcatgatcaaagagatcacgaggctactatttaattggcaaaataataaagggtttttattttaaaaaataagataataaaaaagactcatcatatttctatgttattatg

SEQ ID NO: 66800 - DNA, 589 bp, Cannabis sativa
tacatctttaaagacatttctctttaatcgatattatcttctaatatttttttttatcaagaagaaggacttcattaatcaaaccaaccaaatacaccctcaagaggcctctccaattcagaaaaagagcaaaacttcaccacacaactattaattacatgtcaatctttgtaataaaccaatttctactttggaaccttttctattctttagcatatacaatctatatttgactttttttttttttttaattttgttaactatacaagtaatagtattaaagtaattagagagtagacaattatttttattcctccaaatgtgataaattgtggtcgccaagacaaccgcactaatccgattgactatactcgggatggcagcacataaccacgagtaccagctatcaaacttcttagaccaccctttgaaacccagccagcagaacactccgtccaacacttgctacaacaacccacaattaaaaaataagtgctggcgtgtctcaagaattataccacatacatcatagttcaaattatccaccgtaatattgaacctactcaacatatctcttgtgagcatgttc

SEQ ID NO: 66801 - DNA, 782 bp, Cannabis sativa
aaacatcagcgggcatttggtctagtggtatgattctcgctttgggtgcgagaggtcccgagttcgattctcggaatgccccaattttgttcaaacatatttgaatcttatttaatcagtcattgaaaacaaatctactaactagtacagctttccattttggatctaaaacactacatcaattttttaatatgaagactgcatacagcttccatatctaatattttacgtactctaaacataaccttgtcctgccttagcaaaagattgcataattcaacagtaatagttcatacatcccatatttttattaggatctgaaaatgaaaagagaccatgctttcatccagaccagaattaaaagccatacaaaagaaacctcacccatgtaagatataattcattgaatccttggtaacaccacaaaattcctagacaaacttgcttattaatccgagaacaaattttcttttcctttggagtatataaaaaatccctataatatttgagttttacaacaccaaggcgaaagctgcactaagtttcaaaacaaacaaattatatgaaagaagtcaatagtttcaaaacaaacaaattgtatgaaagaagtcaattacgcattgcatagaaacaaaagaaattattgagctaaagaaatgaatctatcgacctatgttagcctttggatgcaagataaacatcagtgggcatttggtctagtggtatgattctcgctttgggtgcgagaggtcccgagttcgattctcggaatgccccaattt

SEQ ID NO: 66802 - DNA, 787 bp, Cannabis sativa
aatttattatgtttacctctttttccaatcattctaccaattttactcctattacttcacgataacttttatttttctctaattaaaatttcgcccaaactttcctacaaacctatacatccatctacaaagaatataaatctattatgtgagtgtgtgaggataatttgggtacagtactcataaaaaggaagtatatttgaattaaattttatttggaggtaaatttagttaatatataaaaaataaagtattcttcaacttctcccatacatttataccccacgaaaatcataaaattttattattaatgtaattatttgtttaatttttaaacaataaatcatcattttaaatgtcactaattcaaaaaggaaaaaaaattaaaatatgaaactgtaacaataaattctatgaaaaaataaatatagtagtacaaaaaaataaattaagttgttacaattaagttaaaaaaaggattttggacttctgttttgcaaaagttaccgattggactctctcttttgttaaatgacaaaatggaccttatattttctaaaatggcaaaaatagaacactgagctcagtttttgacaacttaaagacaatttctaatacgaacagatacgaaaaaatataaatatttttatcatttattttgataaaaaaaattaattcagagttctatttgtatcattttagaaaatacagtgtccattttgttatttaacaaaacatagtccaactggtaatttttgtaaagtacaggttccaaaatagtatttac

SEQ ID NO: 66803 - DNA, 816 bp, Cannabis sativa
agatggccatgacaattgggagccgccgcaccagccccataccagccttccgattcgtataaatttattttttataactatatattaacaatttttaaaaggaaattatctcatgcactattttgtaactttttttaaaaaaaattacggttcgagtttctaagatggtttctccggtgatttcaatgtaggttattatacggattttggttgcgatttaggttgctccgttagttgcaataggagtttctatgtagaatttcgtaacaatacaaaaaaaaaaatattttgaagtataaaaataaaaaaggtccttttataaaccacatttatagagtaaataaaaaaattgtaacaaatttttatgtaaatttctgtagtaattgtaaatactgtaaattgtgattttttttttcaatttcaaaaattaagatgcagtaatatattattacattttattgggggaatatactcctttagtatcttgtatttttatgaaaaacatatttggtatcatatattttcaataatatttaattggtacctcatatttttaaattgtacatatttagtaccctaaaataaaatttaatcaatacagttttatcaatttaaccaaaaagttctcagttatatataatcaaaaaaataaatttgaattcagaattcataaaattttagactattgatagtattgattaaattttataaaaaaaattgaatttagggtaccaaataggtatgattttaaatataaagtactaaataagcattattaaaaatacagagtatcaaacttgtatttagataaaacac

SEQ ID NO: 66804 - DNA, 855 bp, Cannabis sativa
cacgctacaatgctcttttgattattatgcactcctttataatcaaagaaatttctcaaaaattgtgataagataaaacatttttgaataatattaaactttaataactatagttttatgaccaaagaaatatgtctggatcccactttttaaacttgtttacatgtttaaaataaactttataactatgtcgcacatcgactacaaaataaccctatgttatcccgagaccgaactttccaggttacaccatcttgacaagtacaatcaccttcaagctccggacttattgctgctcagccttagccttttctttacctacacatgacattgtatttaggcgcccatacacctaatcacaaggcttaacagaggattaagaacgttcttaacaaaagtgcgacctttgtaccacatgcactacgtaccgctactgtactagtgttggtagggtttaaatcgtaccccgagtaccgttaagtgttgtaccacattcactacgtacccaattgtactagtgttggtaacaccgaattgtactcttaaatatcatgtgctatactacatgcattcagtaccctttcgtactagtgttggtagtatataaatcatataacagcatgtacatacacatatacatatatacatacatatatattctatgctattcatataacatcatgcatataatatacatacacatacacatatacatatacatatatattctatgctaatcttacctcgtctccaaatttaaatattctggtcgacctgaatgaaaaatcaagcgctgaacagaggccttatgtcgcattcacgtaaaatgggtaaataaccttctaacatcttttc

SEQ ID NO: 66805 - DNA, 830 bp, Cannabis sativa
aataaataacttgcaataaacatcgacatttttactataaacgaaaataacttacatatcagggatctcataaaaatttgttttcaaaatattacaagttatttggtacaggccgacctaagcgaaaaaatagaatttttaaacacttcctgttggaccgaacccatggtggtctaacttaactggaacatgtacaagtcatcctcaaagtcctcgatctcatggatgacctgatactacattagccttgcctacataataaagcacccgtgagccgaggcccagcaagatagaaaataatataatatgataattataataataattacacttcaaatagtaagccattgcatatatatataaactgtgtgatcgcattttatattacattactttatataataatgtcattataataaatgtctatgtagcatagacctacgtgtttttctcacacgtctgtttacatttaaggccttactagggtttgtctcggttataaccaccaagtctaaactggtaatgccttacccacataactctacacaaatattcaattaacatattattgcacacttctaacaatacgcacttagggtaataaccctaggtcacgaattcttaatgacaatcaaatatcatataactgcgccactgcgctatattctatgtctttagttctctgtcttacctaagttccaatgtatgaggagaaatcccaacccagaggtgatcctgaccaagtgccaatatctctagtgacaatcctcgagtttcacaaaataagttaatcctacaatcaaatttcatagtattcgtatttaagatta

SEQ ID NO: 66806 - DNA, 1977 bp, Cannabis sativa
ttatcttctttgagtcatgttgttcaatttgttgaacgacttgtgaacaaagttgcctattatttggcgcgtagctcttattttttcccaagtcgtactttttaggattagcagttaagtcttgaattgtgtaatattgtagtggttgatttttttaattaatgaaagttaatctttattcaaaaaatatatgtacttgagtttcccaacttcataaatggccttgtctttaatgatacctaaccaaaaaaaatcattttttaaagttactatttgttttgttggtctcgctgttccaccatattgggtcaccacctcactttaactcttacattaatatgatattatcaattttggaactaaatatttatagttttatttttagacattttcctcaaagacctcatactaataaaataagtaaaatacttatatccaacgtaactcttactcatttttttgatgtaggacttagactgataccctaagtactactcaaagaagagaattttgtggacttaaaagttgatccacaaagttaagagattgataaaatgtatttttttttttttctttgtttaattgacaataaagtaggttgggaaagttaatgagccaaaccacccaccaactaaaattaaatgaaagagaaaaataaattccaaccttttttttttcttaaccacaatcgatctaactcaactcagctttcttgtaaaaaataatgctttaatctcaattttaaaacaaaagaccaacttcaaaacatagtcaaattaataaactaaacatttaattgtgacattctacaatattaaaatatagcaggcaaaacctgcctggtattgattgttttaataaatactgtatatataaatatatgatatgatattataatgtaatccaaagtcatcacactcatcagtgtgacccattcctatataaatgcaaacatgcatgtgtgaccaaattagcatcatcaataatcctaaacaactttcttatcgagcattgttattggacatcaaggtcgacttaactataaggcaacttaggcaatcgcctaaggtctcacaaaatttaaggtctacattttaatggtaatatacattatctttttataatatgggtgatatacattaaaaaatatatttcatatattttcagaaaaaaaaaattcttcatgaacattaatattggctactaattgattgtcaacattacaattaaattaatttcaaatctaaaattttagaactattaattaataattaatgattttttcttaaaaaaaattatatataaaacaagtttaaataataccataatattttcttatatttatacttattttattgtgatcaattttttgactattaatttatttttttattaaagatttttataaatgaattaaagttcgaagaaaaaaattatagtttgatgatcattaatataaaaagtaaaaaaaaaaaatcttaataataagaatttagaattagtttttctgaaaaaataaaatttcaataaatcttgagaaaattaataattttgtcaaaaatgactaatttaattttcactaaggccttgtttaagcttcgcctaagaccttgtacaagtttgagatggccttgttgggcaccaatcgtgcccagcaccttttataggtagtgttctaagattggttatcgatatttcttaaaaagtattttcttatgttaatgagacacaatacttaattacataaatatcaatatgacactaagaatgttactaagcatatctctatgtctctctctctatctactactgttgagtgtttaaaagcttcatgctcatatctcacaaaagcttacacacactctcattatataatattattatagtagttttgtatctcataaatattatattctctctttatttcttcactctagtctttatttatatgaaaatttttatagtgtgaattttttg

SEQ ID NO: 66807 - DNA, 846 bp, Cannabis sativa
accttgaaattcttcacactatactgggaaccctcactcaaaagatgcttaaacttaaaaacaaacaacttttcgaattgttgcgtgcataacattttcctgtaacgaataaccttattatgtcaaagtataaaacaatataaaataaattaaataaatatttggataaataaatttgtgcataccttctcatcaatgaaaatcatgtccacactaattaattcatcatccttcttactgttagtagactcccacatcctacaaagtctaatccttatgatccaactttcattatcattcttcaagtcttcaagaaaagaatactccattttataaactgtaaagaatgcttaagaaataacacaatagaagaaagaaattttgagtgaaaataatggaacaaaacattctttagatatgcaaactcatctagtggtattaaattgctaattctaaaattaaattgaatgactattaaaattcttctttagaggaaaaaaactaataaaaatacattaataattaagaaataatataataaagaaatataattttaagtgttggatagtaataaaaaaaaattaatgttagagttctattgtttttgtattaatttttaatactaaattttatcaaggtaaaaaatttaagtaactctgaaaaattaagagcaggtggattagaaaagaatgatatatttttactgaataatttatttatatttattaattatttaagagaaaaaagttagagggttgtaactgaatatagaagttagaagattttaattgaaatatttttgtcattattatttttaattgtaaagagcatttatatttaaaaaat

SEQ ID NO: 66808 - DNA, 571 bp, Cannabis sativa
ttcaatttccgtcactgagtaactactagacgccatgatcaagataacgataacaagacaaacactatttagaacatattcaccatgtcaaaagacaagacaggccagccctttttttgtattgttatgaacttaattaagttgtattgtagtaaaattaaagttcgggtccaaggtttgaggttgggattcggggtttggtttaagttcggggttcgaggggtcagggttagggtgggggttggggctggagttggggtcaaggtctggggccaaggtccaaggctgagtctacggtggggttccaaggggacggggccagagtcgaggtcagggtcagggtcaggatcggagtcagggtcaaagtttggggttgggactggagtcaagggttaaatatgatatagttgaaaatataacttttaaaaaagaaaaattaatgcaatactattgtgaaccaaatatagtattgtattaaaaaccatacaatacaaatacaatatagtgtaccaaatgatcttaagtcttattgaattttttttatttaattttatctttgtgaattaagcac

SEQ ID NO: 66809 - DNA, 638 bp, Cannabis sativa
aactgtatttttgttattttttttgttgtttttgtgcatttgtgaaattaaccctatatttttcaaaggaatatgatggaaagataaaaaaaagaatatttagagtataaaatagtttcaaatagtatttattttgtggtaaattacaaaaaagttgttattttatggaaaatatttaaatggttatattatatatgtaaccactatgaatatatttatttttaatcattggattactattaaatgattgtgattagtttagagattaaaaatacataaataataattaacctgatagaatcttgatactttattttcttataaaatattaattaaaattaaattactaataattattaattaattttttacaatttgttactaagtaagggtcttttagtaattttatttgtacttaattattaaaatatttgtaacaaaactatttataatttaaaattattatacacataattttaattaataaaaaagagtaagaataattagaggtaattttacactcaatcttatttttaataatttaattgtcacatcagtatgtttagttattttttaatttaaaaattaaaatataaatattttaaatctaataacagtctattcaaaaaaaaaaaaaa

SEQ ID NO: 66810 - DNA, 1150 bp, Cannabis sativa
ctttaagcttccctttgagtagaaaagcccccgtttgtttgtccttgacaaaacaacaagatttgtgaaattcaagaaacacattattatcattagttaacttagagacactaactaagtttttggtcatggcagggacttgtaaaacagaatttaaatgcaaaggagcaatagaatgagaggaaagagttgctttaccaacatgggatataacaagtctcttaccatcaccaatagccacggtttcttggccagaatatgaatttgctgaatcaagattgtccatgttgcaggtgatatgattagtagcacctgtgtccacgaaccaacctgcatcatcaccaaaatcaggcagggactgagtgatatgaacctgaggatcatactcaagttgtagttcagtaaggtgggcttgagattgggagggatttggtttaggagtcacccagtttctgtcaaaccgataatgacaaacgggagcagtatggccaaactttaggcagacttgacacaggggacgattttggttttgagatcgaggagggtttttggaaggttgtttagatgagtggtcaatgttggaatttctggtgtagtaagggggtgggcgataggggccattgcgtgattcaaaagtgagattggcagacattttgttggacaaatcaagcacggagtggtgcctttcaagctgtgtttcatgagccagaagcaatgcttgcacatcttcaagagagagatcatcactgcgagaagtgatattagccacaacagaatcatattcttgaccgagaccatttagaagatgcaagatcatatcaagatctgctatgtgatgaccagcaatggcaagagagtcacaaatcgatttgattttgtcaacgtaattcgagatgcttaaggagcctttctgtagatttgtgagctgacttttgagctggagaagtcgagccttcgactgactagagaatcgttgttctaaagttttccacagagtgtgcgatgtgttgtaattagcaacagttccaagaatgctttcagacattgaagagcgcaaccaagatagcaagagttgatctttgcgtctccattgaagaaaagtagtgtttgtttcgccattgatcaatttttcaggaggagtgacattaga

SEQ ID NO: 66811 - DNA, 1111 bp, Cannabis sativa
ctgtctactttatttatctttactctcagtttcgatttcataatctttcttgtatcacatgaagggatgaacatgtatatgtctacttatgatttcagactatctttccaaaagtacaaaggtatatataactatgtttttcttattactcttttttaatacaaaacattgttcacttaaattagtgaatattattaatgtagaatagagtttaagctcttcttagtagattgaagcataataaaattgagctcatgtaaacaatggttacatgagaatggtagtggtccctcattttattgaagtcatttctcatattttctagctatggcttataattttaactcttggctcttgcagggctatagctccaggagttgttttagattcgtatgaggcctttaaacatggatcacacgtttaaggaaaagaattcaaaaggaggtgtcttatttatttgtaattgtttaaggcacacaattaaaaattcttaaatatcttatttatttattattcttcaagccacaaaattaaaaatccttaaatatatatataatttaaaaaactttcttaaaattagtagtcttctctttcagatttccttctactttttgttgcatttcttatgatcaaaaagaagccccactttatctctttttgtcttgttttgttgatttgttttgtttagttgatgaatctttttttttaattatcaaaataatctattttgaactaattttgtacttattttttttaatttaaaaaaacttaagtcattgatttagctttaatttcatataaagtccttttgcttttattatatctaaactaatttaatttttatttcttttaaactttacaccatctaaattaatttctttaaattttacacactttttttaaaaaaaaattactacgattttctattattatcactttatattgaacgttatttattttaaatttacatgtgatatttttttggtatatataatcttaatagaacttagtatacgtgacttgtcacgtaacttctatctagtaatatatctatatatatacacacattatccacacacatgttttttcctctttatttcctaaaaattat

SEQ ID NO: 66812 - DNA, 897 bp, Cannabis sativa
ataataatataaaaatccaattattatattatgagctgtgttataatatgttacaaatatcaataagggaccattctttcttttcttttcttttttttttttgaattatttaatgtgctacaaagacatacagcctttagcaatatgaatatgaagcttaattaattatggttttcttctgtatttattaagattttggattaaaattcacaggaaggatcagttcaggggaagaaatatggaggacttgttccaaagaagaagcctttgatttcaaaggttgactacaaattaatatataattttcaaatattaattcttttgtttttttatgccataatattaatttaccatctttgattattaattaattaattaattaatttttttgtgggtatatataggatcatgaacgtgcattctttgattctgcagattgggcattatgcaaggtatatattaactccccaaaaataatgaaattataacatcatctattaacataataagaaaatatttttttgtttattttgtaaatatatataataaagttattttgttttaaggatgtggtcccatgtaatttaggaccatatgaaattgccttgtctttgtctcaattggactaaaatgatcaactagtaacaatgaattaattatttagtcttagtcatactagattgtatatatatatctttcgaactaggagtttataattgattataattttttgataacaaaataatttatgattagaaaattaattaaatttcttgaaacgcacagcagcaaggtgcaagtgtgaatcaaaagtctacagctgccgtagaaactttacggccaaaacttaaggtaataaataattataagggaaatgtttatttttatgatttgtaa

SEQ ID NO: 66813 - DNA, 585 bp, Cannabis sativa
cagaaggatttgaatatgagacagaggcggtggtcgaaattagtcaaggattatgacgctgagattctataccatcccaaaaataatccaatgttgtggcggaaacttttagcagaaaaggccctgggcaggtctttaatactgtaattttagctcctctactagcttttgaaatggttaaggctgaaattgaatttgtagttgggaaatttcataacctgacacttcagtcagatttgttggaaaggatcaaaaagacacaaatggaagatcctgagctagttaacattccggatgagattttggccgatcgacctaaggattgaataacggaatgcttctttataaagctcgggtttgtgttctagacaataatgaacttggaaaggaaatacttgaggaggctcacactatactctactcattacacccgagaactaccaaaatatatcaagatttgaagccctgttattggtcgtacgaaatgaagaaggatataatcaattatgtgtccaagtgcttgacatgtcaacaaattaaactgaacattagaaactagcaaggttactataacctttgacactt

SEQ ID NO: 66814 - DNA, 897 bp, Cannabis sativa
acacaaggagaactctagctacaatttctttctcattaagtcttcctcaagaccctatgactggagatcctgatgttcgtattctagtcacaactgaaatctctacaaacccaatagatgtggctgacccttccatctcgataggcaccacaaacttggccaccacgattggttagggggacacaaccaacccagttggtcttaatgggcaaccacacaatgttggctacaatgcatttgcaaaaacaagatgcaaacttctgagatggatagttgatcaagagtatattatttgatctcaccaggaaaattagaccaccgtaacagagaagctaatgatttgataaggtacttcaatgaaagaattacttgaagaggtcagcatcccattatagatcctcttcaaggaagactaataaaaaaattggggagggtctatcgacaaactatctaacaaagttcctctagaactagaacaaaccttctcgaacttaaaggatgataagcttttccacgaagatctagtggcgagaacaggaagactctggcaaccattggtgtgaggggtcagcttgggctctctggaacaataatgcccaattgtccaacctatagctggccaacaccttagaagtgcacctctagctggccaacaaggtgaattcccatcctgggatgtctaggagcgagtcacccgaaggccaatctttaattggtgaggcctatgattgggtggaaacatccaagacaataataacttaagaagtgagaccaatcacttcaaatacttggatccaccaaactccaaaagttggtggagtctaccccctgtcaacacataggctacaccggctagttaagaaagaatgggagactaggccctgtccagcaaagggc

SEQ ID NO: 66815 - DNA, 1318 bp, Cannabis sativa
  modified_base (444)..(449): a, c, t, g, unknown or other
aatgcgagccattatgttgctcgtgtgtgttgtggaagttgtgaaccatggtgcagggagagagcctcgggggctcacatgcaagccattgtgttgcttgtgtgtgttgtgtttgtgttttgggggtagtaagtgtaaggtgaagggtgaatgcacatcgacaaaatggacatggaaagaggaaccaaaagacaaggcgttcaagggaaaagcgtacaaccacgccttatgaagactctgaaagcgaggaggtatgagtagcgacaacaacagacttgcaaggtttaaggacccgacagggccgaccttgagctaagacgaaggaggcggccgccttagaccccccaccgcttagggctccatttcgaaaaataaaataaaatatagttagtaataaaatagttaataatacttttaatgttaaatatgtgttgtagcctagtnnnnnnttgattagtttaacaactaagaggttgagagttcaaatcccaatagcctcactttttcactgggccccaattttttatttttgtctaaggcccaaatttacataaggccgaccttgggacccgaccaagcgtacgctgcaaccactctcctgcaaccggcgaccgcactcctgcaaccggcgaccgtctgacactagacaagggtatgaaagtaaggccacatctagcacctgcgacatgcagcaagataatgacgttttgtcacattgggaccactttgtacatcaagccattagagctaataataccctttctcatatgtgagagggggttggaaaatcatacttgtaaaactacattaacagcaatagaagttcttatattattctctctatttcaagataatttgagtatatattttatctttctctttatctcatttatgagcttgaagcgtaaagttgatttttcagccataagttagttgatgagttctcaccgttaaccgagaactaaaaaaatagtcataaaaaactcattaaaataacaaatataagtggagtagtagtaaatggagttagtaaatacaaaatttgtaattgaaaataagtggttaagtgttattttttttaaaagcaattgagtgtgtattaatatgcatcaccatatgtattttgggagcgggttcagggcgaatatctattctcctactctcggtccatttctaactcgaatataaatatttaaattcatacccgttcccgcccccaaaatttgacccatgtcctgcctaaacccacgagtatccgaaccctgagtacaattatcatccctacatttttcctaaatatagattatcaaatattata

SEQ ID NO: 66816 - DNA, 1414 bp, Cannabis sativa
attgtcaattaagttagtttggaagaaacgttaattacttttgttaaatagcgtgtttcttaaaatgccaacaatgtttagttatttacgctttaaagtttagtttgaagttttgggtttttacaaatattttaatataaatcacaatttaatatttatataatattatttattttttttttaagaaatactatatataatatttaaatattatacaaaagagaaatactaaaagatactactagtacactctctattgtattttattgttattgatataattaagtattgaatcccatgtaatttaatatgataacttttatataatgtcgctaactaatcacaaagtaagacctctaagtagtgctagacaccactagtaaataatgttctatataaaatataatataaaaccaaatttaataaaataaacaatacaataggatctaaaggcgtaccaaacaaatcttaatgtattctaaaacaaaatacagttgttatgttacaatgaattaaaacttaccctttagtttacccatttctttgacttagaaatcccttgccttacgaatatttgattacagaataagcaaagatagtgtgcctaacaaaaagttgtatataatactataagacaattatcaagtaaactattattagcagaagattcaaatactttacaataataattttatatatatattattttttaaaaaaaaagatacacataagccagctataaagaaggaataaaacaaaagaatagatacaaaaagataaacacacctaaaaacttaacatagctcaggaatctgcaagagtatattatacaataggaagctaccgaatgaatggtttaatcaaccacagagctgtgtacataacccctgaatccttgaactgctggggttgaacacagtatatatgttagttttgttgttgctggagcatgttaagttgagctgattacccatctgactcgactgtaacaataacagataataaaattaattaaaaataaacccatgagtgttaattttatgttcttgacaaacacaaaaagaagaaagcaatggttcaattactaaccaagcagaatgcaggctcagtcttgcagctccattttgaggttgggacacaagacaaataatgacaccaagaacaatgttcatttgcatcaactccccggagtagcagtaccaacccgactgttagcctgtcaaggcaagtaatcggaaagaaattttgagttaagaagaaaaaagaagagaaagatcatcaattgacaacactgcatatgtgtcatcagggaaaaagtttaaatgtttcagtttcaagaatctgtttttcccgccacattgtcaatttacaaataagaaacggaaggctgaagctagtaagcaagttttaaagt

SEQ ID NO: 66817 - DNA, 1043 bp, Cannabis sativa
tttttttttttttttctaaatgttaaaataaaatatatttttgattggttgttttttgtttttttttctttattttggtttttaaaatataatatatttaatattataaatttataatatatattttctattttaatacttgggaataggtgttttagccttttttttaaaaaaaaagttatataaaaataaatttaattatgaatggaatttaaaatatattattttttaattatttaattatttaatatatataataaaaattaaaattaacaaagataattcaaaacattgcattaaattatttataataattaaataaattttcactttttgttgttttacatttagaaaaataaattaaaaatattttttttcactgagctaaatattaataatgacatacttttaaataatttaaattattctttttaatcattaaaaataatataattgcaattttaaatatcatttaaccaatttaatatttttttctttgtaaattaaataaattaataaccgcacctgtacttgttgtaataattgaaagataaaatttaatttataattattttaaatttttgtgtataatttttggaaatttacacaacttacctaaaaaacatactttattttttacgttattacaatttttttttacatttttacggacctttttttttttttacatttttaaggattttgatttttttttagaggttttcactttttccaaaaaaaaaaaaaatatatgttgctttcccgtagaatagtatgaattaaatacataaagttataaaaaatcttacattaatggcagtagaataatatgactccttcatctctaactcttgatcatttttgttacagagtatgatcaagatttgaactttatttctccttcatgtaacaaaaactacgcaatcttccacactaactttagtattttcttgaattgtgtgggaaattactcattcactatagggctcaaaatattcaagaagaagaggaagataattcgaatatgattaagagctctgtat

SEQ ID NO: 66818 - DNA, 974 bp, Cannabis sativa
ccccgagatcattttcccaacaagtttaagatgccaacttggaaaatgtatactggaaaggaagatcctttagcccacctcaagaatttcgagatgtaaatggatctgcaaggagtacgaggagatgtatgttgcagaatttttcctgccaccctctcagaattcgcccagcaatggaatttcaagttggcacccagaatgttcaactcgtggaaagctttctcctcggagttccatgcacaatttttttcctctcgccaacttctgttgcacctatgagatctagtcgaagtaaagcaaagaccaggcgtgcctctccgagcctacatcagcagattcatgaaggaagcgacaaaggtttcacgagtaactgaagacgaaaagttgtctgggatactggggggcattgaagtccttggtgagctttggaaggacataaggaagaatggtccagtagactcgatgagtgattttcttgactgtgctgaaggctttgtcaaacttgaagaggctattcaacgagtagaaggttagcaaaaacttggcaagttaaaagctccttccactaggacatccatccagctcccccattacccaagcaattcaggcttgaatggtaaacggcccaacaatactaataggcaggggaatggaaaaaagggaaagttcacttgcaagaccgaacaagctccccgggagaatcctaccaattatactgcatttaccatactgacagaggacatagagagtgtttatatggccactcagtcactagccccgtacaagaagcccgcacccatgaaaaaagatatcagcaagagagacatgaccaagttttgtcgatttcatggagactacagccacgacaccaatgaatgtaagaacctgaagagggaaattgaatttctgataagaaaaaataacccgcacgtacagaagtatgttaaggccgatcaaaatcagaggggcgataa

SEQ ID NO: 66819 - DNA, 933 bp, Cannabis sativa
  modified_base (867)..(893): a, c, t, g, unknown or other
tatatcgtttaaccaagctctaaggaaactattgtttcacttctaaatagttatagaagctatagattctatatctaagattaatgctctcacttaattacactaccaagctcccaacatgtaagtatgggctagtcctacgagtaaattggtaacaaataattctaagaacccgtatagtacaattaagctatagcttaaccatctcaggattgaaattaattgatctaatatcaactaagtgacattgacttagaaaatatataatcttaagtttatgatattattttcactatcaataacggtccagtctgatgtatcgttgatgcatccaatataattttactttactaatgtcctaaaaaagacattccacttattcaagtgtaagtaaaccacatcgtcgattatcacatctgtgtaaatcaagtgtttagataaattatgagactaaataatttaaagcatataatcatgattattttttactgtgtgaacaacactataatcatgagtaactatatatgctcaggatttaatagaattcatatattaaacatataatcatgaaagtaatcatgtgaactaagatgtataaaataatttatgatcttttattaattagtaaataaaattatattgaaatgagttttatttagggcataaaaccccaacacttttcacccgtggatgatccaaatgttcctctggctccagatttatggttctcgatgcctttggctttacacttgtacaaatgggcatttgaatgtccttgtaacaaattattcaatacttcttgcatgttggcaatgatatcttctaacctttggcttttcaaccatagtgttggaatttattttaccnnnnnnnnnnnnnnnnnnnnnnnnnnntttattaacaccctaaatatgaaatttctaaaacgatgaa

SEQ ID NO: 66820 - DNA, 540 bp, Cannabis sativa
cctattagttgtgatgtagtctgcaacaagatttgattgagcaccagtgtagtaataagacttaaagctcttataattctttttacaaaggtatatagcacaaaaaaaattgtaaacttcaatttttaacaactatatagtatatatcatattgttttttttttttggtagaaagcatatatgacattgttaaatgttttaatattaatttcttcatataatgtatacttttttctttttaatatatttagaaaactatgttattattttttatgtagctagtacctgtaaagttgtactgtatgataaataaaactaatcatcaacccttataattattttgttgtacatttaaaaattcaaattaaaatttccaaagttctacttataatcaaacatttttaattaaccctatacacacagttattaaattttaactttatgataaaattttaataattaaataaataatatatgtataattgaaattcatcacaagaaaaaaaaaaagtcatcttcaattaaattaaacaaaattta

SEQ ID NO: 66821 - DNA, 921 bp, Cannabis sativa
attttgacaagaaatccattcctataattctatcgaaataaaacagctatagttcgatcaggttggcagttaactcacaactattaatcaaaattgacaaagatctgatccacctaattgagatcattagctccccaaatggtaacatggttctaaacctcgaagcataaacatcgagaggtttatgaaaacattcaaccactctgcttgacacataagagtgcgttgctctagaataaaataatattgtataagaaaagccattaatagtcaactgacctgccacaatagatggactagcatcatcattagcctgagttaccgtgaatagacatcttggattttggttattgtttttcttcggttcctccttcttagctttgggacagtctctgataaagtggcccaccataccacactggaaacatgttttggccaaacattcaccctgatagtgtttcttacatttgggacactttgggtatgacctgaatgtatcaccaccaccttgacggccacctctattaccccaaaatctcttgttcaatctggatgatctgaaagtctcagtctttctcttttgataaggaataccaccaccagtccccttactgaagttaccactagcacttggaattgatgtcgtaccggcatccatagtagtctgcttcttaatttgttgttcagcctcttcggcaatcagtgctctctctaccactttcttatacaaagtgtcaagatcaatggtaatctttaaatcccgactaatcctggcatccaacccagtaatataattttgtttttgggtgaaatctgctggtaccattttgttagcaaacttagacaagcaataaaactccagtgtatattagccactgacttatcaccttgaaccagtttcaggaaatcctccatctgagt

SEQ ID NO: 66822 - DNA, 719 bp, Cannabis sativa
agcttagttgattcatctcgagttcatcatattagatttgaagaatgaaggctgaattatttgtgagagatgtgttgcttcgtaacttaaaaactgttttaacttttttaaaatagaaaattgattttaaaaaccaattggaggtgtctgaccaaaattttcaaaaataattttatgaaaaaccgagttaaataaataaaaaaaaaatagaaaatatcaaaatgttgctttctactttaaaaatacattttttctcacatactcgagtccgtgttcagggttcaatgtctggggctggggacgggttcgggatctaaatccatgtccagagtttgggtcaagtttctaggtccaacgttgtgttcggggttcgagtttagggtcgaggttagaatttggtccaggttcgcatctgcttttagggtccggggtttgaaatttagggtccgggtcttggtctaggttccaagttctgggtcctagtcggggtggtaactcgtgtttgagtctaggacctaaaaagtggtgccttttgaggctttgattgcacaacttgatagggtaaggttacattattcagtgattttttttgtctcatttatgtctggtcatcagggtcgactctgagtaataatgggcccaggacattttttttgtgtctattatatttaaagtggagtgtgagtattattggacctcttttaataaaattatacaaa

SEQ ID NO: 66823 - DNA, 989 bp, Cannabis sativa
  modified_base (31)..(33): a, c, t, g, unknown or other
ttttcggtactgtaaactatttaaaattttnnnaaaatttacagggatgatattgtaactataactaagttacaacgaatactactattaaaaaaattaaaaaaaaaatatttcgacatgtgatttcgaaagtgaaaattgactaagagattgtaatagaaagttgaaattagcattcctcaaataaatatatgtatttgtatatattaagttaggtgcactcactttctcgttattgaaaaagaaatttaggtatataaacacagataatagttcgtttattttttgtttaattacccgaagtttcgtctgtctattgtatgaattaataaaatacttatttctggttgttaatatctctggtttattaatgttattaagtttcccttttcatgtgcttgtttttttcttttgaaatatattaaattcagattattggtattttgattagtgcactggactggagggagccatacacccatactcagagatcttccatggagcaacaattgtccagcttaccagaagagttgtgggtagatattttgttgaggttgcttgttaagaattttgtgcgttgcaaatgtgaggacaaatcatggtgtaatctcattaacactcttactcgtaccaaacaattcaagtattatgttgatcatagaccatctttacatatagaaacagaatctaagaattcctttgtatcaatctgcaatcatgaagaagaaaatgatgacatggtgaacactattcctgttgaagatctgaatgtatggtttcccgaccgaccacatcaaacttcttttgtagcctctctttgtaatggcatcctttgcattggtttttttttccccaaactgatattctgttagggtggtgaatcatgaagatgggcaattgggatctgaaatacatacattaggggttgatggtgataatacttggaggaggattaatgtaaatgtctattagattacttaacaattagt

SEQ ID NO: 66824 - DNA, 7528 bp, Cannabis sativa
tgtgttttaaaaacttcaaaaattattttttgttctcatttctaaaaacaatttttttaaaacaaaaaacagaaaacaataccaaacatgctccaagcttctcttatttttagatatttttcctgttgccaacattttctttagactgatagttgagaacccaagcagaaatacaatagggaaaatgaagatttctattgctgacaaagtaatacaatacaagtagaaaggacagcccaggttcttccaatcagccaaaccattctcctaggctatatgatcctatgaattgtgtcaacccatgtaaacttatccattgataatcttactaaacactgttgcttatttgctttaaaacaagagcagttttgatatcactatacatcctaccattactatacttttattgtctataagtttgagtgtacattgaagtttgctagtgttatgaaaatgctacaggttgttacagggttgctaattgctgaagtaaatgttaacactatgtgcgaactgggttctggaggtgtatccttagtaagttttcatccttttgttcaaatatttgtgtgcaaatagaaaaaggttgctcaaataaatagagcaaatgttctctttttcataagcaagtatgtgagactaagatggaatgagaagtgtttattatttcacatgtctgttggatgggcttttacgctaagttgacgatatataggcgtagctaggaagtattggaattttataagattttaataattcaaagtaaaattataactagaatacaccttaaaatatgtttgtataaaatgggatggagtgttatcttatgagctcgtagagctgacagagtataaattaacaattggatatattaaaaaaaaaaagagagacaatgcaatgcaattgtagttttagtgtcaataatagctacttttgatttttcatcctatcaaattcttacttcatatgtggtttgtgtcaataattattactgacatagaggcgagaggagggtgcattcggcttctgaaaaatcgaaattagattttcatatattttagttagttacaatatttatttattattaaagggttcaggaatagaattgtcaattttgtttctattttgacatattatgaatacaggtatcgatggccatgagaactctggggaaagcaggagtacaagttgtttggtaaattgatttcgcaaaaactttttatacattttatagctggttattgaatcataagttttccctcaagtatgtctatatatatttaaataaaacaaaaccagaagagacctcattaaattctgctaattggttgagttatgttctgttattagtaggaacaataatagatgaataattagttgagttggataccaatgtaggagtttttgtataaaggaaaagacgatgatgataattcctctgtaacataacagatttttttaacagaaaacatcttgctaaaattttccctaaatcctaatattactaattgatagttactatgaagtaatttctttttatattacatcacatgtttgatggttatcctttttttattgttgcagttggtcgtacattttcatacactatgctctccttgttgcctatgtctcgcgttcttcaaatattttgacaaattatctccatattccacagtacatactatgatatctcttcctagttacccttcgaaaaagaaaaacaaaattttcctttgtagctttctgtgtaggttctttaatgtcaattcaagtgtattctgtgtgtgtcttaggtgttgatggcagcattatggttgcagatgggaaagtgcagccttgttttctttggtccttggaggcatatgctaccttggaaggttggttttgccttctttgaattattagtgtatatctatttatttttgttgaatgtgtgttctttgatttcttttcttatgctttgtatagcaaataatagttagtcttgttccatttaaaataataacaagacttttttctttccctttcaatcctgagtgttattactcatcttttgagaaaaaaatcttggtactgtttaacttgtttgtttggataaaattataaccaaattaaatagtagaattgtgagaattacttaatgagagattcatgttttttcagaaacaatttaagtatgtttaggatatttcaaaagtttaagcctgcttgaacaagcgaattacttgagcttcttaatcttttcttatgcatagaagttgttttattgccgggaagcaaggagacaacttttatagttgttaaagagtctcatattaataatgtgtagaaactaaaaatcatatataagatgcatggactactcctgtcattactaaatagttttgagatagaacccatcttaccatacactcactttattctactttcttcaccacacttccaaactcttaacaatcacttttagcaaattatgttgctatttgtttttctaaaaaaatattattacttagtttaagatataaaaatctctacacaaatagattaagatgtattggcttaagaggatatgtatattcttccttggtgaggccacacaagtatattgccaatatcattttgtgatttatacaaattgcatctaaattgtggttgtgaattgctggaattgactggttttgttttcaaatctagccagcgctttatcggtgccattaatggggttcttgtacttggaatcatggtttcatttggagctcttgtggtaattttctatcttcctgaacttacacaacaattgctatagtttcgtggtctctaaatattgtagagttagacggggatcctagtttgaaaaaaaataaataaatacaacaaattgaattatcttgttggattggagttctattatgtcattgtctgaattatctcatccagaccttttgaattatttcataattaaaataagttttgagtactacaaattgacattttctacatggtttgcttttatgattagcaagaattaattttctttcttaggcagttgcaagtggagatttacaatgggatgctcttctaaaagccaactttcaagcagttcctatgagtataccaataattgtgctttcctttgtatatcaggtaacaacactgaacttttagtcatttcatattaaggggtttgtaacatttctatttgttttctttttctttttccagaatgtagtgccagttctttgtacagatcttgaaggaaatctgtcaaaaataaggtgaaaaaatattatcattgcagagttggcttaatttattatatgatatgagttttaactttgacttgttagccaactattaggtggcctgtgtagtaatgaactaaaatataacttagaagatgataggattttaggtaccattcaacacaccacaagatcattgaatctttattcacaagtattatggcatgtcttacaccaaagaaaacggtggcgtttggttgggaggaatgaaaacacaggaatgagaatgagaataggaatgtgaataggaatggaatggaataaaatttaatatgtataaaaaattgataaaaatattattaaattttttctcataatgcatcagaatggtatttccttccatttcaaaatggaattgttattccaccaaaatggtggaaaggccattccattggaatgacattccaacattttaatatgcaaccaaacaaaagaatggaatggaaattgtttcctttcctttccattccatttcattacctccaaccaaacgccacaagttcttctctttatcctcccttctttaattagttttagtgcctatacacactcttcattactgcggttacactcttcgtatgggaacaattaacaagaaggaatctaaatgcttatcaggagaccagtaataacaatgaataataacatattgtcaataattttgttagggcccttgtgttgtcattgttaatatgactcccttgcaacacatattttgtatttgtatgtatctgtatataaaattcagagtagagatttaatggttttgtttgcactgtgaaacataacttcatgacagcctacatggtccatgtatctaccaaagaagttatgtccacatatttgactgtctttgtctttgtgttagtcatattggatagacacatgatcttggaaacttggcatattggtctgtggatacttgaactgaccgaaaatacattgctttcagtttgatattttcatttataggtcagttaagcacattacagtagctttattttactacttttaagtgactaattgaatttatggtctgtgtatgaactcattgttacaggactgcaattatcctaggcacaactatacctctaattctgtttcttgtgtggaatgctgttattcttggaaccataacaaatcttgaactaggtgctgataagatgatagatccattacaacaattgcaatcttccaatggagctgttggagtaagctctttagataattctcaaagtttatagacaatttatgttataagaatttgaagaaaccttgctgaagtgtttgttcttaattttttaacacgtcttacagcctattgttgaggcgttctctcttctcgctattgcaacatcttacattggattcgtgttggggctctccgattttctggctgactgtaagtgctaatatcaccctttgtatcatcctaacatcttatgtatgtgatcttcatgttctttgctcttttcatggattagttatgatgtaaatggtcaattaatgtgcatccatgaagggtagctcaaacagtagtgccacttctctggttgagtaaggaaatttcttttttaataaaataagaataaagaacaaatacagagtgaagtaccttacattgctcatgtcttgttgcaaattatttttgtattgtcagattaatttttatgtctattttggtgaacttcacacatttaaaatcatgttaatgtgacaaaaatggaataacaatttgtaggatattatgagttgtatctgtatagtcacttcattcactaacaatttgtctattgatgtcttaactcttgacattttttttgaacatccagtgctgaaacttccagctgatcgaggaagccccgtgccatatatcttgaccctgtttccacctctggcattatcattgctagatccagatatctttttcaaagcactagactttgctggaacctatggaggtatggtttttggtgtaacatatattttctttctttctttctcattttagtctctgttacttattattgcttgctaaagagtcattcttttttaaaattaaattttcttttagaatattcttagctgaaaaatttgtggcgctttgttttcgttagtcttggtgttgtttggagtagttccagcagcaatgtcctggtcagatagatactcatcttcatcaccatcatcaatgctcttacctcagctggttccaggaggaaaaataactctttcgatcatactcggaggtgcggggtatgtcattttttcagagctgcttgaaaaatttggacacccttgagtatcaagatttcaaacaattacaagtattaaagttgttatttatttaacaaattattcatttactatctcaccaaattgtagcacctcaaaatgtatgaataatgattgtgacatgcttaaattacacgttttcgatgtataaataatctcaaccatataattaaagtggtgattcccttactgacatagaaatttgttctatggtttcattgtattttgttctgtttattttgattttttggtggatggaagatttgtctaggtactttctatttagaatatgaaagatattgttgagaaattgttatgcaccagctcagacattagctattaagaatgggcctaacaaacattcagttagatttgttagaattggttgttattgattatttgtaaaagcttaactataagtataatgtactcttggctctcgatcataacacgagagtcccatttccaatacacaagttttcccaaattttcttagttgattcactctgttttctcacttggtattagattacggtcattcatggcgacttaaagctcattctcatcaactttcgctcctgctggtgtaaaacactattgtatagttttgaagtcttgtactttcctctattttcagccgccatcaaaacctgcttattgaactttaatctcagattgcagattttatgccagtacaactagtgtcattagggagaatgtactcccaaatttttttgccttttaagtaaatgacattgatccacttgacccaaagcaggtcatgcttcttcattataccccaaatatacttaccaatcaaagctttgttccaaattgttccctctcggaaactcaaccctccatatctttttcggagacacacttttttccaagaaaccacatgtatcgtgcttttgtcttctttgagaccctaaaggaaacctccatacaactttttaatttctttgattgtgctttgaggaagaataaatatattcatccaatagttgtgcaaccccagcaagacagaatgaatcaactgggctcttctagcaaacgagagatgtctcgtagcccaagtaagaagtctcattttaattttcttaattataggctcatagtcttccttcctccatttggttattctcaaaggaactcccaagtaattgagcgggaaagatccctctgcaaagcccaacacatccggaattccctattttagctcattaaaaactaccccaaagtagaccatagacttagagttattagctccaagaccagactttactaaatttaactagagctcttttgagatgtttaatagcttggaaagtataaggtcatctgcaaaatagaggctaaccaggttcaaattcttgcaaagtggatggtatttgaaagtgttctgagttgcttctaactttaatcttttggtgagataatccataatgataacaaaaattaagggggataggagatccccttgtctcagccctttcttttccttgaaggacctttgtaatctttcatttaaaacaacggaataggtagatccctccaggcaagccataacccatctcacaaatctagaaggaaaattcaatccaacaagaagctcttccataaatctccagtcaaccgtatcgtacgctttactgagatttactttaacaacagatctaggagaaacatttttcctcccataattcttaaccaaatcttggagaattaaaatgttgtaagcaatttctctctgtttaataaaggctccttgattaaggtctataagagagggaaattttttttccaatcttttacacataagcttagtgatgcatttataaatggttgtgcaacaggcaataggcctataatcaacaaccttactcgaaatctcagttttaggtactaaagtgattgttgtctcatta

SEQ ID NO: 66825 - DNA, 913 bp, Cannabis sativa
  modified_base (106)..(107): a, c, t, g, unknown or other
tgatgaaatttgtaacattgtatgtaatattggcaacgtgattcaaaaaatcgtttggtaaaaaaaagtagtaactttatgtgaaattgaaagtatttttgaaaanntaagcataatggaacaagaacctaaatgtagcgcaagaaaatactacttgaatatttttcatctattttcatctaatgctcaatcatgcattgtttttcccactactaatgccactcattttgaacttaaaccttcaatcattcaattgttgcattcattttatggtaaaaaaagaagatccttacatgcatgttaaagatttctttgatatttgctcaactttttattttcaaaatttttcagatgaatcggtcaaacttaggttgttttctttttctttaaaagataaagtcaaagcttggttaaacttacttctaacaggaaccataactacttaggatcaactttttaataaacttcttgccaaatttttttcaatgtccaaaactgataatttaagaagagaaatgtctgaattttatcaaaaagataatgaaaatttttatgaatattgaaaaagatttaaagatttattattaaaatattcccaccatggttttgaaaaatagagacttgtaaaatatgtttacgatggtttaaccccttcaaaccgacaaatgattcaatttatgcataccaatttttttttgaaattacaagggaaagaggcttgggaaggtcttgaagaataatttgttaactcatagcaatgaaattattcagagcctaggtctagagcaaataattcacctaaaagaggcgaaaaatatgaaataaaagaaaaaactaatttgagaacatcttttgaaaaattagcaagaaaattagaagccttaacaaaaagtcaaactatgaattctcatgt

SEQ ID NO: 66826 - DNA, 690 bp, Cannabis sativa
aatacaacatacatttaaactccataccattatcactttgtactaattttaaaattattttaaactgacattaatcatagcaaatgaacaaaatactttataaacttttatttttgaacgcaagaaattaacccatataactcttgaaaaataatctaccaatctaataaaataatgtgatccacacgaagaatgtatcttatttggtccccataaatcacaatgaataagttcaaaatcctactagctttagtaccactcataggaatactatcatgttttatgttttgcctggacaaacatcacatgctttagtaaatatcttgccagaagtattggaagaaatatcaggaactaacttgatgaattaatctgacggataccccatacgacgatgccacaactcaaaattaaaaatatctggaactgttaccacacacattgtaggaattcgtcaaaaataatagagtccatccttaggtcaccagctccaatcatactcctccataggtctcgtacaacacataaagaatcagtgaattgaaaagacatttggagtcatcaattaactgtcatatcgagattaggaatgtaaatgaggcgggctagtcccgacccgataccgtcccgccctaccccattaatattttgacttgtcctgccttgactcattaaccttcatgaaccagg

SEQ ID NO: 66827 - DNA, 623 bp, Cannabis sativa
gggagaaatcctcttcccagaatttacatcttgggtagctcgattttgcaaccgtaaaccaatcagaaaagtcttggcgaatctcactctgcctgataatcagttcctatgactcctccggagagaaaattctttccacatactgttccattggatgatggcactgttccattgactcttcaagttcctcaacttctggttcttgaatccccaatacatcatccatagatcgagtcttgatgactctatccgaggatgagggaccagctttcttgcccttcgatttcccttttccagccattttcgctctttttgccatagctccggtgaaccaccgaaagagagagaagacaggaaaagttattggaatattgtattcccgaggtaacaaccagctatacaatcaataccgttaggcatgattgggagaatattcttgtgtggtaaaggtgatttgtaatacgtgtaacgctgggattgtatctttgttttttccctgtattcctctggttctataaatgaaaagtttgcaatcagtctcgatttgagctgatcaattaattctgcatttatcttaaatttaacttggtatcagagccgcccttgcctacgcaatgtcgatt

SEQ ID NO: 66828 - DNA, 790 bp, Cannabis sativa
taagctgtgcaatcccacaccgcctagggaaggtcaagtgggatgattctgagactatacaggtgtgagactacacagttaaaaatgacttaaatagattaattggttcaacatatatcaacaaggtgcatcttgtttttcagtagtctatcttgaaagaactccacgattgagtgtgcttgacctggggaatttcaggatgagtgacctcctgagaagtttttccaggaagtgtgcgagtgaggaaaaagcatgctggaaacacttgtgttggtttttagggccggtcgtcatttctcaagctctcatcttcaaggctcaacactatggtatttctagcctttttcagaatctcatccttcttggatttctccaatgttactgacattttatcttctcctttcaatgcttcatccaatcctatgtttccaagatgagctttcatattttccttccatagaaagaagtcattattcccactgaacttttctatatccatttttgcagtggacatattttcttgatcttcgtaagtctgattcttgattttcttgaagttttagttcataccaagattcaaataccttctcttttatttactttggtttaatgtaaatgtcaccaaactaaaactatgaaacataagccataagctctgataccataacattaccctttaataaataataatacaagtagtcggtttcacattcttcttataaaaaaaggaactctcaagttcaaatcatccctcctaaatataagaaaaaaaataatacaattttatgtt

SEQ ID NO: 66829 - DNA, 952 bp, Cannabis sativa
  modified_base (146)..(155): a, c, t, g, unknown or other
tatctggattaacgtttaggacataggtaatcacatacgggcttatgccggtcatgtccccttggcaccacgcgaaaacatctgtggccgccctcaatgcttcaataattttgtctctctcctccggctctaggctttttcctagnnnnnnnnnnttggtagggtcgaggtcgcacacttgtacttcttcggcgtcctccataggatctatgattttttcggatcccaaacggggatccaacacatcctcttctgccactcctggctcgatacccttacggaccatagcaccggcaaatgcgctaccacattatagcactgcttggcttctccatggttgccccttacagttcctactctggcctcttgagtggggaattttaggctcaagtgcaggatggatgtgattgcgccaaaatcaaccaaggccggtcggccaacgattgtattgtatgctgttgggcagtaaccaccacaaaggtgcagtacttaaaagtactctgaggggtatctgggcacagggtgactggtagtctcacttttcccattgggataagtgtggtccattgaatcctgtgaattgggagtcgatgggcgacaaatccctttctgtgaggcctatggctgtgaaggcttctttgaacaataaattcacggaactcccatatcgaccaatattcttgccacaattttattggcaatgggagtctctatgaccagggtgtcatgatgagggaagcgcaccagtttggcatcttcttccgtaaaagtaatgggttgatccatgagtcggggcctttatgctggaagctgggtgacttccaacagttcatcatgcttcatggccccagcatagcgctttaattcttctctggtggttcccgcaatatggggcccaccagagatcatggctactctcccattagtgctgggtgggagcccggggacctat

SEQ ID NO: 66830 - DNA, 1791 bp, Cannabis sativa
aataaacagcaagcttacttgaataaaaaaaggcaaaattactaaaatcatgcttaaaattaatcataccaaaatataggggttcatagccattcaagcctcaagaagcttagctcatgttcaaaccagtaattaaaatccaaaataaaatctgttcatccatggctgctacttattctttgcaaattaataaactccaagtatataaagaacagaagaaaatagaagaagaagaagaagaagaagaagagaaattcaaactaatgaagcttgtgtcctcctccttctttctcagttgacttcctcttttaaacacttaattttcattacttttctttctgtaattaattttcctcccaaaatggcagctgagttcatggtgtgatgatggtggttgtacttattttcttagttgttaggtcattagggtacaatccaataccctaaaatagatgcccatttccttcttttcttggccccctagccttggtctcctattctcacgtcagccagcttgcctaaatttaagtgactgccaccttttctctgatttaactaaagaaaactctattgcactttgtccacatcactgcccaaaatgctaaatttgttgcaacaattactttagcaattcatcgcagtttcagcttccatgcccaatttgacctcacatcattccttttctaatggcactttgactcttctttcttaacaccaaacaatcaataattaattaaataaatgcagctaaaaaataataatttcataaaactcaaaaactagcatactaaatagaaaatgaagacaaaaactaatcaaaattaataaacaacacactttcattactcttttcatgataaatcaagtttaaagctaattgttgacctcagaaattggccatccgacatcagggtcgtattaaattgatgattgccatgtgttacacaattagaactcaaaattaaattaacataaggattttatagaggttcggcccccttaagtagcgggtaatgacctactctccttttggttgtattaataccgacagatatttactattcacatcactataggtgggatctgatatagctctctttagggttacagagtatgaattagtaggtagataactaatgagagagagatagggccttggaggcgtgtgagagagaggaagagagaaagccctttgggcgtgtagaagagaaagagaagaggattagggtttcagacttagagctatatgtcttagatgagacttaggattttagggtttagttaaggctctttttataagagagcttaaacactaattagatatttacatatcaaattaataaatacaaatgatcaaattaccccttaaaagtagatatttttgtagtatcttagtgggttgtcaaggcccaacttgcagcttggcttgctactcacggatgaaggctatgcatcaatttctttcaagggaaaagttggttggccatgctcctgccaagatttggcaggtcatgttcctgctaggatttggcacgtcaagttcctgccaggatctggcaggtcaagttcctgccagctttggcaagaggaggccagcctttggaggtggaggtgaacctttagagattgaggccagcctttggagatggaagctagcctttgcacaccttttccttgtagagtttaggtttccataaggggtgttcactaagtatccgatccaatccatccgcacgatccaatccaatccaatcccgtaaaatgcggatatccgcacttgtgcgaattgga

SEQ ID NO: 66831 - DNA, 3261 bp, Cannabis sativa
tcaacaattaaacaacacaactgaatacaagggcaaagccaaagttgttgtaggtaatggtgattctatccctattttacatgttggttctaacagtatacccacccatattcctaccaagtctttaatgctaaaagacattctccatgttcctagcataaccaaaaatttactaagcatatctcaatttactcatgataataatgttgtgcttgaatttgacgacttgtgttgccttattaaggacaagacaacgaagcaagcacttctaaggggttccctcaataatggcctatacactctcacagtccctcccaaaccagatcgagttactgctgctgcaacacagttttcatctttcaattccacatgtaaagtgtcagctttcaattgtaatacctcaagcaatcctgttagaaataaaagcaactttacttctgtttggcattgtcgtcttggacaccctgccacttctgttatgtccaaagtgttgaatattgttagtcctcaaatgaaatgtaaagattttgctttctgtgatgcctgccaaataggcaaaatgcatcaattcaatttcaaatctaccataaataaaactgctgctccttttgaaattgtgcatactgatgtttggggtccctcattctatgcttcaagggatggatacaaatattacctaagctgtgttgatgactttactaggtttgtttggatctatcccatgcaatccaaatccgaagtaactactctgtttacacactttcaaaatctggttgagagacgatttgataccaagataaagagtgttcaaactgatcttggaaaagaatatttacctctttaccaacactttagaaatcttggtatttcccttaggcaatcctgtgctcacacacaccaacaacaagggcgtgtcgaaagaaaacatcgccatgttgtcgacatgggcttgactctccttgcccaagctcaaatgcccctaagtttttggtgggaagcgtatgctactgctgcatatcttattaatcgtcttcccaccccaatcttgcacagcatttccccttatgagaaactttttcatcacaaaccagattataaccttcttaaggttttcggatgttcatgttttccccttcttactccttataataatcacaaggttgcttttcgttccagcaaatgtttgtttcttgggtacaataacacttaaaaaggatatagatgccttcacccgagtgggagagtttatgttgcacgaagtgtcaacttcaatgaatctgaatttccttacaacaaactcttcaccacatcaactccaccctcacctcactcaccaatcatttatcctcataatgtacccctgccaccaactcacattgatcgtatgcatcccacccaaaccagtaccaacactggttctgcaactttgcatgaatccactgcctcggccaatacttctcattcccctcccacaaacacttcccctcacaacagtcctgctacccaatcgagttcttctcaccattccagtattggtactgctcctctatattctcttccccaagaaccaacatcttcattacaatctctctcacctccccataatgttccaaccataaatactcactccatggtcactcggtctaaggccggtatattcaaacccaagtcctatctcactcacatccaaaatcctttagaaccaacaaatgtaaaacaggcgcttgctgatagaaaatggaaccaagccatgaatcaagaatttcatgctctcaaaaagaaaaagacatggatcttggttccccctactcctgatatgaagattattactaacaaatggctttttagaatcaaatataatgcagatgggtcggttaacaagtttaaagctcgtctagttgctcgtggatttcaacaaacagctggtcttgattttcttgagactttcagccccgtaataaagccatgcaccatcagaattatcttctctcttgctgctacttatgggtgggacattcaacaagtaaatgtgaacaatgctttcctcaatggagacttaaaagaagaagtgttcatgcaacaacctcaaggattcatagatccagactttccacagcatgtttgcaagctcaacaaagctatctatggcttaaaacaggccccccgtgcctggtttgacacgctcaaatccactcttgttcagtggggattcaccaactctaccgctgacacgagcctcttcttctctagaaaacacaacaagttacttctcatacttgtttatgtggatgatatcctcataactggtgaatgttcagaccaaatcagcagcattatcactaaacttcacaacaaatttgccctgaaaatactcggttcagtacactattttttgggatttgaagttcttcgtgacaccaaagccattcatttgactcaaacaaagtacattcatgatctcttagctaaaacaaatatgttagatgccaaatctcaatccactcccatgtgtgcctctgccaaaataacacaaaattctggcacacccttggctgatccaaagcagtatcgcagtgtcattggggctcttcagtacttaatcatgacccgaccggacatcgtctttgctgttaataagctaagccaatacttacaagctcctactactgatcattggggtgcttgtaagagaattcttcgatatttggctggtacgtccactgttggtctaactttcactgcatcagctactttggatctgcagggatacaccgatgccgactgggctggatgtagtgatgatcgaaaatccacctcgggctattgtatgttcctgggaaataacctcatcagttggtgctctaagaaacaaagtgtggttgctcggtctagcacggagtccgagtatcgtgctcttgctttggctacatccgagttgatttggcttcaatcgattcttactgaactgtccataactctgtcctccattcctatattatggtgtgacaacttgggggcaggatctttggcttcaaatccggtttatcacgctcgaacaaaacatatagaaatcgatgtccattttgttcgaaacagagtcctagaaaacaaaatggaggttcgatatgttgactccacatatcagactgctgatattctaacaaaaccgctgccaagctctcaattcatgtatctccgagacaagttaacactcaagtcaaatgagtgtaacttgaggggggatgttagagatactttaga

SEQ ID NO: 66832 - DNA, 1950 bp, Cannabis sativa
  modified_base (738)..(738): a, c, t, g, unknown or other
ttgttttattttgtttactagttatgtgaaaaaaaatatatatagattttttcataaaaactaaataacttaattttaaaaaataaccaatgcaaaataatcgatctaatctgcacttttatagattgaattggattgaattggattgaatttgagctattatacaaattgaattagatccaaaatatgaaatttgcacagagcggatcaaatacactatgagcaaaatagtgcgaattggattggatgaacactcctaagcccacacatatttatagatatggatagaagggacgtttagaatgaagtgttcaaaataatttgatatagagtaatatatagtcatattttcgttaattaaattaaactgtttaattgagtacaaaaatcttatatattattttaaaaaattataatagaaaatatctttttattatatatgtttaattttaattatacataaaaataaaataattatttattaaaacaatatatttattaattaataactattaaattttacatttctttacttctttatattttattattatgttatttatttttgttcactatattttatatataatgcatatatatattattaataataacataaaaataactaaattaaaagtaaaaaattaatctcacaaattaaatatatatcatatataattttttataataaatcaaaatattaataatatttaaatttatttattaattcaaaatttntattcaaattaatataataaaagggaatatccaatcccactattttttaaaatatcaacattacttctttcaagagtagttatattactaaaaacaaagtaatattttatattacaattcccttattagtactaacatattccaaacagcccgtaggggtacttgaaagattttttttatgccaaaaacttactttcaatatcactagtgtaaaaaggatggaatttaaataggagtgatgagaggaacttctttattatccactattcataaatatataagtattaaaataatgcatttttctttcttctatgcagatataaatttacataaaatgcagtcgatgtttcacatgcaacatagacacacaaaaacaaatatgcatgcaaatctaagtattattctacaaggaagaaagtttaataaaaacaaataaaactcgaatgaaatgtaattccggttatataatttatgaagcaaccatattttaataaatagaaaatgataaagagaaagtgcaaatcagtctccaactccacctacagcaaagaaaaataagttataaggtaatttcaatcaatatttcctttttgacaaaagaaagttgaacaaaagaatggctctaacctcataaataaccactgctacggttttatatgtacatccgatcaattgaagaccataaacttctgaaatgggatggaactgatataactgtacaaacataagtacaagcccaccaggcccaactgcaaaaactagaaaatttaaacctcactgcaacatagattatgcaatatactctcatcacaagcacatttatataattattatatatatttgttgctactaattacagttgaataccgtttcttttattttgatggtaatattaccaattttttgttacggttgtacttaatacaaacttacattggaggagaaaaaagcgtgttagaagttacaattttttttttaaaaaaaaaaaaataactacataaaaaatatttgagaataatactaaatctcaatcaatagttgcatttaaataactcaaaaaaaaaaaaaatctaaaaattttcatatttatttactactttaaagcttttttttccttcaatatttttacaaattaaaacataaatatctttttttttttcaatactatgtagaaagtactacaaagacataaattattttttaaaaaaaaat

SEQ ID NO: 66833 - DNA, 785 bp, Cannabis sativa
tccctcagtaatctcagctctcttaacgactaagagattgttagcccttttttgaaggacatccctttctttgtgatgacgccttctaagcagacactatgcgaactcgagttgctttaaaagttcctggctaggagccttgggctttagagggaatttgaagtttaggggaggaaccctaggaagagtggtggcaagtggttggccagactactgccaaggggtaggatgtctgcccttggtagaaatgatggccactaattgttcttgttattaggttgttggtgttgttattattattgatggtgtctttattaaggttgttgctattggacttgttgctgctactattgtgggttgattgattgtcattgttgttttggttggacttgcggctattgttgttgtagctgtgttggtggctgttgttgtttttgttagatgtgatctgttgttgtggttggatttttagttattgttgttgctgttgtgggatttgatgtgattgttgtttttgctgttgttggtgttggtttggtgggctgggtactggtaaagtagtatattcccaaagatcaccactcccccaaagaaattcatatttaggatgttagattatagtcttataatcaaacatacatgttagtaaatctagatcattataaatatttttaacaggtagctgggaagattctgcactatacatcacctctcatcacttgtaagtctatttgcattttaaaatatttaatgcgagacaaaagatcttctttgcccatatacat

SEQ ID NO: 66834 - DNA, 757 bp, Cannabis sativa
agagagagagagagagataaaagtataaataagggtcttgaaacataaataaacaaataaaagtgttattgaaacttgaccaagtcatttttgataataagacaaaaaaacaagtcattttagataatttctctttattaattccattattaaattgcacacttagtatttacagaattatatttactaaagttaattacagtacccattgatataatcaatatcagtgactaaccctccttatactggtccataattagagtttgtcaaattaccattttacccttctaattgcctctttatcttttagtataattattttgccagtgaaagtataatttagatccatttgatctaaattcacaacttttcagttccagaattaaaatataaagaaaatcaatattcaatccgtttaaaagtcaggattccatattggaatttaagtttccagccatccacattattagatttccaaaacagaagttgtaagaattatttctctaaaaaactttaacgagtgaatcaaagaaactaataacataaacatgagctcatgatttctcaagatttaagtcaatctagtaattgattgtctttatgatatgaattaggtctttataataaatgactagtttgataaagacaacttaattacatatcggtcctatcatatataatctttattatagacaatacctctactgagatgtccatctacatcagcgatccgaatcaagattgcttatatcaagta

SEQ ID NO: 66835 - DNA, 1439 bp, Cannabis sativa
  modified_base (207)..(213): a, c, t, g, unknown or other
tttagtaggacgaagattcactcccaaatatttgagagggaaagagcctttttccataacgtgctatgttatttgtcgccatttactaagcaattaattcaagtagtgcatcctatttatttattacaaatcacacacatatacatatatggaacaccttttaatgggtattactcgttgatgattactaaataaatttaactatannnnnnnattttaaaaatattaaattattaagttttgatccatgaataataaaagagaaattttcatatatatgcttagttcagctacttaattaaaaaaatatcaaaaatatctctttttacactatattaaaaatatatttagttacaaaatatttaagttaaactcactatttttttttatcttttcttttgccgaaaaactttttttcttaatttttttcttaatttttttctagcggatagaacaattccgcccatataatgtaaaaatgagagattaaactaattagataaaaaaattaagcttaaaaactaaaatttacccattcagaaataatactcattaagagtccggcctatataatgtaaaaatgagagattaaactagttagatagaaaaattaaggttaaaaactaaaatttatctattcagaagtaatactcattaaaaatacattcatatatatactaacaaaaaatgtagtactattataaacatcaatcgacgtagaaaatttgaagccatctaaaaattttagattctttctcaattaataataatggtaatatggtatagttggcgaaatacgtgtaccatttcattcctctccaagcatatgtatacatattatatattcctttttttcttaggtttgttcatactttttatggtttgttcgcttagctaagctgaagagtatctttagattctcacacactacagtagatatagattacattatatatataaacgtacagtgtcaactagtgatgcttttttcccttatatatacgtacgtgcccaagaacccatttcataattattctcaacatatacctctcccacatatttggagagaaaaaaaaatactagagaatatatatattatcatcatgtggaacaaaatatgcaaaggcatagggatcaaatccaataaatgttcttcccaaaacaaaaaccaaactgcaagcgagtactactcatcatcatcatctagaatatgtgaggcttgtgttgaagaaagccaaatagtgtgcaaatgcaaccaccaaaatgaaaatgaaattcatcatcatcatcatcatcatgataataatgataatggtactattaacaacggcagtcatcaccatgccaacagctcttttgctcatgccgtcatcaacatgactggaatgctcatcggtgaacttctacctcctgtcttaatttatcttaatatatatata

SEQ ID NO: 66836 - DNA, 1055 bp, Cannabis sativa
taatctttgtgcataattagtttgataaataaatatcaaatcgtagtttcacatgcttataatatatatatattttttttaaataaacttaaaattattgttaacatatttttttaaatttattttcacattattttatattaattttaatacttatttttataatttttttctaataaagttttattttttttgtttatatttatttttataaaaatatgaattgcaagaaaaatattaaaaaaactaatataattaaaaatagatattttatgtgaaataaaatttattaaattgagatgcatttatttataagtatttggggtctacttttatttgaatttaagtcttctttgttaagtcatcaatgacattatattttattttattattaatgatgttatgataggttgtatggatcaacaaattgtcaaaaatggtggaaatattaattgaaataatggtaaggattgatataatagtgtcaacaccctatgtaatagaacattgctatttccatgtattttagtttaaaatacaatagatgtgggattggatatcaaatttgttggttgaataataatagtaactatgtttattgttataattattgagaaaattaataattaaaatttgagatgaaaaaaagaggataaggtcaatggcaagtaaaatgcaatgggtcaataagtcaatttttgtaattgaagaaaaataaaaacaagaaaacccaaaatcacttgaattaaaataataataaaagaaagggttaggaaattctactaaagattctagtgagtatggtgcaaggttctcaaaaaaaagctaataagaaaagaataagaatcaatagtattcaaccctcaaaaaaaaaaaaaaaaatagtattgcaagtaaaaaataaagggaaaaagaaaaaagaatataaagcattcacacttaagaagtttcacagaactaatgtaactttattctacttttcaatgactaaatacaaagaaaaaatgcatatgaactcacatactatttatctaatgcaaaaaaaaaaaaaaaaa

SEQ ID NO: 66837 - DNA, 547 bp, Cannabis sativa
ccatttacttgcatttctcttttaaaattgtagatccaacaaggcttatcatattcaaatgcaagatcatttataaagtctcgatctctacatagtgatgcgtgagaacatcaatagtgatatgaagagctaacttgcactattacagatggatgtggttatagaatgatcgatcaacaacatttaaagtttgaatattttagaaattagtcggacaaattagaatccatattttagtccaaaagaaggtcatatttttgctaagatatattgatatattttttctctttcaagtttcatatgttaccatttattatttttgttacattttatcaaattttaatataattctttacttatatgttgttttatttttttttatttcttttttaaagatcatagttaataaaaatatattaatgtactatgtagttagatcaatatatagagaatggtgaagattaatatacatatcatttttttttactttagtgaggacatcacatttggtaccaaaagaaaaagagaagaagaagcaacttattta

SEQ ID NO: 66838 - DNA, 735 bp, Cannabis sativa
caaccaaacgccaccttagttttattatcggttaagttaaaggttcgaaaaagataatcgtttctcttgtagctaatctttttaattcgctttatgatacctttcaaattgaagttaaagtctgaattacattactagttctactgagtgtgaaaacttagagaactactcgagattaaccaaagcgatactaatataactaacattttattatagatactaaatttttgtaaaatcataatatttttttttttgtttatgtagcaacaaaattattgggttatttattaaaaaaatgtgatatttttgaacaattattaaaatatgtgtatttttaatttttgcttttgttttaaggttttaggccattgcctagtctatcttagtaaagactccaccctatttagtatgaaggaaagatggatggatagagtgaataatatatgtattattattatttaagatcacttctttatttgatttgacttttgtaataagagctttataattaaattttatttgatttgatattcataagagctttatagtcattcaaaattgtatataataaaattaaatagtttataatattaaaaataaaatttaaattttttattacacaagtaactattttttaatgtgtaataagtaattatttgaactaaatttttagcatttaaattattttaattttttgaaaattcgtaaattatcttaaataaaatacataatata

SEQ ID NO: 66839 - DNA, 740 bp, Cannabis sativa
ttacaaatataatataatattctcctataaattaatgagctacgttcttgccaatcacatacataattagcctaaaccagtttctctacaaaccaaattaacacttgttcattatggctgcaaatccaataacagttttcttccttcttctaatcactcaaatattattattctccatctcaactgctcaacaaaataataccaccaaaatgattagtcttatctcttcaatctctacttcaaccaaaaactcatattggctatcaaattctggccagtttggatttggtttctacaaacaaggcaatggtttttctattggaatctggtttgacaacataaaggagaagatagttgtatggacatggaaccgggatcaacaacagccactcccacagagcacaacacttgttttgaatgatttcgccaactatgtttcccctgatcagcctgctgcctcagcttcaatgctcgattcgggtaactttgtcctttacaactgagactctaagatcatatggcagagttttgagaatccaacagatacccttttgtcagggcagattttggagacagggaaagagcttgtctcagctgtctccgagtcaaatcactcctccggaagatttcaacttatcatgcagactgatggtaatttggtccagtacccgagaatgagcaatgtagaagcctaccatgcttactgggactcaaaaactaatgggaaaggatcacaaaat

SEQ ID NO: 66840 - DNA, 620 bp, Cannabis sativa
gagaaaatagacttgaaatttatataatcgtgaacttcgcacctttttacttgcttttgtgaacactcgcgagtattaagatgaacatcttgaatactcgcatgcatatttccttaggaactctggaggtttggtcattccaacccataatttagaacttaggtttttctttatactttctgtgtatttttgcgtgggaatactagttaagtctttcaaatggtgggtgtgtcgccgtattccaatgctcatgcgtgcggtcgcgtgtcccttgaggtactgcgatacacccagccatttgcgacatatgccagcgttcccttttcccatacaaccgtatatttcaactagtaggttttttcgaaatagtgaggagtttccgctagcccaatggttatgcgaagaaggcatgccccttgagatataggagatcccttagttgtttcttgagatataccgctagttggatatgcgtgatatgttcgtaggttgtgattggttagatttctcgaaacggtgggtgtttcccggtaaatccagggtcatgctcgaaaacgcatgccccttgggtcactgggtaactcccagccattttttgagatattcttctagtcgcacac

SEQ ID NO: 66841 - DNA, 1041 bp, Cannabis sativa
agagggagcaccatctcttaaaattgcagaaacagtctcatgatcaaaaaggtaattcaacttgtggatatcccatccaccatctgtagaaaacaactccgtaacaaatttgtggtccctagcaggagaaccattgggcttaaggaagaaattcttcatgtgagggatccaaggttcctcccaaattagtgtattcctcccatccgccaccaatttgcaagcacctttttttttaagatggacttggttttaacaatgttttttcaaaaccaagagttagagtcttaataaccacagttaaagaactcttttcctttgagatatttcgcttcaagcaccctacaacatagaaattgactaccattaaggatgtttcacccctacttagccaagaaggcatggttcatttctctagattttttgaaatccaaacccccaaggaattttagaaggcaaattttatcccacgcttttgctacagtgtctcactgtatatagtgtgccattatagattattgtactttttattataatattaatattatctgactttatatataagggtatataaggggtgtgatgtaaaacttcatcttactttgagagacaaattacattttactgtagtaagtattgcttttacttttttttttgaaagaactaaagggagttcattgcaaagaaaagttgggaatcacaataggggatccctccctaaaaatgtagccattacactgactaatctgactattccgtctagcccattttgctaaatcatcacaagcaacattgtctctacgagaaataaaaaagaaattacaatcatcaaacaacttaaaaagattcagtacctccgaagccagaggtttcaactgccaactaggggggcatcttcgtttcttcaaagcatcaattaaaacttttgcatccgaagcagcagcataattcttaaatcctctctgaaccgcaagctgcatcgcccattggattgctaacaactcaacctcagccgcggaggaggccgccacctgctttgcaaac

SEQ ID NO: 66842 - DNA, 580 bp, Cannabis sativa
ctctcatgagagtaacacaaacattcgattttttctaagaaaatgatgaaatgtcaagggtaccaaaatctatggatacctcgaatgatagaaatatacgagaaggtgcgaccgagagagaatttagtcgtgtgctactatgtatctcttagtatggaacataaaaggacatagagaaaaatgagcatcaatcgaaacgtatatcgattatacgtgatgatgacctgttgtttctcccccacttccaagtgaaagttgcactttcactacaaattatccaaggacccaatatacacaatgactcgtatgaacccgcaaattcatgtgttgccaatatatgaatggcctcttacgatctaggtagtcgtgtccattaaagactttaataaaaatggtcaaaattgttctctaatttatttataaaacgttttcatttcaattaaatataattaattattctaccgtacctgtcagatagattatgtaattaaatgatcacttgctttctatataaaggagtgatctgagatgaataagactaatcacaaactctctttgaaagtggactaagtagaccgag

SEQ ID NO: 66843 - DNA, 708 bp, Cannabis sativa
aacccagatgttatatttcaaactgaaatagtatcagaccatatgtaatttcaattttatattcccttgaatggagtcctttctggtgtatagaaactagttcatgaagtaagaaaagaacataccacttgttgttaccttttctctactttgacccagattcttgaaggtgtaaagtatgccaaatctgttcagccttttgtggataaaaaattgttcaacaaatatgttgtagttatgataaaatgtatgccttttttttttaaccttttgttttgtaaaactgtttttttcttcatcttagccaaaatggttactgaaacatattctggcttgttcctgtgattgttaagaaaggtataattgtaatgtttgatcaatacaaaacgtttacatggagagcaatagcaacatgagtctatctggttctatcagtttattgtaatcctttttgactctaatacatcttcattggaaaaaatacatattaaatattattctattgaagatgttcgtatatacactattattgaagtttcattttataaacataagctaaaaaaaaaagtatatacaccacatttatagcattctatatgctatctctttgaagatatgataactctttttatgacagtacaaactcatctttttgaagatatgacgactctttccatgttcagataatatttataggtttattaattt

SEQ ID NO: 66844 - DNA, 738 bp, Cannabis sativa
tgttggatgtattggatttttggacacccatccaatatctgatccgatccaattggatattcaaaaataacatctaatccgattcgatgacaattggatatctgatgtttggcgatcgattatcattggattggatgatttatatgttttttatttaagtttaattaaatgaccccaaaagcaattataaataaaaaataaaatggtagccacgttagatattgaaacattctcacttagtaaaaaaacgttaataatattttaaaaggaaaatatttagatgttgaccttattttaaagtttaaatataaaattaggtgctacatgtataaaatcctttattttaacgcttttcattttttttagtacgtattttctttagtgtatgtgatttttttttcatgcataaatattctttttatatatttgtctgaaaaagagaaaaaaaaaataagaaaaatattttattttcatcatgcaatactcatgatactaatttcattcatactattataaaatgaaataatttttgttcttatatatacttttttttctataataatttattgaaacaggacatggacgtaatgtggctcagaaacccatttgaaagactaagcaaaaacgaaacagaagatttacaaataagcacagacatattttttggagatccatggaacaagaaacatttaataaacacaggattctactacataagatcaaacaacaaaaccatag

SEQ ID NO: 66845 - DNA, 820 bp, Cannabis sativa
actaaggaaggctcatttctctgttagcaaaagtatgctaaaaatttgctgcaaagatttgaaatgcttgagtgcaagtccatctcaacacctatggaagctaatgctaagctgctcatgctgaaagtaattcgcaagatggagcaatgtatcgacaactggtgggaagtctaatcctctttacattgactcgacctgacatttcttttatagttggagtagtaagttgatatatgcagcaattaatgaagccacatttagaattagtactacgaatactgaagtatgtaaaagataccattaactatggtctcttctataagaaaggtgataaggttaagatcgttagctactgcgatgctgattatgtcagagatcatgatacacgacgattaactactgggtaaacttggatttggagtagtgtcgtagtatagcgaaaggcaaccaacaatatctttgtcaaccacagaagcagagtatagagcagcagcaatgacgactcaagaaagtgcgaggttgatgcaactaatgaaggatttactccaatccacagattttgtagtgccactttattgtgataatcagactactatccctctagtagagaaaccagtgttttatgcttaaacaaagaatgtggaggtgaaaaactggtactgaaacagttttatacatattaagggttttctctctctctttgctccttgcaacactctgagttggtgccatggtgaaaacaaggtccaagaatgtggggaaatcgcaaatatcgaacaggaagaataagaagaaaggtccgaattcgactgctgatgta

SEQ ID NO: 66846 - DNA, 9446 bp, Cannabis sativa
  modified_base (9386)..(9399): a, c, t, g, unknown or other
tgggtttcttcggcagacaagattgtggagagggagacagagttgcttgacccagaaattgcttctgggaatgctgctaattccaatgcggttaaccaaatgattgaactccttcgtgttggagctgattgtgtggagagtaatccacaagaacggattgatatgaaagaagccattagaaggatagaagaagtgcaagtttgatcttcaatgattttcgattggagatgtatagttcatttctgtgggttgggattttgtgcacctttcttcaaaattgtaaagtttggatttttattctcttttcgaaattaattttacactagagaattaaaccgcgcatcgcgcggactttgtaaattagtttgtaaatattgctaaagttttataattttttttttttgagataatcataatattattcgtatataatcaaccaagtttaaatatataaattagaattcattaattaaaatcatactaatttttttcaataaataattattaattaagtaaaaacatttgtactcattaaaaataattattatttgcataactttaaaaaatttctaaattataaacttgatacaaagtaggattgaatatttgtgtgaattagattagctgctacacaccatttttcaaggatcgacattcacccttgtggatcacaaatcaggttcgatttttcgatattcccgtaactcgctactctaacacaaaaaataactcaaatttctttctctccctcccttgactcaaatttcgatattcctgtctgtgaaacaacaacattagcttcgtccaccatcgcagccagaaccaagtggagcaagctagggtgcttcccttttccatctggttcgtaattcttttattattattattattattatgcattttgaattaatttggaaatgagatcttgtatatgtaaagtcaaaattggggtgaatttttaatacaagctaaaatcacatgtttaattaatgttttttttttttttttttgacaaatttaaacaagagtaatgtgtttacattcatgaaattacgcattcaataagcttagttgcaaaatgtttgaatatttaggtaagtatattgtatgttatcaatgatgactcaaatgtatttctttgaatcaattgttgaatatacttcacatttgtacacactgaaaaaatatattccaaacttagttatcttttgtcggaatgtaataattagaatattagaagcaattattgtttaattaggaaaaacttacattgatgatgagcttaattataagctaataattattaaagtaattatatttattatatattttgacatttcttcttaacaaaaaaagttattggataattccacccctaaaagggaactactaatgtactcccaaactgttttagcatttaaaaaaaaaaattaatctaatttttttataatcgtttacgttgtaattatttaagacattctacaaaattttgagagattaaaaaaaattcaacacgccgaatataaggttcaaacaatctgttgcatgcaagactcttttattttacacgcgtgtaaaataaactatttgaactctattttcgacgtattaaatttttctgaatttcttaaaattttataagattttctaaataattacaacgtaggcaaccattcaaaaaattagactaaaacactctatcaaatatatattgtcgtgcccgttagggttgaagggagtaaagtacttaaagattgtttaaattaaagggcgtttggtacgagaagtttaaaaaagagaaaattatactatatacctcttttaaattgatctttttaattcttacctcctctttcaaaatctattaattttgcctcttttttttaatcattctaccaattttactcctataacttcatgatagtctccaatcttctctaattaaaattttatcctaattaacttttctatacagacctacacatccacctccaaagaacacaaatctattatatttaaaattatgtcttagttatgtgagagtgtgagaataatttggttataatacttataaaaaaatgtatatttaaattaaattttatttgaagataaatttggttaatgtataaaaaaaaaaaaaaaggtattcttcaacttctccctttaaaaaaaggaatttttacaaaaatattaaattttgagtaattttactgtcacacgaatttttttacaaaaatactatttttaataaaacaaccgtaaaacaacaaaacaaaacaattaaaaaacaacgtccgtagaataatagtgaaaactcaacacagtttacagtataaaacttacacagtatttttgaaaaaaaattccgctcatagtaaaagagtaaaaaaattagaaatttcagtatgtacgtaaaaatccctttaaaaaatttgattaactggaagttataagcggagggccgtcttaaattaatatttttgaggccctattttaattataaaaattaggcccttacaaaaaagaaaagtgcaatttataaataatatttttaaatattttatcttatggttatatatcttacaaaataccgaaaaattcaaactattttattaaattattattgattttaatacaacctaaaaagaaaatgaaagaaaaaaagaaaatgaaaggtttgaaaaaaaaataataataaatagcagtaatagatatattttttattttttgcatgggagttactaacgacaagttgttaaccctttagaaagttgggttcatacaaaaaaaacctaataagcattaaagaaaaaatatattagaccctttatttttaggacctgtgcagtaacccatcttgtacacttatagagccggccctataagtagataatatgattattttatctagaaacttatattgattgtgcataagaatatttaggcttaaaacaaaaaatattactataattcccacgaagatcgacatttcaccgtaccaaacaaccctaaaagaaaaagaaactcaagtgttaagaatttatacgattactatcaaataaaactaaaaagtggaacctacacttgaaaacaaaatgttaggttatattttattaagtgatcatcaaatcgagtttctcatgtttaacattcgcattcccactaaatctaaccccatgtcaaaaccttaagatttatcaaagaatggctaaagttcaaatctatgactttttttttctcttttttcataagtataggccaattaaaatattgaatacatctataaattagaagataatttgacattcattccaattgctttgctatgtttgggaaaaggaaaagatttttatatattgacataacaagtaccaaaaaagatacatatatagttagatacgtataatggaaggatagggctttgactttgtagatgattactaaagatacaaatacaaccatacaaaaacaaataaataaaaaagatacaaaaatataattaataaagcaatctttcttaattaataaccaataaagttacaactcgttggctataaattaattaaactttggaaacattgaagaattagaagtcaactaattttgggttaaaaatacaaacaacaaatatataataattgggtatatttttatatatgtatatataaagagaaactaattaattaatgcatatatatatatggctaaaactaataatgatatgaattattaactctttacttatagatgttatacatatacaacaaaaaatcataacttttaattattagattcttatatatatatacaacaaaaactatataaaaacgtatattcatgtggttcatttcacgtgccttaagcatgcatgcatttcttgcatgtacttacgtactacgtacgtgatgcatgcgcacttccacattctcatcatgatatataaatcatgttatatatacatatatttatatatatatatagtcgaatctatgtatatatgctcagatttaaatggttatatatatcataccagccatgttatgctagtaattagtaaacaatattattaatttaggtttcaaacataattaaattcataagagatctattaataattatatattaaaattatatctagctagctatatattgttattaaaaatttagattataatttctggatcgacatgtacaaaagtagagatatttttaccggtgatgagaccaaaaagtatgtttgtatatataccaaacatattttttcaaaaatcatattatatatatatatattaattatatataggtcggattattataatggagaaacacttttataaatgagacgcagctagatgagtttgactaatttgatatctaataagccatatgtatatgtatatatttatatatatatatatgggaatttggctggcaaaagttgcagcatttgacccattttcatgagcaaaaaagaaagtagatctattggaaaccaagtcagcaaatacataatcatgcattaatttcttttttataaaaaaaaaaaatagaaaattaaacaagaaaaagagaaggaaaaactttaaaagaggtcatgtgagggtctccatgtgaggttatattaattaaactttaaaagagaaggaaaattaacctaggttattagaaccctgatcagggtctccatgtgaggttatattagctctttaatttattaattatatagttttaaattaatatatataagaaagtcaacatggagatatgtattaaagtttttggtcatattaatagtgtgtttattattatttttttcaatcaatatatacagtatttataatttagtagtggagtgaaactgatttttattgatggaggcatttcacatggatttaaagacacttattttaaaattaaactaaattattttttaatatattaaaattgaaaatattttaagtcaaactatatttataaagtatgctaaatttatatatatgaatgagtactaattattgatatatatatatatatagtagatatctttctataatcatgatttaatgttaaatattaattttaacttactattatttttaaatattttaaatgatttgaaccaatcaaaaggtaccatgcaatcaattagttggcatatttaatgagaaattaatgtgagatacctcatttgcaataaaattataaaattgaatattcattaaaatgcacctcatcgtgatcaaaccgagtctagacttaactaaagatttaagcggtgtttggttaggagaaataaaaataagaatggtaaataaaaatagaaatagaatagaacaaaatttaaattgcataaaaaattgataaaaaaaattattaaattttttatcatgttacgttagaatggactttccttccattttaaaatagaatagtcattctactagaatgctagaaagaacattctattggaatgactgacattctaatactttcaaacgtagccaaataaaaatgaatggaatgaaaattattttctttctattctattttattttattacctccaaccaaacgcgctatcttaatttcaagctattaaaaaactctctcaaccgactataataaaatgttataataaatacctcagatcaagctcatcaagtattcatatcaaagctagtgagagaagctccaattataaataagagagagagaagaaaacaaagagagttattatagtgaatcacctgtcaaagattatgacaaggaatctccaccattgttgtactgatcgagatttcaacatagtgaagaagagccaagcttcctaaggctatattcacaaggatgtagtcagggtatgccctaaactttagtgagttttagaaaacaaattcttttttttggctcttatttaaaaattatgtttatttttaagaagaaaaatattttttagctccttcaactaagtggactctaagcgcaagcctaacccgtcttaatttagagccggccctagatgtagcccaaaaattaaggtaaaccttgccaaaattaatatgtttgattgatctctttacgtcaagaataattctttaattgaattcaaacttagcgattcgaatgtgattcctgattaaatttataatttaaaattaaattagcaagataataattaaagtgacaagtgtgtctgcaagtttaaagatggaaatctaacaaaaatattgatgaaatgtatttttactatcaaaaaatttacttaggtatttgtggaggttgatcctctaaaccatgaactaactcacctacatcaactaacttaattaactttctgttatgttagttagttggtatcggttttacacctattccctaatgtgagttatacctatatatagactactcttttcacttttgtaagatagagcaagagagagattgcttagtgttctaagccgtaaaacaatgttcttgaagggatcaagaacagagggtgtactcgggtaggattagagaaactatgactgtttctcaggggcgtttctcgagtggtgcaaagctgtgattgatcttggattaattggtgcttgtattgttattactctcttattctacataagaatgaaggactggtgatgttttctcaactggagtatggcaagggatcgaattgatttctaagaccgaaaccaggataaatcgtgttgttattcttcttgtttaatttctggtttgattcattgtgttgctaattgttttgtgtgtgttattgttgttcaagttgtgagattaatgcagatttaagattgaattcttagtgttttgttgctgaaattacaacaatattaatttataactaagagataaacttatatttatgctacaaataaatcaaaggtgtcatattacatatatgatcactagttctcctttaacactacccctaaataatctttttgtgttggtcaacccccaaaattgatgcaaatggttatttttaaaattttacgtctgttctaaaatacttttaattactttttagttaccaattggctcccacttgaaatgtgacattagattcatttttgtttcttttaggtcatggaaaactctaatgtgacttgctgtaatgctgtgttagttacttcttggtaacatattattttagttacttttttgtaacgtattcttttgttaactatattaacttatgaaaataagattactagtatgaaaaatattaacatattttttttttttatcaatttagttttggtaacttattattattattattagtccataattcttaaagacacttaagcctaaaaatacaaatctcactacacaatctatacattatgaacaatttagcaaaattctatcaaattgtaagaaactcatacgatcttaagtttaaggagtaactactaaaccacttatagaattataacattttcattagttatttatttattttgtggctatattgcactttgtatattgctacattaatattaaataagtaacttgatggacaaattgataatagaacaaaatatcaaaattaatctacaaaaatggtaacattaattaaaaagaaaaaaaatgcttgtttttttctaattaacttctgagaaaattaccaaaaatagaacattaaccaactatatatgcaaaaaaaaaaaaaaaaaaaaaagtggaatcaaagctacatagttactttaaggggtcaattaagcttttaaagtttacactaaattaaagaagtgaacaacataataataagaagaagaaaaagaaacaaattgccacttgaacaatgtgtgtactcatctaaaattagtccatttccatcatcatcatcatcatcatcatatattttgttctcttattcatcttgagatatccaattttggagagtatcctaattgttccatttcccagcttagcttagaagcaacaatttcgtggcgcggaaaatactcctaaaaaaaattaaaaaaaaaaattagaaaaaataatttgaagcaaaatgaattagggaatttgttaattttggattaattaattaattaattaattacctccattttcttgactaattctttggctgaaggagaagagacaattatatggcgtgcagttgggctaatgaagccttcttcaacagctttatcaatgaatgacaacaatgagttgtagtatccatccacattcaacaatcccacctaattacaacaccatcacatccttagttttacttatttactatcgaactagggccgactctgaaatttcgtgggccatagaaaaaaaaaattttgaacgtttaaaaaaaattatggtatttttgaaaactactaaaaaatatgtgtatttttcaaaagagttttttaagccctttggctggcccaaggtaggccctatatcaaactaattgcaaaaataagaaatttgtaaacatttttgtgacatgtttacaacaaatatttacaaaaataattatttttacaatctaatcgctcttttgattttgatagagagtcccttgatgagtcttacctttctttccgaggtatatattttccttattataatactttacttggactgtattgtactatgtatcatttgataacccaataaatcccctactctattttcagggcaaattgaattttaaatggcagaattttaaggatatttagaactaaatagatcttaaacaaaaatatttgtaaatgtaattatttttcctataagtggagagttttattaccggtttgtcatggattccaagttgagcccaagttatcacttctagaagctcttcaagagttccatagccaccttcgtaaaaataaataaataaataaaataagatgcacataaagtaaatattttataattttacattatgttttttttttacatatttatggtaccttataaagatacaagaaaataacaaaaaaacaacttaaaagataatatacaaataaaaaaattaacaacaaaaataataagaatacaacataataataccgtattttatataaataaaatcttaaaaattataaaaatgtgtaaattccgtatttttataatttttttttttgttgtctttgtattttttgaaataatccctatttacattctacaaatcatagtccaacagcctaactttatttcagaaaaatgggccattgcgacccaattctgatcgcttttgggctatgttcagtttatcttagcccaataactaaacaatatactgggcccaattctaatactttttgggcctttttttggaggaaataaataaatgagtgaaacttaagacaatctttgtgtatttcaagaggaaattacactctatannnnnnnnnnnnnntcctcttttatttttaccctcttttttaaaatctatcatttttacct

SEQ ID NO: 66847 - DNA, 2086 bp, Cannabis sativa
ttacataaaaatattgcataaaatacaattcaatataatacaatacaatacgacttaatacggcgttccaaacgagccctcatactcttatttaagcaacctgagtgtgtgacaattttggtaaaaattgtctcaattgattgttcaaataaatggaactctcagtttttacttcatgtagttctgtggtagctgtagttgtgaagtgatgatgtcttcattgattgcatacttcgatcgtacgttgtcttttctgttggtgttggtttcattgtgctttggcatactctattttgttgttatataccattttcttgcaaattggagattgagaggaacctgacttctgaactaagaggctcaaattcaaagaatttgagtcttgactcgttaagagtgagatataattagaggcgtttattatggtaggttgggttaagtcatttcagttaagggtaaatagcgcgcgacaaattggtgggttttgattacccgctaaagttccattaaaaaaaatactactataattgattttttttattaaaaaaaacaaaaccatttttataccacttaatgcttattttattacttaatctaactgaacaattttggaaaattttcctgcgacattcaggatttttatttcatatattaaaacaaattttagtttttttttttgaaccaaaaacaaattctagttagtaataaataagttttaggcttttccttttattttataaaaataaaatctgcttttctaacaaattatagaatatactaaattactgatttgaattaaattattgtggtgcccattctacgtcaccacagtaaaattagccataaattcaattcaaaatgtatttatcaatttgatatatcctctttctatcaaaaagaataataaaaaaaattgaacaacggatatcctcttaaattaattaattaataatatatatttaatccaccaaattgattgcgattttttttttttaaaaaaaagatatccaccaaagtcaaattgatctacttgctctctttgttggagtgcaaatctttttatgggccgtcggccaatgttttccatttgtgtgacaagaaaacgactccttgaatacaaaaaaccaaggttcacttcaatcgtacacgtgtgatacagaatccaaatccaaaggaccacatggttttgttctttttcagggttggctaaaatgacatcttctcaacttgctcaactcagagtttcatttcatagttttctcaaccatatagaaaaacacccttaaatgtagaaataataaaataaataaaaatctgcctctaaaaagatctgattaatccttttatgtgtctagtagaattatgctaattgactaccaacgaaaacataaaacccctacacttttctctaatataaacaacagacacataatcctacctaatatcacattaaaattattacactacagtacaattatcctgatgcttatctcaatcctctttcagaaaaatattcattataatcgtcatccttatcagaaacactattatatcatccaaatataaatataaatttatttatacttattcatgtacctacataaatatttgtatccttatccaaccaactaaatacaagaaatggtgactaaatttgaaaccctattagagtcatccaaattgtccccccattttcacacatgtcttaactaatacagcacaagtaccctctcacttagtcactttcaacaattctcaccgtcaaaattttatttatttatagtaataccgtccactcacttattaaaatctcttactcaactcctctatttgaaaataaatatggaatttttttttttttttataatagtattggttataaatacattattcttataaatttttaaaattttacgatagtttatagtgttaaaaataagtttttagttttttgaacacgcatggtagattaaaatatcagaaattctattttcggtactgtaaattatttagaatttgaggagtgctaccgttaatctcctgttacaacctctttagcaattttcgtgcctaaaaacatatgcca

SEQ ID NO: 66848 - DNA, 1031 bp, Cannabis sativa
ttttggtaggcattcggaggggacctatttccagagaataggggacccccattcccctttttgatcctagggtttgatatgggggctaactgctggattttcttttccaaatgagtaaagttctccgcgaccttcacactcacggtttctttgggttagaccaagaatcctagatctttatcaaatccataccatgtcaacccccgcctctgctggagcaaaatcttcgaagaaggggccaaaggaattggccactttggctgaagtaatgaagggcccaatagtctacaaaaagttcacatgacgctcaatggttgggaagtaggtgagctgcattcgacactaacctacgcccaccagttggaaaagatcattactgtttttggaatcaaaccttccagttcaggggtttaccatcatggctcgatagatggtatggaggcgtacaacgttacatcgatcttgggttttggcctctttcccttcaagtgtcaccttggaagctttaatttcccctttaagcttctcgcattcgtcggttttggcctttgtctccttctcagcagctttgagattcttctttatattctcagcttctttgttaaggtgagtaatctccagttgggcatcactccatttcttggccataactttgcattggcctattaagttctggacctcgctctccaagtattttgccttttccaagcctcgctgctgggcggcaaaagagaggaaaaaagccttgaaatccacaaacaaagatgcatgagtaaaaaaaaaataaaaggaataaaagaagtgaacaaataaggataaggaaactgtaacaccctaaataattaggcacgctacccaaaatacttatgaaaaccctaatcccctaaatgggattactaatcaaaatagcgcagaattaaaacttttataataaacagatttaaaataaaacttgtaataatttaattgttttttaatagttgggatcccaaaaatatttacaaactttattacaagtctttttctttcag

SEQ ID NO: 66849 - DNA, 830 bp, Cannabis sativa
attgaaatctgaaccaggataatttctttatctcactcttttattttctttgttttgtgcattgtttttgtccaattcatgttcatttcttttctagtttattatctggtttatgagcattgcattgtgtgtatgtttgtgttgagattgtgttgtagggatttacaatacaaaagaaaagtttaacactaaactggtataaatttaaaatccaatattattaatggtgtagaatttagtgtatattagtttggtgcatataatttagtatactattaaagtaaaattgtgtgaagatattacactaatttaataaaatggtgcacatgctcttatacatagttgtgtgtgcgtcttgaaattgttggtctttaattatcatgtccccaaaaagaaatggtggtagtgaccggtgatatgagtgcacttttaaatttaataatggttattatatgtttttttttaatttacccataaactgttactttattaataaccctatacttagtgaagatttaataattctttttatagtatagtacgaataaattaacattaatttttttttaatgttacaaatagttgataacatctaagaaaaaaatattttattaaatgatttttaatttatttgaaaacattaatggagaactcaaaattttctctttcaagaaatgataaacacttcgatatttatttaagttttactacaaaaaactgttatttttggtgacaactgtttaatcacaataaaatgttaattatttgtgactaaagcataatatttagatacaaattgtcactaatttagctttagtcacaataagtat

SEQ ID NO: 66850 - DNA, 1137 bp, Cannabis sativa
aaggcttcatcccagtaccttaagggtagattggcttgagaaagaagtgtgagaccattctccactatgtgtctatgttttctttcagctagaccattttgttcatgagtagttgaacaagcttttctatcgactatgcctgcttctctcagatactctatgaagactctatattcccctccccaatcaaattgaaatgtttgaattttagtgcctagttgcaactcaacttctattttaaaattttggaatgttttgacaacatcagatttggttttgagtaaataaagccttgtaaatctagaataggcatttataaaatgtatgtagtatttacatccattgtgagaggttgtaaatggcttagtataataaatttcataagcttttgaaaaaggaaatttgtgtatttttcctaaacaacaagctttacatatagaatttggcatttattcaaaatttgaaatgttacaacttgaaagaacagacttaacaatcctcttagagggatgaccaaggcgattacgttacaattcaaactcatgaacagagttgttacacttgacgcaaatagtagagttgagactctgactttgggaagtaatagctaaatttttgtgcatggctgatgagggagctttgaagtactataagttaagggggaggcagacaactgtagttgattagagtcaaaagtatataggcctttgacccagtcagtagaacagctttactcacttgatccttgacataatacacatcaagataaaacacaaagtaaacattataatctgtagtaaatttagaaacactaagcaggttctttgtaatttcaggcacatgaagtaatttgtttaggattaaggatttatcacatgtgttaggaataagataggcattaccaatttgagaaataggtagtctagtaccattgccaatatatagttgttcaggcccttcataatctattgttgttatgacattttgtccatttggagtgcattgatttgtagcctagaatcgggataccagttgtcatcctgaatttgagttatatgaggaatgttggcctgtagttgagattgatctactactagaaacatattgtgatgtttttatcaaattgataaaaacagt

SEQ ID NO: 66851 - DNA, 1416 bp, Cannabis sativa
tttttttaaaaaaaaaatataagaaaattttataatacaccctttaaaagaaatgtactgatacatttttatttattttagtgttcgaaataatttgttagttacatttttttctcatgatcatgtaaattttaattatttaagacctcttgtaaaattttaacaaatataaaaaaatttaacacgctaaaaattatgttcaaatagtatcttgcactcgtaactattttattttatacgcgtgtaaaatagactgttttacatgaatatgaaaaaaaaatcagactaaataattatataaataaaaaatcagacaattttttttaaaaaaatatacattatagtgaagaaaattagaaactaaatatttcttacacaaaatatagaactaaaatagaaagaaaataataaatctataaaaaaaaattatcatataattttaaaacaactatcatcaccgtatctcatttatagttatcattgtatttaaagttgatttcatcacggtatctcacttataatcatcattaatattttttctaataagtttactttgtacataaaataaattaaacaatgatcagtaaatacttactttaattatatgaatgaaagagagggtgaaaaacataataaatttataatttggatatatttggcatatttgtaaataatttcttttaataaattatattaattaatattaactatatctctctctgaaaaaaatttatatgtagattaatttttctaatacatatatatttatttattagttattatatacaaatatatagttattatttttttttaatttttaattgattagtaattaaataaaacagaatgaaaaaattttgaaaaatgagagaatagatattcagaatttttttttaattatcataaatttaaaaattataaatagatagtttgactttgttttgttagttattatgtatgattaaatattttttaattattaattataaaatagatagtttatttttttcttaaattatttagtaggagttttttttatttttacacttcaaaatattttttttttttacatttacaaaattcaacacagaacccccatagcaactaacggagcaatctaaatcgcaatcaaaatacacatagcaaccacatagaaactattggagaaaccaccgcagcaacccaaaccgtaaatttgaaaaaagaaaaggttaaaaaaatagtatatgaagtaatttctctatttattattaaggtattatatatattttaaaaaaataaaacttagaaaatacatacatatgtaattttgaaaaaaaaaaaaaaagtgtgtcctatgttgatgtaatttcctttagttagatatttttgttttgattattattattaatttaattagagttttttttttaaaag

SEQ ID NO: 66852 - DNA, 727 bp, Cannabis sativa
tatttttgtaatattttccttttgggctgtacaaatgttcattgggccggcccacagtattgttgtaatatttttccctttttagaatattcctatttttttcccttttatttatagcattaagtgaacttatgatttttaataaaatgaaatgggttactctctagttttatacaatatttgtggtatagtttatccgaataaaaaaatttccaaaagttgttttagttatgaaaagttaaatgtcatccagaagggtgttctcagaagtctaacttgtccacccgaaaggagtctcatagaaagatagatgtcatccaaaaaggaattcccagaagtctatcttgtccactctagaagattcttcaggaaagctagtcttcctccgtaaatgagttccgaatggctagctgttccctcttggaagggagttccggataatcgactctagttgttgcttttcctatccagaaagtcccttcagcgtaagctttggtctttcttctcggaagcgcaagtctcatccagaagcactttaacttaagctaacgtggagatattgttacgaggagtttgttatgtttcttaaatcgtaactaacttaatagctttaaattcgcaaccaccgactttgagatccatatccttaatctattaatatcacctaccttatcattttgatgcaagtgatcaaaagtttcgagagatgattttgaagagagggatt

SEQ ID NO: 66853 - DNA, 563 bp, Cannabis sativa
ctttgtcaggtttctcacctccccttgtctcttctatacatgtgatctcaaagtatcgggtcgaggaggtgacaatggtgttgtaataggttcaatcagtcttgcctttgtggactagttccagactgttctctatcatctttttgagtgatcttaaggtttatactaatacattttggcaagcaagtttcccactaccacttccaaagagtttccacttacaaatccattcctaccctttagatgagggataaagctaaccacattctttcccttcgagtagagaggaggaatatactaaggttggcctacatggccaacttcttaatatatagaatatatcctctagagtctggagttgcaagggctgagggtcgatcggatggtccacatttttgtcttttgtaaatatctaactaattatacaattgttaagggatttgaattgtaagcctagcgtttaaggcttcctatataaaggccttaacctctgactgaaaatccaagttgcctaatgttgaccttgcttttagccaacgatagtgagtctaatttagtaagcg

SEQ ID NO: 66854 - DNA, 1651 bp, Cannabis sativa
gtgaggttcctggccggccctaggctgagtcatgggacctggctggcctctaaggcttaggaaccctagctggccaaggccaaggttccaagcgggcagctaattttttgtcctctgttgacctcggctagggtctcgtgaccgctttggaggcatatacaactgtagtcttatgcatgattctccttgggaactctccatgagtcttggtaatgagtccattgtagtcgagtgcacaacttaggactcactatttgtctaagtaaatgtacttaagacgatactttgctgataattagtcttgtacattgtgatttacctggaaggtacccttaggtacagttgactagaactgtgtttgtagctttgtcaggttcctcaccttctcttgtttcttctatgcaggtgattctgagtattgaattggggaggtgacagttgcataggtccccctgctatcttgtgtgatccaggaccaacagtcatggccaggacgaaataaacatgttgtagagccccgccatgtaatccctacactactagggtggcaacaaggggctgagtcagagttgtagaggaggctacttagccccgtgttgatgtagatccagaggttgaccaggcagaggtgcctgaggttgatcagggggctgagagtcctgatactgagtttgaggttgaggaggctgggccagtaaggaagaggagatacaaaacttatatcgtcctctccaactgccctttgggaagttatgatgacgatgggaagcctttgaacagggtcgatcagccttcggtgttaggcttggattatgtcttgatttagtcttctgagcctcagattttggatgctagctcacagggagacagatggatctctcccgcatatgtcctctctgctgatacttttagcaggatacttgctagcgggctagtgaggggtgttcattgtgagatacccattagagatcagagggcgcatcggcttgccctcaattggatggcacggtcggagcttaatatagagcagggacagtgttgccgctctacccttacttcagagacatcgctgcttattttggcatgtgtccaacacaaataaccccaaaaagtatcaagtacattttagcgatgtttgttttgtataaggagctaggctggccacagcccactccttatgagattagatattattttgatccgaagtctgctttgaagcagaacaagactgggtacttctactttagccaagttggctaccagtggttgggtgacatcaacaacatacccatgtccaaagtaggtgggtacggccagaactacttcgttgcttgggacattcagaagactagacattaccagttctagcgggtgccgtttcagaagcactccatccctacattacagatgagggatagggcgaatcacatcctatctcttcctgtggagaagaaaaacataaccagattagccagtgtggccaacttttagaagtacggcatgtaccctcctgcttctagagttgtgggagcccaaggcccactagttggtgtagatggagccccagctgtagagggagtttgtcctagtgatggacaagtccctgacttggatgatgacgtgtctttatctcgaatagctcagaatctag

SEQ ID NO: 66855 - DNA, 742 bp, Cannabis sativa
ccgaaatgcaaagcaggaagtgcagaaaaacaagaaatggaaagcagggtgaaccaacagcaggaaagcaaagaaaaacaaaaaggcagccaataccgaagaaaagtgttcaggaaatactaaaggaaactacagaatgagggttaacagccatatagttgatatggagctgactgttaagtgacttccagatgagatctcccttagaccttctctaccaacatgggcgacattattagcattgtagttgatagctcagggtacttcgcagattttccaatgctgcaaattggagtctacgaagtgatattgcttgttggatgcttcctcaatcaaagttgctggtctctctttgtatttacccgaagagttcacagcacaaatgatcactttgaaaaatggagttgtcaaatttgatcatatttttgtatggagggcgttttcagcacaattataatagtccagcttctttctttcttttcaacgtgataatttcagatgttccaatgcattcttgcaaaagtacccaaaatggaatgaattgttttgttaaattgtttgaggattatatcacaactactagcggaaaacacaactagttttatcaaaattggtagacttgtgctcaaaatttatgaagaggcaaaagaacagatctcagcaaaaggagaagcaccatataacatcttgtaatcttaaaaatcgattttaagggttctcaacagatgaaaatcgttttaac

SEQ ID NO: 66856 - DNA, 673 bp, Cannabis sativa
tcacagaccttaaagccaatctttttagatgggatatcacaatctgaaatattttaccgcagtataacacatattaatagatatatttatattatcaagactagatatttccaacatttatgataaaaacatatatcataaaattatatttaattctcaaatattatattaaagatagtctattttaagattgttgcacaatttaacgagactaatagaatagttgacataaacttgatggtaaattacaattactatacttctattaatatccttaaatacactgtcaaatttatagagataaagaaaactaaccataaatgcaattcctattggagaatatctaaggcctgtgtagcacatagtttccttaaaatagattcgccttctcccgttgatgctagaaaatttcaacagtgtctatctcccaggatacaatagaataaagttacaagacgcactaccttatacttttggcaaactaaatatgcatgaactctatcacactgtgatagcataattactctaaatagtattttacgaaattttataccattaacagtttatcttcaaaggaagtaaattccatatgttctaaactttgtacaaaataagatttttgtgtattttttaaaatcaaaggcttcaacatatttatagcttttgaaattat

SEQ ID NO: 66857 - DNA, 1849 bp, Cannabis sativa
attaatattaagcattgttaccaaatagattttcatgtaattaattatgagttaatgcaaccattaactgagtttatgtttaaataaaaatgagattcttcatctagtttactctttttagtatatttaaccgtcttatttgtttttcaaaagaaaaacaaataacatcttatttgtgaattgtgatagcgatgggacattgtcaatgtcaatgaggtgtctcatatgtttttgaatgcaataaaattaacaaaattttttctttttaatataaaaatgtctattatataaattttaaagaggattggatttgatttcatagtgtttgaaagttcactttcatggtaaccctaatggggtataacttggtgataagcaagggaaagacattgtcttctttttctgggcattattctgccattacaattgactatttctagataagaattatttttgtttgattttagttcttataagtacccatcaaatctatcatcacgtaatattcaagaaaaagaaacagaggaatctctctttaacaaagacgcatgcatcaatggaggtatggtcagtgggcttgatttataaatgtcatttcataatattttgtcaatcatccatttttggaatttttatctttattttctcatctcttttttggcgccaatttatgatctctaggtcaccaaatattttttttttgtaagaaaaaaatattttacaaatataaaaaaattataaaattataattgtatggttgttattatttttataattttattttttattgtactcttatttatttataatgaaaataatctttattagatagagacatccgctaacacaatggactgatgaagagcaatgggaacatcaccctcagtaaaacgacgacctaaccaataacaagcaccacgtgccatacagtgcgcggcttgttagcagacagtttaacatgactaatagaaatattacttaaagaagatagaataaattgacaatcataaacaaatagaccaaaaatagaaggcatagataccgaactaagaatagattgaacaactaaaaggcaatccgtctctaaaatgacatttgacttgttattcttctttatctaactaagatctgacacttagaatttctgtaatttcaagccggcaactgacagaagaaatagttgaaaacgcctcaattaattggtcatcacagccacgtgcgacaaaaccagtcccgacctcatttgtgtcttcaaaaactaccccatccacattaatttttaactgtcaagcagccggtttggaccagtgttctcttgtgtcagatcgattagaagccagggaaaccaagtccagcgtctcaggctgagtacacgtccattgtcgaagagtgttacgagccaaccaaacaacatcagcagcactacaacttttaccattccaaagcatatcattccgagccttccaaattacacaaccaaccatgacagtttcttcaaccaattccatattgcctactgccaacacttttataaaccagtcaaaaaaattggttgctacaaactggccaacacctaatgttgatcggatccaacaagattgagcaaatgagcattgaaccaacacatgaaaaattgagtcttccctatagttgcacaacacacaatgtaaatccacgggaacatgtttactatgaagttgagtacgtgtaggcaaacaacccgaaatagctttccaagcaaaatgtaaaaccttaggaggggctttattgcactcttattaatttattattttgtattatttgtaagttattttttattgttatcttgttgttgtttggatgttatttt

SEQ ID NO: 66858 - DNA, 864 bp, Cannabis sativa
  modified_base (475)..(490): a, c, t, g, unknown or other
ttacactatgcgactatcatggtcgcataaaataaattaaggttattttacaaatttgaatatttcacattgtcagtttgataaatttcattgttatctaaatgttcttcttccccaaataacttattctttgttagatgatttaacaagtttgatgtccaattttctataaatgtccttaatccataacaaccaatgaagttgcacatgagttaattctccatgctcttaacttgtatggtttgatgagacttcttctcttgttgttaattattggtattggagattgtattgtatgatattgtgatttatttttatgtaatttacagtataaatatttaagtttaattttcggttgtagataaatacttaagtttaatttttgacggtagtaatgcttaaattatattcctcgaactttcataagtccctagccataagtttcaaatcattatccacatgtcattttcttatnnnnnnnnnnnnnnnnatttttaaataaaaaaaaaattaacgacttggatcaatgctatgtgaccattgattggtacctacaaaacttctagaaatataatttaccgttaaaaattaaacttaaatatttatttacaatcaaaagtttttttaaaaaaataaatataaattttttattaatttgtcaaatcagccaaaagacaatactgtacctcaataggaacatcactcatattgaatactcgatctgaaaaaagagcaagagatgctctagcaagactatgagcaattatgttagcaaatcgtttaataaaaaacaaagaaacattatgttagcaattatgttaccttaattgtattctcttgcagcttaacccgaaatttagctac

SEQ ID NO: 66859 - DNA, 1408 bp, Cannabis sativa
aaattaaactaattattttcaaatactcctatgaggaattgtatttgcctaactggccggatattgtaaattatgtgttgtcactgtaatttattttatattcattcaaattttatatctgcaaaaagtgaccatagaaaaatgtcataataatatttatatagataaagatattgagaatgaaattcacttttacgctaatttggaatatacagtataattatatattaattgaattcaatcaaataaagaatattgttcaaagaaaacagtcaatacataataatacaaaacgaataaataagaaaaacacaactagttagctactacaataggtagggaaaaaataaagaaaaaagaaatgataaccgaataatatcaacatatatataaatgtgatatatataacaacaaagaagtatatatgtgggaaaatagtactaataattggttaattagaatgatataattattaattattatgtttgtgtttagggtttgaagccaaggaagtaaggtgcaccagtgtatctcaaccaaagatttccttgaaggaaaggaccaggagtgaattggtgagcctcttgcctgtttgtcaagatcttgtgccctttccatctcacccttctgttagtgttagcccccggtcctcggttagcgaactcggcatagtaaagagtgtctagggcaaagtttccattccactccatccacccagcgggctgaatcaagtctccaatggtggtctccatgatgatcgtcctcgagtactctttccatggcctacccaagtaggttgggaacttgaacctttcattaaacagtttcacctcaggtacaatcctacagttttggatcacaattcctgtcgtttctctcttgtctgttctcccttgagctgtcaccgcgttcttttgcccgtctgctggtttccttacaattattttagagttttggatcaccactgccccgtctccaaagatgaaatcgacggttcctgatataacgcagttgcgatagaattgacgatgtgcttgtgtgtataatgtgtcttggtatccgtccattctacagttgtagaaggcagccatgtctgactgaactcgcaatgccactgcttggtgtccttctggtcctgctgtgttctggaatcccatcgatttcgctatgaaaccatttccaatagcagctacaaataaagaaagaattaagaaattagacgatgtttaacacactacaaaaaatctcacttttagtcgtaacaaaacttatgacttaaatgaaaaagttgttactaatttataaataataatttttatcttgtgattaaaaagttcgtaaccaaaagtattagtcgtaaaaattataacttgttgtgactaaaattgaattaataacaagttatatc

SEQ ID NO: 66860 - DNA, 934 bp, Cannabis sativa
attttgtaaacttgtaccttaaaaattataaaataaaaaatccccatatttacatagagtttttataaaaatattagattttaagtaaaaatttaaaaaacacaattttttttacaaatatactgtttttttataaactaactataaaacactaaatagaacaattaaaaacaacagtaaaacaactaaataacaacaataattaataaaatttatcacaatacagaataaaaatttcaataaaatccttgggtttctaatagcaatgagtccaccaaaaccaaatgacactaggtaggtactaaacaaatagaattggtgtccacttattctttcaaaaggaaagtctaataagaaactcaattgggattttgcacaaagacaaacgatctgcatgcgtgttaaaaaaacatttcatataaaaaagagaattttttaatattatacatttttttttaaaagaaaatttacacctctcacccttatttatacctaatttacatatgtggcttacccattttaatactaatactttataacgtttttgaagaaagatatgtatattttttttttttgtgatcaaaatcatacataattaatattgtagcaatttataattggtggcagtatctcttcgaactagaatagtttattgtctaacgaaaggatatgttttgccaaactatatgctgcaaaaatcaaatcgcaagccacatgaaataaaattactccaacaaattttaacgttaaagctatagaatgttattgtgttttttagtttctaatgaagtgataagattcattgtctgattgaaaaagttatatttaaataaattttgaaaatcatttatttttgttttaaaatttttaaaattttaattcctattataaaaattaaaaagaaaatgagtatgagttgaccaaataatataga

SEQ ID NO: 66861 - DNA, 1239 bp, Cannabis sativa
ctgttgtgcatcacttttttgttgaacacgttaagagagaaagtagttttcatgcactaaaaatcattttattcgaaataatgaaaatctcacattttcgatagtgatacccctttgtgaaatgtggcctggacccatcttggaatttttttttggcactagtgacaataaattagtactactaagaagtgaatataaagatttgtttcgcattaaatttgttaaaaaggcccccttattcaaaaattaaaaatattattcttttcagtctactcttacactcattagtgttctcgtaaaatcttaccctacacataatcaaaaatcgtgaaattttaaagggagaaaaccaagaatgttttgcatcacttttcatagtattcatgcgctaacaatcattttaatcgaaatagtgaaatcccatatttccgatagtggtaccgttttgtgaaatatggctaggacccatcttagaattttttatagcactagtcacaatgaattcgtactattaagacgggaatatgaagattggtttcgcgttaaatttggttaaaatggccccctaatacaaaaattaaaaatattcttcttttaagcgtaaattttaacaagttttttccgtagtcttacactcgttagtgttctgttaaaatctcaccctacacatctcaaaaaaatcgcaaaatttcacagggaaatagccaagtctttgatgcaccatttttctactattactgaaaacatagttttcatgcactaataattatttaaattaaatagtaaaattctcaaatttttgatagtggtacccctttgtgaaatgtggcccgtagccatctcgaattttttcgcgacaagtcacaatgaattcatgctactaagacgtgaatatgaagattggttttaagttaaatttgattaaaatgaccgtctaattcaaaattttaaaatattcttcttttcaggttaaattttaacaagttttttccttactcgtacactcgttagttaaaatgtcaccctacacttctccgaatttcgtaaaatttcacagggaaaaatcaaagattgttgtgcattacttttctatttgagagaaaatgtagttttcatgcactaacaatcatttttattgaaatagtaaaaattgcaaatttccaatagtggtacccctggcccggaccgatctcggaattttattttgcactagtgacaatgaattcatactactaagac

SEQ ID NO: 66862 - DNA, 927 bp, Cannabis sativa
caacctcagtgctagtgctcttgcaatcgatcccatctttcacgcttgaacgaagcatattgaaattgatgcacactatgttcgtgataaagtgctgcaaaaacaactttcgatacattccttcacatgatcaaatagctgattgtttaaataaaggattatcaccttctcgatttgccttccttgtgacaaacttggtgtgcagaactcacccttttgtttaagaggggatgtcaaggaatatcatttctatactagcacttctacaccagtcaatattcattgcagcatacacaacctgatggtcccctgcctctaacagaattttgtgtattttattgtgtaatttgtcctcatgaaattctgttatgccttgtaattgtgtaatgggaatattttggcagaatattgtagagttttatttgtgtaattactgccaggtatcatgcctaacgactccttcttatactttgcaatctattataaatagaatactctagctcatacccacaaatgagctgagatttgtattttgcctttttcctaaaatccaaaatcgaaggatagaactggacaaatattgggagagaaacagagagagaaataaatagtttggttttagggttttaaaaaaaaatagttttgattttttttaaaaaaattttattctttattgtagtttttaattatttttatattttaagatgattttttttttatgttttaaaatagttttatttatttttaattagttaaatagattaaatagcatggacaaatgaaattatgctatgtacaagtttatttggcatttagtcgtaaaaaattaagagaaaattacattatatgttactttaattgttttaatttttacttttatttttatattttttaagatattgtatgatgtctcattagaccctttag

SEQ ID NO: 66863 - DNA, 889 bp, Cannabis sativa
cctagcccgcctatgcttagggccagccctgaacatactacaaatcaacacaaagaatattggcagagagaaagaccaaacaggttaacttgtcagaagtggttgtggctgatgaggaggagttaaagaaaccatgtggaagagggcaaaatggttattttggtctgaatgtggcagaagaagagccattgaatggaatatgagaatagttttactaataactgttattataaaatagaattataatacttacaaacagggccggccttgaaaaaataggggcctaagacgatataaaattttgggccccttaataaataaattaaaaaattaacctaaaaaaattatatgctacatttcataacataaaagtaagaaaatatttaaaaatctgaaataagttttaaagtattacaaaaattagtagatttgtattattttaacttgttctataatccataataatatttttatcttttcaaaatttcaaccatacaataaattaaattcatgaaaagaaaaataaatgaaaaaattatcaagtttatgtttatctataactacaataatttctaacaagtacattaaattatagtccataattataataagatatttaaaaagaaataaattaaattcacttcaaataatatttaagaaaaaatttatttattattattgaaattaaatattatatcttgattattgatttttcttcgtaatattaaaaatgtaattttgattaaagcaagataaataggaaaagaaaaacatgataagagtagtaagaaaatggacaaaaaaaataaagatataaaatgttaaatttagaaaaaaagtttaaataatatttatgtattattttttttttttttggctttagttatta

SEQ ID NO: 66864 - DNA, 855 bp, Cannabis sativa
tacaaaccgtaaagttcaggtggtttagccgccaatatccctatataaaataatttgcgacctaaatactcgtagtttattagattttttaagtttataaagattcgatccaattatatattagatcttaaattttattatctcattcgattcaattaattttagtcattcaatcaatttagcatctattggatgttgaattagatcggttctattcgtttaatgtatttcatatatatttattggtttaattcaaatttattcaatattttaaacctaattttttttttatcagatcggatccatccaatattttaagttcagtatgtattagattggattgtatccatccaatctaagaaaaaaagagtaaaattttaatttaaatttttatatatatatattttacgtataacaatataaaatttaattactcatccaaactaaatgaaaatactaattagttcaattggatgttggatgtagagattgggagactgaaagaaatctcaggagctctcttaatgaggcccgtgttcgaaaggacctttactggaagcaaagggccagggtctcttggctgaaagaaggtgataagtgttctaagttcttctttctttctgcctctatcagagggagaaggaatgccattgagtgcattctcaacaaaaacaatatgtggatcaataagagattggatataggcaatgaattcatggaatttttccaaggaattttcacggggttggaaactaacattgagatgaattgcactgacttaatccacgatagactttctttggaagaccagtctgagctcattagacaaccctctcgcgaggaaattaaggccac

SEQ ID NO: 66865 - DNA, 1246 bp, Cannabis sativa
ttgtatttttattatttagatttccaatacacaatgatgaaaaaaatataataacaataataatattatctaatatattatccattaattgctggcttttagggtataaatttcaacagtttctttattattttggctccttggctgctttaaaagacataaaagagggcagtagatactaataacatagttttatttgttttgtttaactctggaccttcttattttgagagagagttaagttttagtttcttttatatgtttgatataagttatgaatgcttgcagagggtttatttatctctacacttatttctaatatttgtgttgtaagtttttattcttatttttatccatcaaattctttattggcatatttgataaaatagataaaaattatgtgtgtagtatttttgaagttgattttgtttgtgcatttattacttttgaaaatatgtttcttttcttagtgtaaaaagtcgttcaaatcagttttgactttatttgttactatctatgagttttcatgatttagattatttggtattatatttttatttttaaggaaattcataatcatgtttatttcttttttatatatttttttctatcaagaaacggtgtatagttgtgtgagtaaatgttgttaaagtttctttatttgtttatggtaactttgttgaaaatttgtccaggttcaatgtacttgtttgaacggattgactgtctgtttaaacagattctgactttcctatttcgaaagattttttatttattgacctgattgtttctttgttgtttgaccacgatctagaagatttctaaagtgtataaatacaccctttggttgttgatttcctttatctctcttggtgtatcaattctaaaattactttcaaattaatttataaagagttaatttgttgtgtgaagagattgagtccaacaagttcttagtattttattattgtattattttgtattatttcttgttgaaattgtgcaggttaaacaccttggatattgttcatcaagctttgggagaagtcttgttcgtgagacactttttgagaggacactttttgagaggaagattgtaagtaagtcactctttttgatgaagtgtgcaggtgctatgatttgaagggagtttaaggtctaggcacttcaaaaatttgattagaagaataaattacaacagtataggggtgttcatccaattcaatccgcactattttactcatag

SEQ ID NO: 66866 - DNA, 941 bp, Cannabis sativa
aaaggtgactttttataaaaaaaaatagtgggataaaatgcacccttttattccagttttttcataaacagtgggacaaaaggggtactttttatcccagtttttatgataaaaaataccccttttatctcggttttttaaataccttttatcccactggcatacatcccggttttcatattagcgaaaaccgagataaaaagccttaaaaatcgggataataggcctttccttgtagtagtgttggctggccagatctaagcttttgaagacagatattagtgcaacaagtatttcaagactacgtgcattcgctttcgccattattcttaagtagactgaggcgtcaaaactcttactgagcaacaccttagatctacacctttttggccttcggccgaacctcaacaagtcatctggaggtctaccttcttttctagcacgaaccttcttccaagcgacctcacaccggtagccgccgtgcatacctctttcttcagctctcaatgaaagcaccaaaatatttactgagttttttggaaacataataattatagagcttaagaaagtattagaagtgtaagtggcaggaatatagacaatagatttttacgtggtttaggtgttaattatccttagtccacgagtccgttttattagactctttagtcgtagaatgcagatacaaatacaacaggaatggactttactccaatccctagtctctctcttgaaaaagagggagcttagcagaaatattctggagttaataatagaactacagtaatgtgtttataaagaattcgccttcggtagagagacgaatggactaaaggagaagtggtcaaagttcatacccgatccctcgcctagtgtgtctctaggggtatttataggccgtttctcttgcaaggattgttgttgatggatcttcacaagga

SEQ ID NO: 66867 - DNA, 1252 bp, Cannabis sativa
ggtatcattatgaaccacagcaaatgttgttgtagacacacaaaaaagtctcaaaacaactaataataaggtaaccagaaaagaaaccaactccatttatattaataattttctagttcatcattgtgcattaatatgctttagtagtttattaagttattggttttttttttggatagtttgtggaaaagtcttggtcattgtggaaaaatacacatggcaatgaaagctcagtaaaatttctcattgttttgtattactcatgaatgggtaaaattaagaagatatttttatacttattttctatctaattagaaaaatttctcatttttacatggtatataagttggaattattccattaattgaaaaaaaaattaaatttgaacattaatatttactcctaaatatcaacattacatttacactaattttaaatataaaattttggaactatgaattaataattaatgatttctttagtgagaaattttatatataaaacaaatttaaaaataatatcctataatattttttttttaataattatatttattttattatgaccattttatgactgtaaatgaattaaagttcatccatggagaaatagaaaacaattatagtgtaataattattaataaaacatgtgaagaatgatatgaaattaatataaaaataaaaatctcaatattaagaatttaattacttaatgtgtatttaatggaagaaaaaaattattaaatcttgataaaagtaataatttagttaaatacaacaaataataatgatatacactttaactaaaataatttagatatgacacctacttgtgatgttagacattttaagttaagaaaatgtctcatttgatataaaaaaaaaaaaaactaccacacttgccttttcttggttgaggaaaaatcttaggcaatatatggaaaggaatgcatgtggtagtgaatgctcttatccccacatttgactcagtagtcatcttcaacattaaatcacttcaaacatgactgattgcttctgcattgggtcagccttagtaagctaaatagaaagaaaataataaatggattcaattagcaaggcttgaattttcattttttaggaacttgtaaactagacaaatacttttttattattttgtcataaataataatgataataataaaataataaaaagtaataggaaaatctacaatgcacccccttaaaatggatacattgatgcacctttatct

SEQ ID NO: 66868 - DNA, 2239 bp, Cannabis sativa
aggaccaccctgaattgattttttatcaaaataaaacttaataataattcgatctggagatattatgataaatctagttacattttctatatctgttcttgctagaaatttttttaaagttggttgtattaaaaaaataaaattattgaaaattgagttcatggtcttatttttaccattttggaaaatatagggtccattttgccatttaacaaaatagagggtccaattggtaacttttgcaaaacacaaggcccaaaatagtatttaccctatatatattgacgactttattacatatattataatagtgacaataaaataatacatacaataataaaaaaaatgaaaagttataattatataaaattgaataataaattttgtcaaaacaaaatacataattaatggatgaaaaaatttgcactaaaaaaaattgaatagtttcatctaaatttgatagtatttgacaaatttaaataattatgaggtgatttaaatgtattaaacgatcgaattgctatactcttataagaacatgatttattttatttattttattttattttaacttttaaattaataatttgatttttttcaaaaaataataatataggtaacaattcctatactaaaaatttaaattatcatggtgagaagtcttacatttttcattgttgttatatttaatgatgattatattacataaagtataatagtgaacaataaaataaaataaaaaaccataataaatatgtaaaaagtttggcactagaaaagatttgaatgatctcaattaccgttgatcttatctaaatttaatctcaccctaagggcaagttgtcgtctggtcggtaggagacaacaacctgatagagaaacttgttggatacttatattgaaggattgatatatgctttactagtatatatatttgaacaagataaataattcaacagacagttatttatgtggtacaattatttttcttttcctatttatacttaatttcaaattttgacacgggccctaccatgtcaggggtttgtcccatgcgtcggacccaaggagtgtgtgcaccacaaaaaaaaactatctttttgttaacaaaactcatttattaatttacctaatgattacttataatttttcaattaattatttttcttacttatttacttgatgaatatctataaattttaattatttttttgtaattttaaatttatatattaatttttaattagttttatttttcactcaacaataattgtagcgagaaaagtacaaaatatttaaattatttaatcctacaataaataatacagctaacaatataatcatggtgtaagtctatcatcaacggaagtaacataaattgctattgggggacccacataaaaaaagtaaccaatcaacattaaatttatttttattttgttgttagttatgcgagaaaaaaataatcaacattaagtaatttaatattaaaaactaattaatccaatccgcacttttgtagattggatttgagttattatgtgaattagattgaatccaaaatatgaaattcccacttagtataaatcgaatacactcaaaatagtgcagaattgatatacatgattatcgttattgagagaatgataaagaggagataaaaaactcttaaaaaaatgaaatatgcaaataataaattgtataaaattattaaatgaaggtgtcaaggcttgaactcatatcacttaacaagagataggataatgtgcattaactctttctaactatatatgtatactactagctaactagtacatgcataatttatatagatatattgttattaaaataaataaataatttaatatttaaaattttaaatacattgaactaagttgaagaaaaagtatattatgaatatgtattatttaatatttcatgcatgattatataaataatgtaatcaaagtaaataattaattttatatctaaaattcttaaatacattgaatattataattttgaaaagtaaattaattaatataatatgataaaattttgaaattattaaattaattgaaatcttaaattaaatataaataaaaaaaaaatattacttctaaaggattaaactcataacgtcttgattgttttaagagtgcttatattgattattataagttgaacatgttatagttttctataaggataattattgttttaaaataaatttaattaa

SEQ ID NO: 66869 - DNA, 639 bp, Cannabis sativa
cagccaaaaatatatcctgcagtgatatgctcacaccagcagcagaaaacctatcctataagtgctattctcacacaaacaatcaaaagccttatcactatcatgcacaataacattagcataaaatacaatccacactgtagaataaaatatgtaaatacaaacccataatacagttgtatgtttcaacatacaccctgtgcacagatgtccacttttcttacctcacttgttgagaacacatttttgctacttcaaacacctcaatgaatttccttgttgagaacaagatcctaacatttattaacacaacaatacatacaaaatacattcaagtatgaatctttgtactcatacagaaacctacgtaaaaatatctaacacataagctaattttacttgcatgccacaccatacataatcatttatcatttcaatttacacaaacacattacatgcactcacatgaatatgtcaacataaaacatgaactcatacaaacactttttacgtaaaattttactaaaatatcatttattaataaaatacacaaatatgtaattgtttatcaaaatcagaagctatcatatttcttaatcatttatacagattataaaagtaattaaatccatctagaaa

SEQ ID NO: 66870 - DNA, 660 bp, Cannabis sativa
  modified_base (48)..(70): a, c, t, g, unknown or other
cgtaaatatttaagtttaattccaagttacaaataaatatctaagttnnnnnnnnnnnnnnnnnnnnnnntaagttatatttctagaactttcgtaacttctgtaaatacctgactgttaagtgtctcaatggtcacatgacagtcactgattggtccaggtcattacttatttctattttatttgaaaattcattttaatatacaaatgagaaaatggcacgtgaatattgatttgacactcaacgagtaggtacttacaaaagtttcagaattataacaagtattattatcataaaaaattaaaattaagtatttgtctgtaactagaaattaacctcagttatttactccataaattactttaaaaaatagtcacatgcaataaaatatttatttttggcattataaattatttgaaaaaaattaaaaatttaattctaaataactataacatacacaattataaatcaaaaaattagaataaaaagttattcgaataccgaaatatataggatgagaataatctactttcagtgctagttattgttatgtacaatcaaatggtcaaaaataatgaaattttgatttttaaatgatcattattgagcttgaacttgaactaattacacattattcatgttgattttctacagaaact

SEQ ID NO: 66871 - DNA, 835 bp, Cannabis sativa
atttgagaaagattggccagatgtggtatttcttgtggaaatagcatacggattccaaacaccacgtccctgattggtgtttgtgttgggaggattttgagatcttgaatctacattgttagagagattgggggaatattgtggtttgaaacgagaaccacgattagtagctaaattcacagaatcaagttctctactgtgattctccatacgatgttcttgagacaaaagtaaagtttcaatttcagccacagagtagggagaatttcttgagttgacactaataacaaaggtgtcataagcaggaggcaaacctttgaatatagcagcaacatgctcttttacagtgacaagatggccaccagataataattgatcaacgatagttttaatacgcagcagatattcatttacagacaaggaacctttcttttgattttgcaactgagtagtgtaaatatcaatcttagcagaagtttgagtcacgaaatataactccaaggttttccatgtctaagtggatgtttcagcaccaacgatacgtgtgagtatcccatcggacatggaagagagaagccaagagtagagaagttgatcttgaacctcccattcagtgtatttgagattgatttgaccaagaacttcatcttcttgattcaggtacttgagaggaggttggaacgaattagaaatgtaatcttgaagacgatggccacggattgtagagagaatctggggacgcgccatagaagaaaattgttatcgtcaagtttaacagagactttgtgagaaaacacaactggagtaaaggtggcagccattaacgaagcttgaa

SEQ ID NO: 66872 - DNA, 1172 bp, Cannabis sativa
atatatttaatataataattaaaagataattatcaatttaatttaatttattttaataataaaataatcaaacaaaattctcatggatctttttatgtcactctttttaaggtccaaaatttatttatcaattttacgacaaataagatttattatttattttaccaataaataataattaattaattctcattaaactcttatttcactagaattaaaataatatatttctctctttaatattatttaagaataatattatatttaactaattaatatagtttcatcaaataaaattaaatagttaaatatcaattatacaatttataattgatataattattcaaaataataatttttacaaaattaagatttttcccttaagatatatttctcttagaaattaattctttctcaaattaaaccttcccttgtacagtgttgtttagaggtgacttgaggaccatggacttatatttcgaaactccaattcatatttgatttataaaactcatcaatagaataatcaggtttattattactctactataaatatggaattacaatctttgacaatgtagaattatatttacaaaattcttacttgtagtccattgatataatcaatataagtagttcgctcttcaattattagttcataataagagtttgtcaaaattactatgttacctttctaattatctcttgattccttgtgtaccattaattcaatgtgaacagttattcaataacgtattatagatttggatctaactgttagtactccaaaattaatactatcagagaactaatatttgacttgctaggaaagcttaaattctattattgtataacacgtttccaaccactcatgttattaagctcccaacatagaagttttaagaatcatcttctcagaaaaactttaacatgtgaattaaagaactcaataaatacaaataagagttcatgtatactcaggattcaaattgatctactaatgatcgtcattgtgatatgaataactatttcatggtaaatgatattttaatgaaagatgttattacatatcggtcaagtcatgtataattaaattatacacaacatatttactacatgtctatccacgtatgtgatctgaaaattttaaatcacacacactagagtatagt

SEQ ID NO: 66873 - DNA, 718 bp, Cannabis sativa
attgtatattgtattttaaaaattttaaaaattttctcactcatttgaaaacactataacttgaaataatgttagactctccttagaatttggatagactagaaatagagaggaagaagagataaggtcgggtccctccataaatcacgcttatctcatcgaatcatatcattattgcaacaaacatatataagcggccgcatgatatatgtttcttcttctttttttctttttcttttattttttttttaattaacaaagcaaacatacaaaactcatatagtcatattcataaatgaataaaaatatttgatcttctagatttaattcacacttcacccatacacatctccttttagtttgagaaatgctaaaacactatctaagttttcataaccctattagtataattattataaaatattactaattatttacaaaacatcacttataaattgttttgctataaaataccacttaaaaatttagatggccctaaacactactaggtcaattttatcatcatcatcattattattattattcctacttctctttcccagctccctagcttttctatttgtaactttttgacttatcaatcaactgcgaaaatggagttcgcaaaaataaagtgactacttttaggctagaaataatgcatgctcatactgtaaatggccgttaccaaattattctgatcagtttacttttcact

SEQ ID NO: 66874 - DNA, 4962 bp, Cannabis sativa
atataataatagatgtctcatgtttttgccttctgttttcgaattacatttttaaagtattgattgttgtgtggaggagtgggcaatgtgtttagcagcatagtatttattcacttcaagcaggtaaacactgtcttctatgttatcttctccagaaatggaaacaggagtttaatacttgtattcataattgtttgatctgcaagcttggctcttctgtcacattttccttttacaaatataataatagatgtctcatgttcctgccttttgttttcgaaatacatttttaaagtattgattgttgtgtggaggagtgggcaatgtgtttatcggcatagtatttatacactacaagcagataaacaatgtcttctatgttatcttctccagaaatcaaaacaggagtttaattcttgtattaataatcatttgatctgcaagcttggctcttctgtcacatttttcttttacaaatataataatagatgacttatgttcatggtttttgatttcaaattagatttctaaaaggtttgattgttttgtggaggagtgggtagtgtgtttgtttgcatggtatttatccatttcaagtagatagacactgtcttctatgttatcttctccaaaaattaaaacaggagtttaatacttgtattcataattgtttgatctgcaagcttggctcttctgttacatttttcttttagaaatataataatagatgtctcatgtctttgtcttttgttttcattgttatgtggaggagtgggcaatgtggcatagtatttattcactacaagcagataaactgtcttctatgttattttctccagaaattaaaacaggagtttaatacttgtattcataattgtttgatctgcaagcttggctcttttatcacatttttttcttgtgttttctcatttcattttgaaaaggttgcttgttgtagggagggcaatagtgtgtctgttttgcgtggaattttccctgtactagctcttcttcacatttttcttgaaattatatattttgtgaatgcccatgtaatttcaattttagagaggatacacattggtttactgaaagtgtcatattttttcttttgagatgtggagcacaggtgtttgcataattaggtgtctactataaaattaaaattagaaaatagatttggtgaaaatggtcacaatttgttagggattctcatttgttttcagaggtgcctaggaataattatttaagcctatcttttgaataaatttgataatataatagtcaagctagaacgataattgtgtatatggggtattttaatttgtttggtactctatttcacaatcagctgaaaaattaggactattgcttcagcaaggattatttaaaatatggaaatatgggtagatataaagttataaacatagtcagttcaccactactatagattattttcggctcctacataggatattatttcctgtatttatgctgtcttattttcccttaacaaggttttctctaaatcctttagcaagcgtttgaactgcacatctttcttcctgcctcatttataatctttgaaaccggagatactaatagttctcccacttatgcagctatggctggtttggctccagaaggatctcaatttgatgctcgccaatatgatgctaaaatgactgagttgtgtgttctcgctcgccataatctttttcttagtgttcaaaatagttacattttccacctgattgtaattatgatctgatgtcccagctaatgagttttgttgcacattaattaaattaggctttcaacagagggacgggatttcttcaaaccatatgacgaggtctttgaaacttttgatataatgggtttgaaagaaaaccttcaaaggggcatatatgcttacggtagttttcttgttgttttatctttcatatatgcatgtatatttcatttccctatcttttgttgcaaacattttcaaattcatattcttgctaatctgtaagttgtttcagttaataaatttgtatatatttttcaaggaacaatttagttggcggttgctattggggtggaattttattattttatcttggatttttttaaaaggttttgagaagccttctgctatccagcaaagaggaatagttccttttttttttgtcagggacttgatgtgattcaacaggttcagtgtggaactgaaaaactgcaaccttttgttctggtattttgcagcaactcgattatgatgtggtctagtaccatgctctggttttggccccgactagggagctggcacaacagatagagaaggtaatgcgagctcttggtgactacctcggtgttaaggttcaagcttttgtgggtgggacgagtgtacgtgaggatcaacacatccttaaagctggtgtgcacgttattgttggcacacctgatcatgtatttgacatgtcgcgaaggcagtcactttgtcctgactatattaagatgtttgtgttagatgaaactgatgagatgctttcccgtggttttaaggatcaggtttgttttttttttctctttttaaatgttgattctagtcttcatatttggatttaatacagtataattatgtgtgctctgtaaattatgtgtacttgtttaatatttgctgtgctccaaagatggctttcagtttgccagatatacgtcatattccagctcctgccatcaaaggttcaggttggtgtatcttctgcaacaatgtcacctgaagccctagagattaccaggaagtttatgaaccaatctgtgaggattcttgtaaaacgtgatgaactcatccttgaaggtcttaaacagttctatgtcaatgttgaaaaggaagactgaaagctcgaaacactgcgatctccacgaaacactggccatcatctgtcatttttgtaaacacaaggcgcaaggtggactggcttactgacaagattagaggccgtgaccacagtgtctcctccacactcggtgaaattgacccaaacactcgtgacataatcatgcgtgagttctgttccggcccctctcgtgtcctcattaccactgatctgttggtccgtggtattgacgtgcaactagtctctcttgtttttttttttttttttgaaaaagactagtctctcttgtgataaactacgatttgcctactcagcctgaaaactaccttcatcgaatagggaggagtggtaggtttggaagaaaaggtgttccgatgaactttgtgaccaaggacgatgagagaatgttgttcgacattcagaagttctacaatgtggtcgtgggagaggagctcccacaaaatgttgctgatcttcacagaagatctcttctatttctacgtagtgggctataaatcattttgctgatctaccaactactatttatcattgctcttctctcatattcccatttactagtgtcctaacttaatttttgaagatcatatatgaccactttaaatcatatgtctctttgccccacttaaatcgtactgtttcaaattttgtttccaatttaagctttgcattgtatgtttaatttttctggtgaaattttttatatggaaatatatgttttcctggatcttatgtatttttttcatactgatctgcttcatctaatcgattctcaagatatgcttcttcgacaacaaaaaagtctcttttatatcttgaattgcataagccgtcttgtggattttaggttttagttcgatcataaaagtatactaaatgtttacacgtatatggttgaatcttggagtttaagtatgcctagtacaaagttaagatgtcatgatttttccttttttattctttttctaagtttcaaattaaatttgcttttattgccatccccaacctactttccatcttccaatatttgtttttcatacaaggactgaaatgctaaagaaatatggttagtttttcagttcttctttctcaaatttatgataatcataaatgcgcgtatgagtgtcaactaaaatgattggtacaccaattatttcagattaaaacttttgattaataatttactttaataaaactaaaaattaaaaaattaagacatttactaaaatgaagtgtgagaattagaaagacactaaaaattctttaaaaagaactatcaaatctgtggtgggtaaacaaagataatacattcataataaaaaaaacagatgaagattatggcacaatcaacaccactcaaattttctcattgtcacaacaacaaagccaacaatgcatcaaatacccaaaataaaaaacttgggggagtcaatgggcagttgtaccagtctaaaaaagataaagaaaatttagtgtagtagtactattagtataggagtagtagtagtgttgtaataagagaggtggtcccctcaacaagctttcaagtctcgagtctcaaccgcttatttttcacagacaaattttatctctgcacacttatttggacaccttttgttccctcccttttcattacaaatcaatctgtccatctccacaatttcattttattttcccatgtcaaagtttgtgattctatcacttctatgcatcatatctagattgatgattaagatctgaactagttctagttttgcacagaccaaaccagaaagaccctattggttgttttagtaaacatttagtttgttatcataccttttgtccttgcattttttatgggatctctctctctccctcttaaaagttgtaacagtcaacttgtaacaataattccacgtgtatgtaaagtgaatggtgagagagtcaaagaaagcagcaataacaatcgcagccatctaatattccacaacctcctcgtacaaatttctaactcctcactctattattaattaaagatataataccaaaattttattatttttattattttaca

SEQ ID NO: 66875 - DNA, 1016 bp, Cannabis sativa
ttttttgatacctaagtgatattttgacatcacttagtctatttttgtgttctagcaaagctgatcaccaattctcggagatgttactgttctgcggaaatgggagactaaaaactacccagcttccaagtaaatcaccttgtcggaaaagtgaaataatgaagttgtgaatttaacttttctggcttcatggctctcaattattatgaaaaactagattaatggtcaagaaagaattagaattaaataagcaaaacccagcgcaccaggccacatgtcaacctgggcgctaggtgcttatgcttattcttatttcagagcttccaggatgtttatgtttttttgatacttccaaggttctagaacttgaggacaaggtctcctaccccttttctgaccatttcggagagaattcttagaatagaatttgcatttgaatgatcaaaaccaacacaccaggttgattatcaacctgggcactagacccaacaccaggtcaacctgggtactaggctcagttttgattcccttgaaattgttgttttctacccaagtttacttgtatcttcattatttctgatggcaaaaaaaaaatgctcgaaacacttttccaaaaaactaattagaaacaacctaggttcataatatgtcaacttgggcactaggtctactttcaggccactttgaagtttcatttggtccttataaatagttgaatcttaatctttgatgaaaatggagaatatagctagaagacttttcgagaaaactcctcaaaattggcctaggttgacaaaatatcagcctaggtgctggtcccttgtcctgacacccatcatgggttgtttcttccccgtaaacacttgattctacaaaattccttgttggacccaaccctcttggtctagcttggctagaacttgtataactcatcttcaaaactcttgaactcatggctgaagcaaaaccgcataactagtgcatgcacattggagcactcgtgagccaaggcccag

SEQ ID NO: 66876 - DNA, 926 bp, Cannabis sativa
  modified_base (859)..(873): a, c, t, g, unknown or other
ttttacctaattattttaaatattaactgatttttagtttaacaatcatttaaaaatatatatttttaattttaaattatatacatgcaatgctaacataataatggtttgttcgtcacttaatatataacaaaattttactaagtaattaatttataatatgtaaatagtttgaaaaatggaaaatttaaggggacaataatatagagatgaagaaacaaaaaatactatataaccttagtctatggaagagtcgtattgactttttactgctgttagtctatggaaattgtcaaaaaagtgtatggttggcccactttgaccacaatcattctcatattaatatcaccttattttttattaaaaatactaaaatcctaaaacctataacgtgtctgcaatttgaagcagaaccacttttaatgtagccaacaaaagcagccctgttacaaaagcatgcatgtcagtcatgtcacactcgggatttttgtttgttaaattatttgttctattttgttttttttgttttttttttttttgaaatccttgttctattttgtttgcttctcgatcatctccattacctgagattttatacacattcccatagtatttatttagatttatatagactattttttctttttttaatttggaagtatcaaataaacttgaagagagatattgaaaactgttcaaatgtactaaaggtttcatacattacaaacaaattacataattatatttaaattgttgccccattgaccactgcatacatatttaataaatatatatccaactttaaaaaatggtcatatatatatatggctaaatagcgacataagtacccaaagttttnnnnnnnnnnnnnnnataaactcaatgtttattttttagcggcgtaagtacccaatgtttataaaact

SEQ ID NO: 66877 - DNA, 2143 bp, Cannabis sativa
gtatattcagctccaatttggagctttgaatctcctttctaaggtgttttctaattcaacgcacatgtgaaataaatcgttattttaactatttctcatggctagaaatttccttcaagtgtctctaaatgtaattatgttatttaattacatattatcaaaatttgatttatttattacaattcatttcaaaatgcaattcctttaatgttataactatgtgtttattacattatatgacatgtaacatcttttatgttataaaatatataatttacatatcttattcacttaataatatatattttattactattttaatctcaatattatattatttacaagttcggctttgggctaaggcatgctaattttatacttagagcctatctaaatctagagttcaaaatttatatggtatacttttatgcactgaaaaaaaataatatttttatgaaattttatgaaaaataataatactcacactttattcatttaatatataaaattcttaggtccattattatttagggcccaaccctaattatttatttaatatataaatcatatactaaaaactcaacaagttgttcataaaacaccacctgaagattaaaaagagaaatgttaaaagacatttttagtgcgtagtatctttgtaaaatgtaatatcgttgatgtaattagtgcaactcaatattaaattttatttattttatttaataatattataaaagattattaaccaattataaaataacatttgtaatactaaacactgtgagaatgatacctgtaatgctcattcaaaaactatggataataatcttaaaaaaaactgaaaactatgtgtgagtttttcagtccaactagccaaatagctgtaaaccacactaaaataatctacataaataccaaaaatcagacacatttgcattaaaagacaagttcaagtaattcttttattattattattaaaaaatacgcgtttcagtgtaaaatagagaacgcgttagtatatttaaatataattatataaatatagggagatgattttgtctgtactttgacggattgtaatccgtgatatatggcagccgtcagataaaggagttatttgatctgacggttgaaattgatataggagtaattggattaaaaagtaaaaacgtacctaacactcatttaatgtaccctgaaacccatctaatgtaccacagaatacattcaataaaatacatcacggcgacaaaatcgtattcctataaatataataataattagatatgacagaaaatttccaaattgaaaagctgaaaaaggaaagagacaagaataaaaaaataaaataaattaattaactgtgaaaaacggtgcgaaaggaaagtgccagctgtcaccgtagtatggtataaattcgcgggacccacctccaccgtattacattccattcatattctgacacgtgtaccttcggaaaataataaaacgccaaatcagctaagagccagctgtcaccgtttaattttagtttggattcgcgggacccacctccaccgtattaattaacttccatttatatgctgccacgtgtatacgttatacatatttttaattccatttaatgatgagaataattgctttaaacagtggaaattttatttaatttaacgatataatgattagtgataaattattattatggaatttaatttaattttttttttttaaattgctgcaataaattttataaaaatatataataaaacattttaaattttgggtaatcatttttattgatgagtccgaaaatagaaatatttgaaaagtaaatgagaaaagattttatgtccattcgaaattaatcttagccaaacagaaaactgaattggattagacttgtccaacaaattcaacaaacataacttaatttatataaaacaaaataaataaattaatttgaagccatttttatgtttgttattttacttacatgtttctaataatttctatgaattttgagtgtgaaaattaaagtaaaataaacaagtctttgatgtgaatactaagttattatgatattatctatagtatagttatatataatttcttacaattttcttaaaaaaattaaataatttaa

SEQ ID NO: 66878 - DNA, 1489 bp, Cannabis sativa
tttaccttgaaccacgagcatgtttgattccatatgaatatgtaaagaaaatagtatgtcttcataaggttatgaagttcattattcagatagggaacaaaagttcacctctaagttttaagaaagtttcctaaagaacgttggtatgaagctgaaatcagtacaactatccaccctgacacagatagctggtcttaaaggacaatttagatactgaaggatatgttacgagtttgggtgatggatttcgaaggttcatgcatcatatatttatctttgataaagttttcatacaacattagtaatcagggtatgatgttggatagtaagaagtaccattccccaactcactggatgaaactggggataggaaatatcaaggtccaaactaagttcagtgaaccagtgaggctataaagaagattaaagccatgatgctttctcatcaaagcacgaaaaaaaagatatgtagatccgaagctcaaaaacatagaaatctaagtaggggatcatgtcttcctatgaatatcaccagtgaaaggaatgaaatccttcaggaaaaagggcaagatatgctctatatttataaggtctttggagattctagagaatgttagattggtagtttaccgtttagccttgcctccagcattgtcagcagtacataatatattccatgtctcaatgttaaggaaatacgtttcagaccggactcatatcttgagttgtggagctttagagctccaattagacttgtcttatgaaaaacaaccattgaaaatccttgataagaaataaaaagttcttcaaaacaagatcatagcattgttcaaagaattttggaaacagtaaggtgaatgaaaccaattggatttaaaatcagactgagggcttagttctcgaagttgtttagattagattttgagaatgaaatcctcttaacgggaggataattgtaatgaccgcatagttaatatgggaattaacagataattaaggattaaattaataaagttattgttatgtgcttcttagtagaaagatatggattattgtcagaaataggccttaggaaaatatttttttcaattacaatgatatatttgaattttatatgtatatgtatgttatatttgaaattttacaatttttatattttatactcagtagcaatggaatgtcgtcatttggccaatagagtcacttagatgcgattaagtatcttaaaattagcggggcaagatagttatatgtttagtaggggtgttctcggtacgggtggtgtgatttttgaccattttttcaaactaacccacacatgcaatttttccaatttcccaaacggcacacacaccgtgaaactaaaaaattgcaccgcaaagaacagtactgtgcggttttgtagtttttgcagtttggactataactaataattaaattatcacaactacaataaagcttcaacaaaacttgtcaaaaatatcataag

SEQ ID NO: 66879 - DNA, 892 bp, Cannabis sativa
tcacaactttcttatttttagttataaattttgttttgactcaaagtaagattttttatagtgtcatgtgcatgccgaactcctttctccaccaaatacaaagatgcaaggggctccctagctaccaaagccaccaaggaatgagcacaaaccactgggacccgatcagctccccaccccacgtgtacccatgtctgatcaggtctgctcatgtaaagggcacgtgctattggatctaccatcttaagatatagtcaaaaaattataagttgaaaagatatctattttttgaataataattttattattatttttatatttgaaatgtaacttaataacttggattaagaaaagatataaccaagttaagaaactctagcttatataatgtaaacctatataatgttatgaagtcaattgtaagggggctctcttacgctcttatttcaaaaactcgattgagtactgaactattggagaatataactttcgcgaaaactcgtttcaaacattaagatcaataaaactctaagtggactagtttattaccgctaaaagaggttgaaccactataaaaacattgtattggtcatcgttaattttcctttctataaattggtttatactttgatatcgacattcacttgtgttcatcttgctcatatcgcaaaagaagtcaaaacgtgttgtaaacaatgtcgataaacactactacaatttagccttttagtgacactctttagtgacccacgtaaaagtgcgtgtcactaaagagctaggagtgatttttagtgacacgcataatgagactctgaacaatattcgttgttagtctcttataatgtgtgtcactaaaaatatgtagtgtcactaaagagtaatactcattact

SEQ ID NO: 66880 - DNA, 1165 bp, Cannabis sativa
tgaatttatacggatgtgataattagcgatatagtttacttatacttgtataagtactggaatatcctttttgagcattagcaacgtaaacttgtattggatgtattggctatacatcagattggaccgttattgatagtggaaaagatatcataaacataacgttatgtcctttctaagttgacatcacttagttgatcttacgtcaattgatcacaatccttagatggttaagctctagcataattgtactatacaggttctttgacttattcgttaccccttacccgtaggactagcccatacttacatcttgagaattcaatagtgtatagtgtttattaagagtgacattatggtcaatggtatttttgggtatagactgatgctatcataacagtgtaaatatcttgcgggtctgcagcgcgattataatactagtagtggctgatattctgataaatcatatcattttcaagaacgttatgatttatctattaggccttgtagataggtgtatgggtgcctaaatgcaagtcggtaatgtatttatgtattttatgcttttcttactgagtttgtcgactcacagatatgttgcatgtgtaggtaaaggaataaggctgaacatcaatgagtccagagctttaggatcattttacatatctagattcttaagcttggagtgttcagtttcaggacaacatgggcttatattttgtagtcgcaatgtgatacttttggaaaaatatatcttgtatattattgtaaacttttaaacgggattccaaaagttatgtaaagttaggtatttatcaatgtttatgtttaaatttcaatgttataatttatcacatttttcaagaaatcctttaaatagcaaagacaggcatagtaattaaaaaatcacgatagcgtgcctaagcaagtagggtgttatatgttttgtgtcgcgagtgagggaatcctattgtgaaaatacattgttgtcttaaaagcttcatccccaaatttaagtggcatagaagcacaatcaaggagagttaatctattttcaactatatgcatatgctttctctcaactaggccattctgctcatgtgtggtaggacaagggtgtctgtgtaggatcctgtaacgccctaatgctaaggcacgctacagt

SEQ ID NO: 66881 - DNA, 1570 bp, Cannabis sativa
agctttaatggcattttccgtttaagggctcaattttaatttctgctacgtaaggatttttgtatatatggtatatatgtgtcctgtaaagtttcgaacgatttggataggtttcggtaattttttgaatagtgcaaaatttgagattttcgtgtcagaaaatggtttgccatttttttgaaattctcgggagatcagaaatcgtaattttgtcataactttttacttggggtgactgttttagacattctatatactgttttgaagcttacgacaagctctacaatatggtgtatattttagagccaaaatataagtttgattttagtgtatttataccacgaaattcggtagaaaatcctagattatatgataagtagtgttttttttgggatagacacttattggtttacattgttgtgacataaggcttgggatcttcgatcgttctccaagaaggtcaacaaacatacctgaactaaaacttaaggtaaaaaaaagtataatgtaccacatggcatgataagtttcgaaattatcgattgtctgattaggcaatgacaaggtgaatgagatatacaagctcacctgattaggtgacgtgccatataggtgctaggttatggcacaagcttggctaattaggcaatgtgatatacaagctcacctgattaggtgatgtgatatatggatgacaggctatggcatgggcttgcctgtttaggcaatgtgatgtatggataccggtattcatgttgttcctgtgaggcaatcgtcataaagtcatgactctaaattgaaagtgttgttaggtttcttcttgttggcaatgtctgattaggcacgggcggtaatgacatgtgagtgccagactatggcacgggctcgtctgattaagcgatgcgatacattggtgccaggttgtggctcgggctcacataattaggtgacgcaatgacattatgtatgatgccaaattatgacacaatcttgtctgattaggcaatgcaatatatgatcatttttatatccatgcatatggtttgttaaactacccactctttaatgttattatttaatcattttataatagtgaaatggataatttgttatttcatgtattcttctttgttacttttctttctaagtctttatgactcacgggtgctctatggtgcaggtaagggcaaggaaaagttagagcaggtatgaggtgacaatcttctccaacaatgtacatattgaccccacccgtctgtgtgccaagttgccaggagttgttttggactgtatctgttgcgtatcttattttttattttgaattattgttttatgtagtccttttgtaaaaattttatcagaaagatccctagaacatgtttttagtgtcgttatgatatccatttttagtgtttttttttagtaaagtttttaatattatcacagatttgaatgattaattaatcttttagtattaaactaatttataaaatcacacaaatggcgtccctattgattagggcgttacaacttggtatcagagaagtcatggttttaaaggtcctgaaga

SEQ ID NO: 66882 - DNA, 544 bp, Cannabis sativa
tagtacaagtttgaaagaatgggggttcgaactcactgggaacttcaagaataggctgaagaaaagtaaaaattgaatggctgccatgaagaattcaagcaaccattttgccactgctgaatttgatgaggaaaaaaacaattattttgagattttagctcaacaagaactctactggaagtaaaggtctaagcaacattggcttcatttgggagacaaaaaaaataaatatttccacgcctcagccagcataaggaaacgtagcaaccaaattatgagattaaaagattcaaacgacgactggaaggattgggattcaggtctgaatgcggttattacagattattttctgctctatttactgctgctggaactatatgtaacagtgtggtggagaacattcgatgctctgtcactcaagaaccaaatgaagatctccttaggcctattcttgttgaggaagtagcaagctctcttccaaatgcatcctgataaagctcctggatcggatggtatggggccgggtttctatcaacaacactag

SEQ ID NO: 66883 - DNA, 739 bp, Cannabis sativa
ctgacctcatcagaaagccttcacttgatgaaatacgaactaccctgtttgccatgagcagtggcaaagctcctggcccagatggtatgtcggttctgttctttaaacactattaggactcggtggggtttgacttctgtgatgcaatttccaacttcttcataactgggcgtatgcacaaaggaatcaatgccactaatatcgtcctgatccccaaggtccagaacccgaaaagacctaaccatttctgcccaatttctctgtgcaatgtggtctacaaggtaatctctaagattattgctaataggatcaagcctttgcttcctcagattatctgccctacccaggctgcgtttgtaccgggaagagctatacaagataataacgtgatagcccaggaaataatccactccttcaatagaaagaaaggcaaagaaggtttgtttgcaatcaagatagatctaatgaaagcttatgacaaaatgagctggggatttattgagcatgttatggaatgctttgcggttccccaagagttcagaacatgggtttctcaatgcattgccacaacctcccttaacgttttcctgaatggaggatctgttggcaagatcattccctcattcggtctcacgcaaggtgaccccttgtccccttaccttttcatctggggagcgaaaattctatctagacttctggaggatgccctgaactcgaaaaccattagtggaatcaggtt

SEQ ID NO: 66884 - DNA, 1517 bp, Cannabis sativa
  modified_base (47)..(67): a, c, t, g, unknown or other
  modified_base (115)..(152): a, c, t, g, unknown or other
ttattaattcttcgttgaatcctcacatagaactcagaattgcactnnnnnnnnnnnnnnnnnnnnntatgttccaccatatagacacatttttagttatccattgttataatcnnnnnnnnnnnnnnnnnnnnnnnnnnnnnnnnnnnnnnctgtaaagggattagattaccgcactactacaaaatttacatttggcaacacttattcaacaacacttaataaaaaagtgttgtttatttgattatatttgtcatttgacacacttgaaaacaagtgttgctaaataactctcatattgttaaacttataattttaaaattaaatataaacaagcaatagtaacactttttgttaataattatagataaataaaaaatggtaacaccttttataaaaacgttgctatatataatatatgatcctaattttagttttttttttcgaaataataatctaattaatatcaaaaactgtatatttatttttgctttaaaaaatatatattatgtttagtgggttgtaacttctccaacttttattgatcaatactttaacatagctatgacaagacaacgtggagaagagaacaactgttcctctttttaataaaccaccatattagatatcaagctatcattcatataatatccagtaagaaaaacactatatatcctccataattttgttcaaaactctcaaaataccaacactatatatatagaggtgttgtggaccatttcaagagtttagcgtcaagttataattaagctctctccatttcttttctacatagaagatagtgatgatggtgaacttttctagaattatataaattttatgctatatatatatattttttactaccaccaatgtaaatacctaatattgtagtagaagatcttatattgtttttaaattttttattattttgttttatttttgcagcgctcataaaaaggagaactatatggtgctttggactagcgaatagagatgaacatcttcaagctttcaaagaaaaataaagttaaagaatcaaaaaaaaaaaattctagaaatgcatatttggtttttgtacgaacaatgtatttaattgaatgatcttgaattatatgtactaaatttgtctcgtaaacatgaattttattgatggaatatatgtttattattttttctttctaattcacaaaatacaatgaatctaaattcaaaataacacaagtataattaaataataaatatatttaaaaagtaattattaattaatattgataaataaagaattaatatatcattattaatattgccataatagttacttaattatattaaattggcaacacttttaataaaaatattgtccaatatatttttgaatttgcaacatatggtaacacttttataagtgttggcttatactactacctttggtaaggcaacacttttaaaagtgttaccttttaattttctttaattaaaaaaaagtgttactaattgtattttttctagtagtg

SEQ ID NO: 66885 - DNA, 797 bp, Cannabis sativa
atatatactttaatatatatatatatataatattttaatataaaaataataatttaaaaatctaatacgtaatataaatatattttaaatttttatagatcaaatgtatactttatttttacatatataaaaagtataatttcaaacaaaattaaactattctttttccatacaattttttattttttcttcctttgagtcagttatttattattaaagatataaaacaaaaataattttttttgttattaattatgtgaaaatattaaataattcaatatttaaaagtaacaaatttaaaattatcaatctaatctacactattatactattgtgtggattaaatttgaattactgtacgaattgaattgaatctaaaatataaaattcgcacttagtacagaatggatgcactataaataaaatattagtaaagattgaatcaacattccaaatccaaatacaaggtcaaaggtcaaaataaaagataaagttccaccctgaaattcaaatagggaacataaaccaaatttaaaaaggaaaacaattaatatttaagtagtacttgaagataaatccaaaaagttaatggtacaaaatacaatgtcaaggacaaaatcactgtttattctaatagtgatgatgatagtcattaatactaatttgattttaatacgtacatttcattaaaaaaaaacttttggtgtgatttcctttaaaaataagagaaacatctcatgtaaatatgattattatataattctttttcactaaataaatataaatattatagaaag

SEQ ID NO: 66886 - DNA, 958 bp, Cannabis sativa
ggttgtgcttctccggccccatatgtggtgaggcggcgacttgttgttctgccttaaatattgcagcggataaaagttgtatgtttgtgatcgtggaaagtgattttacagtggttatcgacactctgaatgggatgaggtctagttaggagattgataactacacttgccattgtaaatgaatttcctcctctttcattgttgtatgttttcttaaattatttggacttgtaattttgcgatctatgatgtggcttggtaggcatatctatgaatatcctccatatttatgaatattttatgtaacgaccttaagtctaatttttgttattaatttaagaatgttttattttttttattaaaagaaattaaaaatatatgagttttttcccctaaattaaagagttaattataagccaaagttatatcaaacacgatcttggtattatttgtttttttccctaaattgcaaaaatattagctcaaacataagtttaacgccatctaggagaaatgctattacgaatcgaggtgacgttttgcaaataattagtgatatttaataataattattaaattaaaatatatgtaatttaatatttaattgcactaattattcccaacactattggtcgcaataaaaacgcagtgcttggcttcatcaagagcaaaatcactgctcgaatacatagttgggatggtaagtttctatcacaagcagggaaagaaattctcttaaaaacagtcattcaatcgctgcctacttatgcaatgagtgcattccttctacccctctgtacttgtaacgaacttgagaaacttatagtttttggtggaagacaaaaacaactataggtcgcgacattatctggatgtcatgggattgttcaacaactcctaaagatcaaggcggaatgggctttagacatctcagtgattttaatcttgacatgcttgc

SEQ ID NO: 66887 - DNA, 989 bp, Cannabis sativa
tagtagctatcaataataataatactaaattactaattaacaacaaaaataagtacaaaattatctttttttaaataaataaataaaattataaaggggtattcatattgaagatttcacatagtggtatttaatggggcattcatattgaagatttcaattatggaaaacaacatagattagagtttatattgtgttttcaatagttttttatcatgagttttttggtacttaagaaatgaaagctaccttaaaagtgtcattttcgcaatagaaattggttcctaattaaagaaattaggtaactgcttgaattgattgaatcccgacattacattaagatgagtagattgagagtctcagaggcactaaatcgattttacctaattcagaaagaatagagttttacaataatattgttaattggttttacctaatacttcttatcatgtactatcctattttctaaacatttttttttttttttacattttaagatagtttggtgttgtgggaaaaaatgaagttgtaattttggtgttgtagaaaagatgaagtagataggattaggttaaagtactccaacatatatctttgggagcaaaagttaagaaagagacatgtcactccacttgatcacttttaatgcacatttgatgttatataaactataaatactatacatcttattttattgttatagaaagtcacaaattgttattctttccgaaaagcataaacaactaattcatgaaatacagaaataataaacaccctaaatatctgaataacaaattttcaaagaacttctaataacgatttaaatttttatagtagaaaactttcatagcgaaatcaatcataatcatagttgcttaagactaaaagtcttagtaagaggttccaatataatgtgattatgatcaaagtcacccaatttgcttgaaagacttttttccctttcattgcaaatagtaataataataatg

SEQ ID NO: 66888 - DNA, 872 bp, Cannabis sativa
tttggaccttgtgttttgaaaaaaattgttgattggccctttatttagttaaatgataaaatagaatttgtattttacaaaattgtaaaaataagactatgagctcaattttcgattttattttaatataatcaacttgaaaacaatttctaacacgaacagatacagaaaatataacttgttttgttataacacttctagatcggattattattaagttttattttgataaaaaaatcagtttatgatcatatttgtactatttgggaaaatacaaagttaattttattgtttaacaaaacagatagtccaattagtaactgtttttttaaaaaaaaaaaaaaatacatttttttaacataattttaaaaatcacatttaaagtaaaatataggaacgataactaaaaaaacttaaacttctctaataagtacataaaacttatgtcaaacaaattaactttatatatatggatatagaaatttgtctaattaaacaggttaatttcccaacaaacaagtctaaacaattttttaaaaaacaaaaaataaaaataaaaaataaattaactaataattaataaaaccctagctagtgcaaataatgatgaaatttttgtgagggtttcagcagcctatgtaagatgttgtggtgactattatgaaacctagttagctattaatatgttttaattaatatttatttaattactagctgtttaaaagttaattgagtggattttgtttaataataaattaaagaaaaaaaaatctaatgttataaaatattgctacatttacttttgaagtgcatataattagctgatgaaaaattacatgttaattctaaaatttctttctgggttccttttt

SEQ ID NO: 66889 - DNA, 768 bp, Cannabis sativa
gtacatgagatgagatacatatttgaaaaatcaatggtcccaaaagtattggatcaattaaataataatggtacttgttacggaacagggtttattcataaactgttacgtgtaatagtgttatatccaaagcataatccacgtatattccattatatatttggattttggattttggatttggaacccctgaagttgatatatgctgtcttatcaagaaatcattatatattcttatataaaatgttggttgtaattgttgtaactgtatagatgggcataattggagagaaactggaaattgagtttgtgatatccacgggtgacaatttttatgaggatggtctgactggtgtcaatgacactgcattttatgaatctttttccaatatctacacagctccaactttgcaaaagcaatggtacattggtaataatcacaacttaatttgttctttcaaattcaattattacatttcttttcccattctagagttttgttttcaaaataattttttttttttttttgtttatatgaccgggctcgattttgagcataagcagattagacttgtatttaaggcggacttaatttagaggtccaaaaaactttttctcctttataaactaccattttttataataagtctaaaaatattttttttcttatggctcactaaattttaaaaaatcccagtaactaagtgacatgtatagttgcaacgtgagaagatttatttattttgttgacattaaacatataaatat

SEQ ID NO: 66890 - DNA, 687 bp, Cannabis sativa
  modified_base (411)..(415): a, c, t, g, unknown or other
tttttctttatttaagcgtttatatattacacaatgtataatctaaaactcgaacacaggatctgcaacatacatacaccctcctctgaccacttgagctagcctgaagtggttatcaatttttttgtttaattttatatgatcatttaataaaaaaaaataaaaaaaacattatttaaagatgcaagaaattttcgataatcttctataataatcccaaaagaaaaaaaaacataggtaatcactacaaaaaacagttatttttagtaataactttttagtcacaacataatttttttgtgattaaatgcgagttttaatcacaacaaaaagtttgtgactaaaatataatatttaactacaagttgtcactgatttagttttagtcgcaacaagtattgtgactaaaannnnntttagtcacaacaaattgtaacttttgtgactaatacttttagtcgtggacttcttagtaacaacataagaatgatgatttataattagtcacaagtttttttgtgactaaaagtaagattttttgtagaatgaattttgaatagcttggactactactaagcaatcggactccatctccactttaggtcatagttgagttttaatctagcttagcgcttaaccaattacttcagtcaaatccggagcgcctataccaacaaaagtgtccaa

SEQ ID NO: 66891 - DNA, 1545 bp, Cannabis sativa
  modified_base (29)..(31): a, c, t, g, unknown or other
  modified_base (280)..(281): a, c, t, g, unknown or other
cggctaaaaaagttcagggggcacgattnnntacatgtcaaagttcaggaggaaaaagtactaattagccatcattatatattaataagtaaatttgtaatattttaaaattaccaacttatttaaatgaataagtgttataattaaaagtatataatataattttctcatattattactagtataattaagtacaataattatctcatataatttaagaaacattgatattagacaccagtggtgcctagcactttctcgacatgtcgcattacgattnnctagcaatactctttaaaaactattatattaaattatataaaatacaatatttaattaaactaataataatattgacacgtacaaaaatagtaaacaccactcaaaccccttaacatttctctaacttaagggagtaagtttcaaaaaaatattggtaacaattataggatgtcagccaataacaatactcaaaacaaaatatgagcacgaatctcgagggtacgctatatagacggctcatacgtttgagggcccatatctagacttcgcctcatccccgctccattaacttatttacatccaaaaatataataataataataataataaatcattttcattttatttttataaaagaaaaaaaaaacagaaaaaaaagaaactgtagacagagacaggtaaaaccccaccctacaacacacccctccttcagaacccaaaccaaaaaaagttaataaataaaatcatcaaatttcttctactctccaccaaactcttctttcttcattggattttttttttctcggattcagcacttagggttttcgtaatctctgtttggcttgcttttcctggtaagtatgggtttacttacaggttttttttttttttggttgcttctatggtgaatttctattttttttcagttcattttttactttttgaatttatctgattatcgtcactctaatttgtactgatttttttgtttgtttatacttcgcactggttctcagttgagctttagcttcactgattttgcttgtatttttggttgatttcgtttgttgttgctcttgtaactgtgtaatcgagttgcttttatagggtttggggtttttagatttttagggctttagtttctcttgctaacaaagactcacttttagaaattgttactgattttgtttggttatatatagtacgtagtacttttttccggggagatttcaaaacatgataatttacattcatggttagtctttctcctttttataaatgctatgagcgtctaagcattcacagtacccggtgagtgttatttgatatggaaatgatttttaaaaaattcttgggaacaatataatatatgttgaagaagtaagacagtgtgactggtttcttgcaatcttgtttcgaaatgataacagatcatgatgacttcaactgcttatggaaattttttataaaatagaatgagactctgttttggttggtaatgaaaattcattacaattacaagtaatggttacattctaaatc

SEQ ID NO: 66892 - DNA, 932 bp, Cannabis sativa
cagatttctgagtattttttttcagggcctctttcataagagttttttcctccctcttttaatattatttgccactatttataattgcatagtggcagttaattacaaaactgaccaaaatatgattacagtcattatccctaaaatcgttggatctgattacatatcgcgtattaaacacgtctttaattgttgaatctggagatgtctcgacagaaacttgattgtagtaatcccaatggcgacttggaaccattcttctttccgaggtcgacaagatatgtcttacgtcgatcgcgagtatacagaaattttctgacttgtcagggttatgagcctcactcctattagttggatgaaactataggaagttttctcatagcgagatggtcatctctatttcttattcttcgagtcgatctgacttttacacttagtttgcttattgtaagctaaggtatgtgttacttttcttcggtgcctcgctattctccttcagcgacatatggtttcttgttaatacactaagttccaattcgtacactgattcctcgcccaagacctttcagtcagcgggttacaaatatattctcatacttacgccattaacgtgttattccataaaaaaatattgcaccgattcacattccctttatcttgacacgtgtcctccagtcgaattttaggtataacatcttctattagtcaatttttcattggtgcttagttgtttcctgttgtagatagacgaagttccatatgagattttaaacttatagaatttgagcatacttgagcctagaatttccttcaactaagtccactagtaacgcaattgccactaagaatcatataggggttgtttagtatgcaggactggattggattaggcagactaatttgtccaatccagtgtttgggcatgttagaag

SEQ ID NO: 66893 - DNA, 589 bp, Cannabis sativa
  modified_base (180)..(187): a, c, t, g, unknown or other
atagttaattataattaattaaatttaaaaaaaggaaagtctacctattagttaaagaaaaatgtaaccatatgggtacaataaaaatgtaaccgaatagtcatatatatatatggaagatgtttcaataaaagttaataacacatatagttttacataaaaatattgtataaaatacannnnnnnntaatattatacaatacaatacggtgtaatacgacgtaccaaacgaacccataatagtataattaagtctaggatttaacagctaaactcacactcgtacttcacaccacatcccaaaattttgagaaaaaacacaaaattgaaaatttctaactatttacataaatccctttattatcttggaagtgttttcaattaagtcctcttctaatacccaattaccttgaagagattgtcgatcacctatgtgctactttattttttaatcaagtgttacaaatatcaaacttacttttactcaagtgtctaaaaaaacttcttttgcttaactaaaatgtgacaattaattaataaaataaaataaaataaatatatttctaaaattctcattcttattttttct

SEQ ID NO: 66894 - DNA, 1266 bp, Cannabis sativa
tttttgatttttaataaattaaatgaagaaattattatctttaaaaactaatggtatacatgtataaatatatattttaaaatatagtggattgtaataatgatatttgaatgattttacagatatgtatttgttgcaagtatgattagtttatcatcgattatatcagatactttttgtacttcatcattgagaaaacgaccccacatagttaaatatattgccttgaaactaaaaattaaaaatatttgataaatttagataatttaatttaatttaagaaattaaaattttaagaaaagtagaaatttagtttagtaagtttgtttcttacctcttatcaattagatatatttctcggattctttttattccatatgttgttgcattttttgattgcttgagttgtattgcgattgctaatatatttacatatttaatgcttaaatatttaagatttaataagaaattttcatagaaagaaaatattattagcgaattaaagttaccaatttcttctttagaagacatgtaggggtataagtcattaaaattgactattttgtactcagcttgctcatttttgtcttaattttttggtaattcttctatttttgttgtagatgtaattatccattgatatagataatttttatattcaaaatggtcatgtgttttagtaacacgtgtattactttatttttaaaatgattatatttaaagtatctttctaagtgtcgatatcagattcaaaaattgtaatttttactttattttcctatagtaaagtaaatatataattatagttaaatttaggaaataaaataaaaagtattttatgtaataatttatttttgtatcaataagagttaagctttatgaacttgtctgtactattgatttataactatttattattttttatgtccaattattggattgatattgttgattatatggtttccgtattgtttaattatatcattttaaattaaagattaataaacttaaaagtatattgttacaaatatggaaatttaataatagtataatttaaaatgattaaattaaatcatataaattttgtatattaataatcagattaagaaaaataaacaaactctaatttagggcgttttctcttactttatttctcattccttgtttgtatgaaaaccaaactctttacgacaaccaaatccatccaaaccttcaacctttattcctaacattttgagttcaaacgttataacacactaactacct

SEQ ID NO: 66895 - DNA, 652 bp, Cannabis sativa
atggtgaggtgtgggcggcctgggcggtgggtggggttggggagtttcaggttgcggtagctgagcttttggctatgcgtgttgggttgcggtgggtgttcatgttgggctacaagttggtgagagtgcagactgattcttctgttgttaattcttggattatttttcggaattctatttttatgtataaaccaattgttgaggagattatttctctcttagctgttgttgggggtggttattgttgtgccattccgcgtgttgcaaatggtgtggcctacgcactagcaaagtctgttactagtttcataggagttgatttatagacaaatgctggtcttaaatttattagtgttcctataacagctgatttgatttaatgtgatacattctttctttcaaaaaaaaaaaaatttgattttgttagttttgagaaatagtcatcaatttgactattaattaataattacattgaatttagtaagtctgtgatgtactccaaaataccaagggaaatttatgtctcacccggtaaaataatgggtcaaatgaaaatgtgtgtacagaatcatttttaattagaatatgtttatttttgttttattcactatatgtataatatatatactttttgaagagaaaaataaattat

SEQ ID NO: 66896 - DNA, 1161 bp, Cannabis sativa
atatatatataaaattaaagtaaaccacaaattaaagaaaatcaaacactaaaaggagaagatgccacatcattagacctaacaacaggattatatatatatatagattctctgttctattaattttacaaattaatgttacaaaaggtgctttacaccgttgaacgtaagagtttttttttttaaattaactttaaatcaagagaatagaaattgaatgaaaattttgctttcaattgtaaattactttgcttgtgttatgtgaataatgctaatagatgattaatagagtaatgtgtttcatgtggtagagctatttaattggtttaaattagaaaaagacataggctcgaacctttgtgttatctttaccaagagtagctcaaatagtcagttacgtacctgtgtttgcttcattgctacaattttctggtccttataaattggtgaaaacacttggagatagcttgaggatttggcaaggtttattgtctaagaatttgattactcactgattgtttggtatataattttctgatggctttatttctattaacttttttagtgattgaattcttcaactgtaattagtttttgagggatcaatgtgaaatctagcttttttttcctcttgcagctgttaggagaagaagcttaaaatagcatgtacattttcatttggttctctctaaatgaacttatgaagcaaaggactatttagaatgtttaacagtataacaactcaaaagcttgccaaagttagcttattgagttttgaatctttatttatatggagaaggttattacaagaaaattacaactaatcaagaagcataatagaaaaaaaaattatacgaagtgttttcaccaaaactaatttctaactaatctttaaatgtttagcttatcatctcccctcaaggtaggggtgtcaatttgatgctttggaaaaaatcatttgatatgaatatgaaaaactaaactaattgtgtgacttggaaaaaatgataaatatgaaagctttgttaaatgactaaactcaactaggggtgttcatttgatcacatccaatgtttttaggctcatccagatccgatccaattatatattggatgttaaattttaccatctaatccgatccaattgatttcagtcatccaa

SEQ ID NO: 66897 - DNA, 947 bp, Cannabis sativa
ttttcctaaatgcataaatatatagtagtaactaaattaataaagagtatatatatttttggctaagttcttttgagctatatctgaactatttttttttatatatatataaattatgagtataaaaagctacaattaattcataactatataattttataaatatatagtgatttactgctgcctcgtgatagattattggtgcagtctattcctgttctagctcgactaacgatggataccttaaattggtcgcttgatctttttgggttgtattcagtgaagagtgcatataagcttctgcagcagcttaatggtgagtttgggttggatgtttcagccgaagataggttttggaggaagctaaaaaccccactgaaaatgaaaaatatgttatggcgtgcagcgaaaagttgtctcccaacaatgacccagctgtaatcggaaagagtgcatgcgaattccacttgtccggtctgtaatatggctctggaaaccattaaacatgctcttttatattgtccagttgcagcagctgtgtaggatcgggtgggtattggcacgatattgcagcagtagttctcttttttgggttggtgcatgtatcagtttgaaatacttgatttggataatgcaaacttgctggtggccttgtgctgggcaatctggaatcctaggaatgataaagtttggcaaaatagagttatggggatcgaaggcatcgttgcatctgcaacaaactaccttaatcaatggagtactgcaagtgttaataatattaaggtgaatgtcgatgcagctgtgtttaataattcctctactcatggagttggttttgtggcgagagattctagtggtttctttgttgaaggcagtacaaagttgtttcatggctcgatttctcctgtggtggccgaagcaattggagtccgggaggcattgagttg

SEQ ID NO: 66898 - DNA, 736 bp, Cannabis sativa
tgatgaataaaagaggcatttttcaacttacccctaaaaaatatcataatttgttttagaaaatggttccataaattcattttgatttaagtccatattagctttggtccaaccttgctcctgtgtagccgagttatattatatatatatttattatctgtaaacagaattatatttcataattaactcaaggatttgttaccttttcatataagtaatatttaatttatcttgtgttttcttgttctcagttctcagcataggaatctttgttatggcaatgtcaattgtggcagcagcattactaatcaggagcagaatagcacatgacatgaagaaactagcttctcaagacaaattagggaatcaaacagtagaggttgagaaatttcttggagattataaagctttctcaactggtgaaactcaagttgaccaagtcagcattcaatgttgacttttcttaccataaatgtaccaaccagagattaaaggaactgataacactttcagattcaagcttttcttaaaccccaaaatgattattttggatggattgtgaagagtacttgaattctattgaaacttcaaatcaagacacaaacagtgggatatatacactcataatacatagttttaagttgctagcttgggaaaatattggcattaattttgtggtatacattaatagaaaagagtactcttagagacagtaccaatctcccaatctcagcta

SEQ ID NO: 66899 - DNA, 642 bp, Cannabis sativa
acttccaaattttggcagagtctctagaaggccatgggtacaaagttgaagtttggtacatattttcactcccagatagatggtcaatccaaaagaatgattcaaattttggaagacatattacaagcctgtgtgttagattttgaaggtttatggagcaagtacataccattaatagaattttcttataacaacagctattagagtacaataaggatggctccctgtgagttgttgtatgataggaagtgtcaatctcctattcactgggatgaaatcgaagaaagaaagtatttgggtcctgagatagtttaaaagaccagtgatgccatcaaaaagatcaaggcgctgatgcttactttccaaagtaggcaaaagagttatggttgtcctaagtgccgagacatagagtttcaggtaggagcacatgttttcctacaaatttcaccaatgaagggtgtaaaacgcttcggaaagaggggcaagttaagtcccaggttcatagggccatttgaaatactcaaaaaggttggacaagtagtgtatcgactagctttacctccaacattgtcagcagtgcacaatgtttttcatgtatcaatgctaagaaagtatgtgtctgatccaactcatgtcttgagt

SEQ ID NO: 66900 - DNA, 626 bp, Cannabis sativa
tcactaatgaaagagtgaagaaaggattttcacttgtgataaatatatgtatagtgaaggtagaagctttttccatgaattcataaaaattgcatctcattcatagttgttttaagagtttaaatttttttttctgttttgtttatttgtttgattatttgctatagtagcatgatcatcttaagaaaaatgacaacttcgcttgtatctaaaagcaaatctattttaagaggaaccaatatgattttgtggggtcataataatactttgaattgaaaatttaaccttttataaataaatggttttgataatgaaaattaatttaaataaaaaatcttggaatgtaaagttctctatgataataacaaatatgttattagggtgcttcgagctattttttttgtcctcactagtaagagtgtctctaatttttatataataatagtgtatattgtagtaatttaaaatttttactaattaataatttataatgttaaaaataaattttaaaataatttttttcacgtacacacaaacaaatttaaacaaattattttatatttttgacataataaattatttaaaaatttattaaaattttaaaaaactatattgcttatcatcat

SEQ ID NO: 66901 - DNA, 1239 bp, Cannabis sativa
  modified_base (972)..(977): a, c, t, g, unknown or other
agagagagagagagagagctcaaaattttataaggaaaataatttttttttaatgtttaaaaattagggttaatgatgttgttgatcaaagcatcatcttattccttatatagactctcaatagagtaaggtttagagtagatgggctaggaaaaagataatggacccaaaataaaagctctagccgaatttgttggttttatagtactaaaacaggtatgcagcaaaagagttgtttctgattatcactgttcaataagcccaagatcaccatatcatatgtatatatattaaactgaaattaaatagatgaaaagtttacctcttgaaacctatcagagtatcctcgattctttttcgtatgctgtatcctcgaaacggtaataacaaaactcatatcttgatctttcaggtcttccactacacacaaggactagtgtgggctagtagaatgatagtgtatatgaagttcttgattaaatctcaacatatgagaaataattatttctttaatgatggagaggaaaaaagtttattagttactccttcttaggcttcccagaaaaattacatacaaattttttttgtttcaaaaactatatagaattttattatatggtatattacataaatacaataaaaattttatttaaattcaaactctttattaaaccttatttaattatttgaataaataatataaccgaattcgattataaatatttatattttataactgattgaatgaatttctcaactacttttcaaatttaaatatttatctattgaattaattaattaactaacccacaaaactagtagggacacctatatagatggcgcatgcactgtctctaaacacaatgcatgtggcgcctccttttgtctaaattaagacaagaaatgtgccttttgtcctagtaactttttttttcctatttaattaatttgaaaaaataaattatttattannnnnnaaataattactattttgacaattcaaaatagatttttttgaacttccatatataacttttgtcccaccccttgacagtgtttcaaggtggcgatctggggaccatatggacctataattgtaagctctaataaattgaattatttattgaatctcatcaaccaaataatcttgtttattaattccatgattactccactataaatataaaattgaattcttagtagttatagaattatttttactgagttttactgcagcaa

SEQ ID NO: 66902 - DNA, 738 bp, Cannabis sativa
aacatttattatatttaacgaattttttgtttaaatttgaaatttcactaatttaataaaaattgaaaaaaaacagcgactttataatatcttttttaaatatggattttttttattctattaattaattacttaattatatctataaatttattcttattatatatataataattatattttatttttaaatttatcttcattattatctcttaatcatctttattcaatctctaattttaatatcaaaaatatcatttttatgtttttgcagcttactcattatcttatgccttattatcttcttaatatatatggatcaaggaatcattgtgagcaacagagttaatggtgtgcctagcaatggtactgttcatgggagaggaatccagtaagttttgattatattatttttttaaaaaaaatttaatacataataaatttcatttatatatttattattattaatactatcatataatatttgtttgtaggggtgattttaatttaaataattctgaagatgaatttttaccttctagctacctcataggatttggaatttcagttcttatagttgcaatatgcaaaataagtaatataaatataaatctaaacatatatttaaataataatattttataaaaataaaattaatttattgtaataattaatttcaaaaaattgcagtgaaaatcgactcaatctcattcaaattgggttagtatattggatgac

SEQ ID NO: 66903 - DNA, 1213 bp, Cannabis sativa
tgtcttctggagttataatttattacctcgcttttcacccacatgaatcctattagtaaactaaaaaaactttctcctaacactctaccttgacaatttgcaaaataaaatatgttatttagagcaaaccctttccaaagaagctattgtaccatgattatttacgtcaattggacaacctaagttaccacattaaaaaactatcttcgggaatactctttcttagaaacatcattttttccagaaaagatgctaagttgagacatgtggtttttggtatgagttagggaataaaaatgttgcatattcctttaatctaaactcctttaaacaccccataatagtacttttatttaatatttatttttggagtacgtaaaaaattgaaaaatatcttttagctagagcagagtggcaagattttagctttagtgaatttatgatcttgtaacatgaatttatcaagaaatacaataccatttgttattgtagaattaatctatcgaatatcttaaccaatgggatttgtcctataaaaaaaatgatctttcattaataacgttcctctttaatctttcttagtcgttgacacttggcaatacgaattgttgtgtaactgaaagttgttctaatcacacactttctcataaactaatttttagcttacactgttctttctcatcaagcaaaaaaactaattgaccaacttggcatttttcaaacacaaaactaaaattttagaaaataaaataaaatcaaacaaacaaatttaaaaattaaaaaaaaatacttcctttgtgccaacacactgttattggtgtaattctttctttgaactgatatattgataagatgaaaatggagatgctaaatcagtaagacagaaaacaaacaatttggtttaaataaataccaattctttagcagaatcaaaaacataattttaattttacaactcaatatgtttcctaattgtaatgctcaaaaaacaaataatttgactttacacatagcattttacaaacaaacttaaaatattgtactgaattcataactaaaaaattgttttttatttttaaaaacaaaaaattattttaatttggctttgttttaaaacaattttaaaaaataaagttaaaaaaacaaaaaaaaatttattttttattttaaaaattaattcacttctagtcaatattatttcaaaaaaaaaaaa

SEQ ID NO: 66904 - DNA, 804 bp, Cannabis sativa
ttatattctctcaatttgttaattttaaaaaatattactataaataatgtcattaattggaataataaaacaaagaatatgattgtatgtaaatttataattatgagttatgcatgaaaatatgtagttaaattactgttaatttgattatattgtttggtttgataaagtattgtgaaatgttattaaaaaaaaatgtttaagattaccccaatagtggataattttgttttcaatgtaataatttttccataaaaatttcataccaaatatggtaatgtaaaaattatcattcccataagaaagattatatcatacaataatagtcaagatttctggtctattaatttgttctacttttagtcacatataatgttaattaagtagagtcattatttctactaaactatctaatacatatttggaggctttacattagcaatgatttgttgtctctaatataattttagaagccaatttgagatttttagtggcccaaaatattttatttttttgtatgttctattattacgacatacaatgccaccattttagggtgtcacttagcactttgtttttattttttaaaataataataataataataataataatgataactcgttattattgtgaaaaaaaaatgaaaatatatatctaattaatttgttgtaggcaagcaaggcagcactaataagcttttgtgagacgcttagaattgaagttggctcaactattggcataacagttgtcacacctggcctaattgggaccaaaatgacacgtgaactacaggtatatata

SEQ ID NO: 66905 - DNA, 559 bp, Cannabis sativa
gctcctctagagcagtgaacttttcagtaagctaaaccactttcttgtgttcattatccatggtgtaagcataaccaacacaagcctcaaagaagaagacaaagttaggtgatggttaataatgtaaaaccaatctaagaggaaacaagaacaatagttaccccaaagatatcactgaagcatatttgggcgatgacatgcggaggtttagagctaaccaacttctatagtgggatattctcagccttggaactaagtaaggcatcacacttggcaagaagctaggagccctgcgtgtgcagctgctccactagatccaagcttgagttcagaacaccattctcagccttatctagagaaatatgaatggaagatccctcatcagcaccagtagttatagacttctccttgctaaattattgggtaggaggaacgacgtcaacagttctactcctttttttttaatttcttctttgacgtagcagggataccctaaatatatccttgaccagaggttcaacttcctttggcattcgaatttttctgctttgagttcaaa

SEQ ID NO: 66906 - DNA, 1165 bp, Cannabis sativa
  modified_base (377)..(384): a, c, t, g, unknown or other
aattatgcactcaaaaaatgttgtgtataaactaggagtgttcgtctaatttgtaattcgtgaaataactctagttcgatccgattttaaaaatttcggttgcggttaaaaaaattcgtataattattttatatatatttttttgggtcaaaatattgatatttgggaacaattttaattagaatattgatattaacttattgttattgtggaaaaattacgactaaatgtgtagaatcaaatcagtaaaactctaaacaatcaaacgattagcgtttatgacaagattaacaaaacgagaacaacaattggaaacaaaacattgacaaacagaatatataaaaccaaaaataataaatgcagaaaataaaaaaatnnnnnnnnaagatatatactagttcaagtccgatagatcgatgtgatctatgattctactctagttcctagaacactaccgtaatccttctttgttgattgagcaagaataaatacaatacagtactcgagacgagattttctattgagtcctcacaaagtgtttcaactctcacactttacacccaataatcttctccatcaatagaagattcttcttacaaaatctaaatccaatctctctcttttcttaggacttctctctctacctctcaatttttttctctctcaaactctcattctcatctctaattcgtaagttctgctctcctttcaaaatgataagtgaatgtggtatttataggcttaggataaagattctaaagttggtggctgcaagaaatgaggttgttaagttagttagaaataactaacttaaccatttcttctttgagcaaagtctccttgtcagcttaagtaccagagcctccgggaacataaacgagctttcgaactcgcgaaccacggacacttaatgaagatgcttccagattggatataagtgatctattgtagtcgactatctagatctaccgatacaggagaatcaactagtcagctgaaactcctatcctagggagggctagccatcttcaagattgagcctagagaggacatgatagttatttggaaactcccttctggaatcgactatcattctacacgactcctttcgggactggcaaccgcgatcgagtgaacaactttccagaaataatgattgtgaaaa

SEQ ID NO: 66907 - DNA, 1825 bp, Cannabis sativa
tgggtatcaaatctccaagaactttaccattcagcagaaatgaataggagactgactgtagacagcgaaggataagatcaacaatgataattccaaaacccattttcaacatgattttagcaatataagtccattcaactcagtcaaatgccttcgacatgtctaacttgattgcagcatatccctgtgagcctcattttcgattcttaagtgagtgcaacaactcaaaagcaatgagaacattatcagttattaactgttgatacatgaaagtactttgatactcagagatcaccaatggtaagaaaggctgaagtcgcaacactatcgacttagaaaccaatttatagagtacgttgcacaagctcatcgggcgatattgagagatgaattgaggctttttaactttgggaattagtgtgataattgttctattgaggagagcaggatctgcaccattgttgagaacatctaaaaccgattccgtaacaagggaccccacaatatgccagtagttagtgaagaacataactgacatgccatccaaaccagggctcttgtcatcactcatcgtattgagagcattttgaacctcggctgttgtatagggagctgagatggtatctctagaatttgcatcaatcacagtggggataacttctagtatagaattaatggcatgatcatcaactccttggctgctgaaaaatggactaagttgtaattacatcaagcaaagcaggttcactggttttcgtattgcctgctgcatctttgagctcttttattcgattgctggctgatctggcattagcacgctgatggaaaaactttgtattggaatcagccgattgcatccatgaaattcttgcctgttgatgccaataatcctcttctttagctaacaaatcatcaagtatcatctctgaatttttaagcgcagcaaaatgctgaggttcagtgtttgatgaattctggagggctgcaacatgttcatgagactcctttatttcccttctcagattatcaaagttagaaaaatgccacttctgtagactagatgcacagttcgagatattggtggttaactgaaccaaagggctattggtgtcccgattccaattggcaaggattatatcagcgcaagcttcttcctttaaccagattttttcaaatctaaaccgtgatctgaattcagtaacatcagtccgatccataagagcagtgacagtagctttgagagctctatgatcaaaactataaaagtccaaatgcttcaaagatggtgcaaggaaagtagtatcccaatggttattagtgaaaccgtagtccaggcgttctttaacattcccacttccatgactcttatttttccaagttggcctttgtccttcaaaaggaatttggcatagtttacatgtatctaccatagcacgaaaagcattaatctgagaatcactctttcttggtcctccaattttgtcatcatgagaaaggacctcattgaaatctcctaaaactagccaaggagataagggtgctatatcaaaacatttacgcaataatgtccaagtaagatgtcgttgagatgcactcggatgcccataaaaaccagtaaagtgtaaggatggcccatcttgactttccaaaaaacaatcaatatgattaagtgagtaattgttaatggaaagagtaacatgggacttccaaaggagtataagtccacccccttgcccatgccttggaacctcaataccattaggaaaatgcaatttactacgaaactaatctatactaccatattgtaatttagtttccataatga

SEQ ID NO: 66908 - DNA, 1618 bp, Cannabis sativa
atccactccttcattgccccaagtgaaaacccgggtctccacggccttttatccgggtcacaagggtacccgccgtggattccaaccttgatcagacccgggtactcaaacgaaggcgttccgtaaatgcacggatcaccgtagcttgcaaaagacgggaagccgttgtcaatggcgtaatcggacacgtgttcctctttgattcgccaataactcacggtggtctccaagggctgaatcggtaattcaactccgctaacccttttaactaacttcctcgtccaagccccaactgtcaccacacatttctttccccgaaaactctccccacttgcggtaacgaccagaacgccgtcgttttctccgcctgtcttcttgatttctttaacttcggaattatctttcaatacggcaccgtttttcaaagcaagagtttggaacatggaaacggccttagatggcttaattaccccgcctttgtccaagtaaaggccgacccaattttcgggtatttgaatccgacccgaaaattgttgagcaacttgttggctgtttaagacccggtgagggagtgattttttgcggcagctggcgatgatggcgttgaggctctcggaatcggatgggcccatatcaaactggtgggccttgtaatagaccttgtagccgatttcagattgggcctgttcccagagctcgtaggagtcaagaacgagatcagtgtagtagtcgtctgggtaagtagcgcgtatggtgcgtgactcaccgtgagaggagccaaggtggtggaggaaatcgtattgttctaagaggagagttttttggcctcgctttgaagtttggtaagcggtagagcttcccatgactccgctgccgatgactataatgtcgaattgttcggcggaatattccatgattgagtggattaattaagagtgagccgtacaggtagtaatggtttatgataaggtatgggtggatttattttttaaaaagggagtttcacacactaaaaaagtacaaaaataataaaataaaataaaaacagtcatataataatattagtgggtggcattgaaagaagttaagttactattatttatgtgtgcatatactcttttggtttagagtgaaattacatgtaatatgtaagcacaatacaagctatttttgcagggtctaatcgtaaaatgagtagtggaattaatacttcttccattttctaagattagtggagagaacaaacaacttaacaaccattgctacctttgtttattttttcttgatataaatcttggtctccattttctctatacttaatataattttttagaatgttttataatggctgctgtgaggtagttaatatggttgctataaaaatatgtatttatgtcgtctctcagaccaatttagtccatttctcaagaaaataaattcatttttttttttggaggaaaaaagaattttttttttattgctgaatgaggaaaaaagaaaatcaattaatgtttccatcactaccattctagtttttgttttttattgaaacaaaatactactcgaggtttttcatacttggattgtgttgtgttggattacttattggaatataata

SEQ ID NO: 66909 - DNA, 1026 bp, Cannabis sativa
attgataaatagtcgtagttagtcagctgagatatctatgtatatatacagatatatatatatatgtatgtttcaactgattgaaagagatataattctaacttatgttaaatattacatacacttcctcaagttctatgtattgtgacacatttatttcttcttcagttagatatagtcaaaataattcgatgaaatgtggtaaaataacgaatgaattagcataaaggggtgataaattctgatctagcgttgaacattttgtatattttatgttcacagtgggatcaaatggctttgaaaggagaaatataatgtacaagaaatgaagcaaatatattattgactataaatctatgaagtaaacaccggaaggatttttctaataaagataatcgcactaatttcgtgataatttctatgccacaaattagtctagttcgaagaagtcaaatgatcattagttactatcttcaatatatgtatattgtggggcggctattaattcaattaagaattaaattatacacagcagtattttacaaaagttccatctttatacgtatatttaaatgaccttatgtgcgggactggtttgaaaccaatgaaaatgttgccacgtccctaagtaattgttttgtgcgacccactcgattattatttatttattttttttttgaaactgaaaaattccattaaaaggcatcaagccaaaagatccggatataaaagatagacaatttaaacaactaaatcagcgggcaagcccgaccaccacacccgagcctcatctaaatttaatgctcgttttgctaaagaatgagcaacatggttttttgaccgattattattttgttctttgtttttattttcttaaggatatttagtattttgttgccacgtttcaagaaggtcatgttgaacatttgttgttatttagtaatttagtaatttaggagtgttcatccaatccaatccacactatttcgcactaagtgcggattttatttttttggatccaatcca

SEQ ID NO: 66910 - DNA, 1016 bp, Cannabis sativa
ttcttgcgaaggatatggggaaagtcaggaattgctcaaattattcgaatgaatggagggtttaccattgtcaagttcaatgatgaagctatcatgtgctggagcatagagtggttcaattcgatcggaaaccgataattagtagaccttggactactgatttagatgctgttaaacaagttaaattagtaccattgtgaattcgactacatgattcaggtctgtaatattggggtaagaagtgtttgagtgctttagtcagtactattgggagccctatcatggtagataaagtaactaaagaaaggtccatggttaaatttgctagaattttggtagaaattgatataactgatactcttccgagagttattcattttatcaatgaaaaagggagactagttacgcaaggggtagattatgaatggttgccggttaagtgcaagagttgttggggttttgggtttatcatggctgattgtagaaaggggagactaaacaatgggtaaaaaaagtggagaaaggaggaggaattgagaagaataacgataaggaagttgaattaaaagatatagagaaggaggctgttgaaaaggaagctaaaagcttggaaaaggaagatgaaggtaagggggctgagaattatggtaagtcattggggataattggggtccataataatggggaggctctttgtaattcaaaacagggagatatttgtcctgtttcaacagttaactctaaagaagaaggagttgattgagattgggagacacctaaaagaactcacttgattaagtctaagcaattggctttggatcagggaacaaataacaagggtagaaactcttttgagatgttacaaaacaaggtgagtaggacacatggagaacttgttgaattagtttcatcatgaattgttgcaatatattatgttggaatgttaggggccttaataaagagaaaaagttagaggcggtgttgaatgttagtcgaattaaggaggttggagttgg

SEQ ID NO: 66911 - DNA, 1636 bp, Cannabis sativa
tacaaactaacaattagagaattattaaaagaggcgagtgatttttagcacattatatcactattagtataattaagtatcaaattccatatcacttaattaatataataatttttagaaagtatcactcactaatcacaaagtaacacatttaaaaagtgttagatactactgatacttaataacaatactcttataattaacaatgtctttgaatgaggttttgaaataagtattgctattaggtagtaaatattataaattgtctaatattatactgatgtagtgtattatgaacagtaagcagttttttttttttttttatattattcattaaataaaaaaaataaaaattaatatttaattgcactaataataatttattagttatgctcgacccaaattttaaagacgattttaagcgtctttagaatttctccattgaaatggatgaataaattcaatttaattttatttatttgttatgttattttttaaaatattaaagcaaaaattaaaatgttattttaatatatttaaaaatagaaaaaaagaattattccaatatagacaaaagaaatatatatttttctttgtatatgtattaaatttatttttattcttattctcgttactacattttcatttatcttaatatgccaacaacatgatggtttctaaggagtgaataatgatttttatttatattaataattaaataaaaatatgtgaaattctatattaaattaataataagaaacaatatcatacctaagaacatccaatggtaatgtttgtagatcgtgtttgttgatgtagcaaaatacttagaagatcaaccaggtaacaattcgagatatttaggtgtcaagacaaagagtgacaatcatcaaatatatataatagggaatagaaaaaaaaaaaaattaggcacttattttgaaaaacaatatggtattttcaaaattaataaaaaattagtaatttcaaaagattttttttttttggcccttaactaatagagtcataagtatagatctaatctacttatgcccagagtcgaacctggtgactatgatgtcaaaatttggtatcgatgccatactctttttttttttctccttcttttaaacaaaatcaaaacaataatatattaaaaaaaataatgtgtgagatcatgataataaatttagaataagttgaaaactacattaaccaaatataattgtaaaataattttaattgataaatatcttcttttataatcaaagtactaaatataacttcacataacttttcaaaattagagtttttaatgcacataatggagatataacctataaaactaggtataaattaaagagtagtaaaaaaagataaaaattaaaataagaaatgaaaagtgagtataatgtgtaatttccccaataaatttaaaagaattaatattattaattacaaaaaataccaatttttgtaaaattataacattttcttttgtttaaagttttttttttaatttatatatttttacggtattctataaaacacaataaaacaacaagagaaccacatgaaagtaataaaaaaacaacaacaaaataacatcaaagtaacataaaaaataatatacaaa

SEQ ID NO: 66912 - DNA, 873 bp, Cannabis sativa
aatacaatacaaagaaaaaaaaattaaaagttttgaataataaaaataatatttttgacactgatttttataacaaaaaaaaaattatatttatgaaatagaatagaaacttacttctatttccttttctctgttcaagtcttatatttccaattctgaaccctgtttttgtcattttttgttttattgctgttattaaatgataataaaactgaaatgcaactattacgaaacgtttaaatttattacacaaactaaccatttgtccaagtgttttctctttttctactgtccaaaataaattcatgcaaaattgaattaaactattatgaaatgatgatgcaactgtaaatcaatttggaaaaatatggtacttaactccaattaacatagttgttgcttgattttattttgaaatcataacaaaacgactatgcaactgaatataacttctacgtatttgttatacctgatttggattgattaggagctcgtgatcttttcgttatttcaggtcagttcttactaattgtgaaccctgtgcttttaatcatttttatttgaatcagatcattttccaactattataaaactaatttacaactattgcataaaacttaccatgtataatattatttgatggtacccgtcaactgaaattcctgcataatttataaactatcataaaacgataatggaactataaggcaaccagaaaaaataataaccggacttatacgtaacatgttgtcccttaattcgaatttgatcttcttattgtgtttttataaaactaaattgcacattgtaaaccagcaatcaactaaaatgcaactatatataacgtagatttattatttatgaggtttttta

SEQ ID NO: 66913 - DNA, 517 bp, Cannabis sativa
atatataactattaaatatcgattaaattaatactgtattgatttcgaaagtatactgtcatgtatacacaaatatacataataattatctaattaatatttaacgatgatactaaactaacacttaaaatttacaaaaaataaaaaataaacttaagaaaattttgccaataaaaaaatttaaatataaaaaactaaaacataatagaattttatcaccaattaccttttagaataaaataagtaatatgaagtaatattaggtaccataataccccatacaaaattacaaatgctcaataccttacaacaaaataagtatatcttctatcaagtagcgaaaatcattgataggattctacaacaacaaacaagcatatacataacatacataccattaatttttccaaaacacctaatacatatatgtattgattagtgtcaaaatatgattagtactatctagcaatagatattcaaactacaccaactactaatggttgattttgtagatgac

SEQ ID NO: 66914 - DNA, 1907 bp, Cannabis sativa
ttatttttgacagttatgttcggtagtttacttctaacagcctaagtgtataaatagatccaaggctcacttgtaaacattaaatcattcaattgtaatagatacacaaagtaataaaagctacttagttttctggattaaagcaaggttggttcctgtcgagggtgatcgatgtttttgactcaacactgtataatgttaatttaaatgtgatcttcaactactaatactacttacctgtttataacgatggcatttgtcagtccttacaattctgcagaaaacaggatgctttgaaggaaaacggctagcttcttcgtaagctttggtaccttcgtaagtattatacgcgcctacatgcctactctgcttccaattcttggttgtgtgattttcagctttagctttcttggacatgcctacaatcaacaaaagcaaagaattatcatatctcatgccttataagatattttaagtttgaactataccttctgtgtcagacttctcccttgtgaaatttggagaagaaaaacgtgtatagtcaatttcgcaagtgcttgtgtcatagatagatgtattaaattttgacctccctccataggtgaatttcagcatgtatccataagatagctgataatgctttacgaattccggccatccttctttgaggtataacttgccatctttggaaaccaaacctatcttccatttatggctacatggaagcacaaacgatacagtttcggtcaatgtgtgtccttgcagcctcacaaactttggtggaagtgcctacatgaatcacagcatgtacataagagagtttgctgataagaacctgttcagaatattcaaaccagtagccaaaattgcagcagagcagtaggcaaaactgtaggaaatgtatattgaatttatgagaaaaccaattacaaacagatgggagcccttaggcccctttgatgcgaagagttttactcaatacattgcataccctcctattctctcactcacctatgtatagtaataatttctcactcaaaactaccctaccaaacaaagactcatttaccctttttatttaatatatgcaagcacacttactaatcacaggcctaacatttgcaaacatacatgtgtataatttcaatcaggccagtttgatctttttatgttataatatattaacagacagctttaatgaaatggttgataaaaagtctcttgatctgtattcaaactatgcagtgtgtagtttattgcaaagtttgatattacttgttccaatacatgatctattatatgccagtaaaaatttatttattgcatatttttgtattgactaactaattgcatctatatatacatcaaaatattacaaataaaaacaatataggaactataaagccatgaaagaacatgcttacccattgtgtcattgaatagtcatcatgaatcttgaaaaagcaaaaactagtcatggttcaagtcttcaagataaccctctttcttgttctttttgaatctgtttagaaagtgaaattgtactgggttgaattaaataataaatgtatgaaactttcattctaatcctaatcatacttggtgatctaagaatgcaacatggtaacttgtagtagttagaaaattatatacatgatatgcaataagcataataacaaacaattattcttttggaaaaggaagaggggggagctggctataacaaacaaggccaaataaaagtaatggacattgtcatacataaccaatactcagacttcttttttcaaaaaaaatgaaatagaaaaactagtattgaaccatgaatacttcataaaacaataatctagagaataaaacatactgtggtttgattctccaagtcagctacattttagaatttgatt

SEQ ID NO: 66915 - DNA, 604 bp, Cannabis sativa
gactcaccttgatgtttctattgacgaaatggattcaattggtgccaatgacagcaatgcggagtctgatgctcagctccgccatcagccatgaaaatcataagctggaactctcgtgggttggggaacccgagagctctccgtcatctcaaattgcttgttaaagagcattctccaagtgtgttatttattatggaaactaagttaggacctaattctatttctcgtttacgtaatgttttacatttcaataatggacttgaagtcccacgtgttggtcttagtggaggtctgatgttgctttggaaagatgatgttgttgtaacacttttaaattttaatataaacattttcgattgttatatggcttgtggaaatggaccaacttggcactttactggtttctatggcgcaccagcggctcaaaatcgtcaacaaacttggacacttttagagagattgaaagacgttgctcctttgataccatggatggtaattggggattttaatgaaatcttgtcgaatcgtcataaatctggtggagctttgtgtagtgagacactaatggataatttccgtcatgtacttgatcgatgtcacttac

SEQ ID NO: 66916 - DNA, 701 bp, Cannabis sativa
catatccttgggctttgatgtcatgaataatatcatcattattgagttctagtagatgttgaacattctcatcaagagcactagaacaacttccatagtagtcagcatgattttcatcttgtatcaaattgatctagctccaccatatttttttcttcatcattttgatggaataacagtgtagaatattcactttccattcttagataattgttacatcacaaatatactaattaataaacttataattgcattatttgaggcttctcaagtttttgagggattagggaaaaaaattttaaatggggtattttgtcaaaaaaaaattattgaactataaactttcaaacattaaatgatatcttacaaaaaataaaaaataaacaaataaataaatgttgccaactgttgagcctttcacatttttattggacatcagtggtatctaatactttttagatatgtctccctcgattagttagcaatattcctttaaagctattatattaaattatatggaactgttagcaaaaaaaattaaaattatatgagaccagtacttaattacattactagcaatacgacacctaaaaatatactagacaatagacactaatgataccttttcacatttttcttattttttatcaaacaaataaacatattactttctcatataggttgtcattaaaatttagctc

SEQ ID NO: 66917 - DNA, 627 bp, Cannabis sativa
aaaaaaaaatcaacataacttttaaataaaaaaaaaaattaacaatttttttttttgaaaggaaaaaaatataaaagtaaaagactataaataataagtagtcttagactcttagatgctttatgaaaaagctgtgataaaaatgtgtttggtaaacagtcaaaaaatagttttttgaagaatttttggagaagctaccggaagctgctccaacctaacttttagaaaaaattatttttattaaaatacttaattttttttgtactaaaatcatatttacttatttattacatattaaaaacataaaaaaaataataaactaattataataaaataaataatttaccaaacactcatctttctacagttttgctacagctgttttttcacaataccgctacatctgttttttcccatagcacagttgtgccaaactgaccctaaaaaaattattttcttataaattttaaaatgaatacatttcctatgttacatgattcaatgttatttattataattttccaaaaatatatttgaaaaaaaagagagagagaaaggccaagaaatataatggagcgggcactgggcagtcataacaagtcagctcagactcagtgtcataagtga

SEQ ID NO: 66918 - DNA, 1599 bp, Cannabis sativa
gaagcataagaaatttttttttttaaaaaaaaattaatttaaatttaaaatataaaataaattaatatattatgtgtagatattttatcacactaataggttataactaggatctttagtccttttctcaaaaaaaaaaaaactaggatctttatctttagatttttttttttttttatttcaaaacttaaatttaaatttgcctaataattagtcaactatttttatgctttttttattttattttcatataaaagtatgaataaattaattattttttcataatattatgtactgttactatttaaaaaattcaaattttaaacgttttttcagatattaatttcaaaaagttaaatattaatataattattcattttctttttttgagaaattttcatttttagcggcaaatcccaaactttttcctctgtcttttcagttccctacctaagcactctctcactctacctctcccaaaccctcacgcatctcatagagaaaccaccctctccccgaattctatcacataatgagccctctctgtctcttcgatacggtcgtcgatgaggggacgactattctcaaatgttctctggtggcccctctatgctctggcaattttgtttttcatttatgttttgagcaaaggttagttattcaattatttagtcaagaaactcattcctttatatattttattttgaaatggtttgtttatgtgattcagatgttttttcgaatgatttttttagggtgttggtgaggtatattttttatattctgatattctgatattgctgaggatattgggaagttagttccctcttttcacctggttttttctttgctttctttggaaaatagtttaaaaaaattgtatgtattgttttgtgaatgagtaatatacagtactgactgataaagcttgggttgaattttagttttatttacaattttttttaatttaatggtataggtaggtaaaatttagttgattttttttagttaatttatgccattatgaaatggtacaacaactatattaaagatgcatgtagtttttagtattccaccaaacttgtttttcattttttttcttcttgatttgccaacaaatactcgattgtttctgtattcattagctttggcaaatagattttaattaacatatgggaatataatagcttctatttaatttaatgaaagaagcaccaaatttatgtagagtaccaaaattagttaatgattggttttatgagaaaagagatatactattgggcatggagcatatggatttggttcgagctgccatttacaattcaagtgagttttttttttctttaaataaatataataatagcaagatgccttcaaatctgtgtggtacagttcagggtattgcatatggtacacgtcacattgtgaagcactgcaatgcccatggtcacaagacaataatatcaatctggacacattttaacaccttcattttagtttaacactacccttgtaaaatatgtctactttcttctatttttaaaatattttataaaatgctacattctttaataaaaggttacaggataatcatgtatt

SEQ ID NO: 66919 - DNA, 1341 bp, Cannabis sativa
  modified_base (407)..(408): a, c, t, g, unknown or other
taggccaacaaagatagatcaatcctcttagaattaggatttttttagaaatatgataagtgttgcgcaatcgcgcctaagagaaaaaatcctaaacccgtgctgaaaatatatttttttcgtaaaagatcattttttttttccagtcgagcgctatagcggagactccctgtgctatagcgcacagcaccaaaattttctacttcgatcttgcttagtaaatcatgcataacttttgcgtctggactctaaatgggatgatttaacatgttttagaaatctaggaacgagctctatcattttgggtctcataagctcttcgagaaaataattaaataattatcaaaatgggctcaaagatctcattcaatcacaaaatatcttttcagcacaaacctacacacttnnagaaaatacatcaaatctatacaaaaataaatactaatccatctaataattgactaagaatgagtgtacaaatgtgcactcatcaggtgagcataggagggtggtttgttacgtaataattcaaaaggagattttttgttgagaattttagatggtgttcaatttatcaaataagtggttgtttccattacatatggccaatagaccaacgtaatttgagattgaaaaatgagtgttctagccatattaagaatgtgttggtgttttctttccacaattgaattttattgtggagtatcaatacaagaatgatagtgcatagttcctgtaatggtgtagaaggaagttacattaaactcattggcattgtcagttcttattgctttaattttagctaaaaactgagttagtatagaagaataaaatggaggaatgggagtttgaaattctcatttgattttcatcatataattccaggtaaatcttgatttgtcatcaactatagtgaggaaatacttatagccttcaaggctagggaagttaaatggtccctaaacatctatgtgcagcaaatcaaataagtttgtagaaaaattttatgagatataaatggttgtttttttttgtttggcttgatgacaagtagagcaatgaaacctagattgttttttaaaagaaaacccaatctatttattcaatcctgtcgaaattttacaaatggatgaccaaggcaattgtgtcataggtcatttgtttgagatacagtattggcagtataattagatggtaaagaaggtgatagtgagtagtgagatctggtagaggagtggacaaagtctaaacaggttcaaagtaggagttatgtgcaaaatttgaaccttgaattgtgcctgtctgattggcctaagaagtggattttaatttctctgattt

SEQ ID NO: 66920 - DNA, 759 bp, Cannabis sativa
cgcccgcagttatatggccctcagcgagttcacacacacaagcatccaaagttctactcgccaccagttttctaaactttcagttaccttggtctgcacatggtaatttgataagggtgagcttaaagaaggtgagttgtggtcttagttgttgggggagagagataaagttttagaaatcttgaaattatcacaaagagaaagtgttgggtgctatttatagtttctaattctaactaaggccacacttatggtaactcaatattaaccatggttagtatttaaaaataatttaataatataataaaagtctatacagaaccgaaatccatctatgacttccctatcactcggtcaaatttgttaagtaatgagagaagctctcctatataacctgaaatggttttagttggtcttagttgttttattaatatgagcctatttctcacagaaatccacgtagtgacttctcagctagaatctctccattctatcccatcatttaccccactcactgccacatgtccatgcttataaaattaacctaattaatatctaaaaattgtattcattccacttggttctacgtgccataaaaggcttacagcatatcactactataatttctaatttcatcataaaacgatacaatgccatatatcatttactaactatcacttgattaaatgataataataattataatcatgcatggacttatcatccatgtcttcaccgaatttacatggcccaaggcat

SEQ ID NO: 66921 - DNA, 558 bp, Cannabis sativa
ctttcatgataaaaagagaggttggttttttaagtgaaatgggagatggtttggttcaaatgcaatttaatgttgctcttaatttttagaaagcttcgatgtgtgtttttattgaacttaataatgagaaacggatttatctggtttagctgaatttgttagttttagttaacctataactttgtagaataaagaattattagaaacaatgacaacttaatatttttgttagatatttggctcatttgaatataaattatgttggcaataacgatataaaatgtgtacttctagttttttagtaacccaaaagttcatgtttttatgctgctgagacaagcaatgttgctgttcctattctacccccttctttttatcctctacttatgtttatcgtcattgttaatcacatttttttcatcatatatttcctcaaaaaatgtttagatatgaaatgttcctaaaccataccatttaggcgaggagcaattagtttataaatcttctatgaattctgttttcatgtcttttttgtctctaattttacgccctttgata

SEQ ID NO: 66922 - DNA, 579 bp, Cannabis sativa
tggtatgaattaacagcagtactttgagtttgtagcattactggactcccttgtgcatcccttggttgatgagaggcaaatggctgaaacctctggtttgtgagaatagcattgtcttgggaatttgttggcacgttggtgtcatgctgtgaagattctccaagaaataattgtcttggttgtggttgagttcgaccattaagtagcggtacagtggatgtcaaagtgtttcgggccaaacgtgtgaggagaggccaagcgtttccttttgcaaaatctgtgcgataccgatcatagcctgaagttgggagtgttgaacctttcatggtgggtctgtattcaagttccggttcttcaccattgtcaagcttctcaagaaaagtgatacatttgttgtatggatgaccaattcttccacattccatgcagtattcgggtaatcgttcatagcgaaattcaacccaaaattgatcccgaacttgtgaaagagttatcattcgccctctttttagtggtttggtgatatcgatcatgactcgcacccttaaaaacggaaccccatccttcatttaacgaatc

SEQ ID NO: 66923 - DNA, 882 bp, Cannabis sativa
  modified_base (708)..(709): a, c, t, g, unknown or other
atattatattaagattgttttttttttttcttttgtgtatttctaaatgtccaaaaaactaatgtattgatgtatatttttatttttgtatatattgaaataatattgttgtccagtatgtttttttaatttgttgttgttgttatttacttgccaaaaaagaacaatctaaaagtatgtttttttattatttttatttaagataataataataaaagaaattatactatttaaaagcatgtttttttaaataatatttattcaagcatttcttcacaacgtaatacaaattacatctagctcatttctaatccttagttgttttatagttgtttcatcttttaatttattttgttgttgttgtttcaccaagtcatccgttgaagagtctttaagggcaaaacgcgagataatgatgttgaggttgcaactcaaaagattaatgtatagtttttgttgtctttgtttggtttcaaagacttattttgttatttttatatatatatatataaatatatatatcttttttgatgcatttagtaagaaaaattgttcaaccttaaatggtttatgtctctcactttttctgtttataattagttatttttcagttttaatttatttattatatagttcttattatagggttcttaaaaaaaactatataattgggttaagtcttacatttattagttgtatttgagtttnntaattgaagttgttttagtttcatatttataaagttttacaattacataatttttatagttgttatatcgttgtttttatgttgttcaatacatgatatacttacaattatgtttaactattaatcgtattttaacggtttattgttttattaattttgtcatcttaatattt

SEQ ID NO: 66924 - DNA, 625 bp, Cannabis sativa
attccaagcacgtggggcttgcttgagaccataaatggccttgtgaagaagacaaacatgattaggtttagatgggtcttcaaaaccttgaggttgtctcatgtgaacaatttcttgaagatcactatttaggaatgcattgcttacatccagctgtttgaccacccaatttgtagtgaatgcaagagttagaacaacccttactgttgttggtttcaccactggactaaaagtcttttggtaatcaattggtggtgtttgtaagtaacctttggcaacaagtgtagacttataggtgttgagagatccatcagcattaagcttgattctacagacccacttattgtcaattatgctcatgtatggttcataaggcactaaagtccatgtttttgccttgataagagcagtattttccctttgcattgactgcaacaacttaggatccttgagagcttgcttgacattctttggttcacttggtaataaagattctttaagaggatgcttagtagagagatatgccttgggttaatggatgcactctgagatctggtttgcatagagtgtgttctagcagctgtactttttgttgtgcttaatatgtttgtcacctcagtaggaa

SEQ ID NO: 66925 - DNA, 549 bp, Cannabis sativa
atcataaaattatatttatgatattgagattcattattatttttgatatgaatttactcaataaaagatttgaaggaaaaaaaaacttattaagttatttggttcatacaatatcaaattatagaattttattttaaaattaattgatagtaagagacatatataattaatgtttttatgtttttatgtttttataaatgaattaattaattccacggcacttgcagttataaacactatcacaaataatgaatgtaagtgtacacaatcaacaaacagtataaactcatgaatgttatcttctctacaaggattgagcttagtaataaaaggtaaaaatataatacttaacaataacatttttataaacataaagtaaatatttataaatattattaataagagtagaattgcttacacgatttcgaaaagaaaaaaaacacatgtaagtgtaataggtgcaaattttcaaccgttaaacaaagatattttagtccactttactttttttaaaaaaaagtcaccaaatctactgtcattaaattgtat

SEQ ID NO: 66926 - DNA, 586 bp, Cannabis sativa
taggtttatttgagaactcaacttcagctataaatagggctctatcccttcatccaaagggttacaaattttggctagacactctgtagaaaattggcaagaacattcttgtgtaaaacactccatagccaaagagctcaataatattgacttgtggattaaagctcattaatgcccaaccatgtagaatcctatttcttaaccatttttccttagcttaatctataattgattcagtttctgaaaatctcagtaaacactcctattttttttttttttaaaaaaacaggccttcaaaaataaggggccttgttttatggtccaagctgcccaatgcttgggccgaccttgccatagctagaattatggggatgggggtgccccaaactcagtaacactctccagatttctggtacataatcctatacaaagcgagaaaagtttacaaaaactcaattcgtaaactttggaacactttggtgtgagttcttcccaaatcaaaagatttggatttgatgtttgtttgtgtattcgaaaagaatcaaggatatcttaatatgctacaagagataaatcattcttatca

SEQ ID NO: 66927 - DNA, 642 bp, Cannabis sativa
ccacggactgtcccttccgtcatacatcccagttttacatcatgaatctgaacccaaatatcaaggttgtttaaacgaacatcatacggatctcctcccacaggtaatcgttgaataatcaattgcattctctcataagtccacgggctgccattgatgacacgttgaatatctatttcatgatagaattgaaacaaaaatcgattgttctcaagctttttaacaaacatttccattccaggctgccatagcgaagctaatatattccgcatcttatcaaagtcgatcatcctattagatggaaacctccccactaagcaccacctatcatcaatcccctcttccaccccgtctcctcccactgtcactccctcaaactcttcctcttctacctaaaagttgtaaacaccactggaagacgcacccacaaacaaagaaactagagaaacaaaccatactattaaggcttatgaccgtattgaatggggttttttggaggctgttttgctcaaactcggcttcagtagaaaatgggtgaatctcactctttcttgtgtgacctcggctagttataccatcacccatggagacaaggaaatggggcctatcattccaactagaggtatcagacaaggatgtcct

SEQ ID NO: 66928 - DNA, 1239 bp, Cannabis sativa
gaaaaacaactataaaatgtgacccaaaacttaggctaaaaatagcctaacaattatcattaaatataaaaagttatcaatactataaatatatataatgttacttttaaatttattatcaaaattaatatagttattgattattttgaaatataatttattttattaatgtttaagatactttttttttttttttgcaatgtttaagatactatttagtactcttaaaattattttataatacaagcttagaaaaaatacaatctaataacttttaaatatgaaataataaaatttattaagctgttaaaatttaaagtttgattatttttttgataaagtttttttttcttgattaattaaataaaaaagactaaaaaattacatatatattttgttatcttttttagtgaccacataaaaatatatgtttccgcgtattaaaatgatcattttaaatggtaggttgtgatagtgtaacttatgagtgggattattttttaaattgtttaaagaagagagagtgatgttttcttaatattataaacaaaaagacaaataaaaaacaaacaaacaaattgttgcctttgaatagaattgatacataattacatatcctatttttttaaaaaaaaaatcgagcaaaaagtcaaatgaaaaaagaactggaaaaacaaagagtaaaaatggttgtgaggtaaatgggtatgactagcgggttttttttttaaaaaaaaataaataaaactagcatttccgaaatattacacacagcggtatattaaatcataaaaaataccaacccacattcttataattaaaatagaattttggtcactatacctaaatttctcaagtattaaatagccggggaacttataaaaatagaaaaactattactaaaaagagattatcttacaaatacataaaaataacaaaaaaattacaaaaaatacagttttactgaattttaaatatttttacgattttaatttatgattttatttacagaaaatatagtctttttatgttgtactctcattaatttattgttgattttttgttatctgtatctgtatgttatattttgttattattttgatgttatttggatattatttgttttgttagttttatgtttcttgtcgtttttgtgttagaaaagtgtaaagaagtaaaaaaaaaaattaagacgtaaatttgtaattcttttataaaaaatagtaccttatgtaatta

SEQ ID NO: 66929 - DNA, 861 bp, Cannabis sativa
gcataacatttacacattaattataacgagcgtaataaccctaggccattaaaccgctcatgttagggtaataaccataatcccgattcctaattactcacatagatcaatttcaatataagcacaaccatgcataactctacatgctaactactgttttacctaatgtctcgcaaacgtggagattccgaatctccaagtgctcctgaccaagtgccgataatcctagtcacaatttcaaagatttacaaagatagggtcaatccctaaatccactttcacataatacaaaatttccatttagattatagatattcacatagagcttggaacgagctttccaacgatatatagaactcccgagagggagtttggatcacaaagttatgaatatttgaaaattgcattcaaatctgctcagaaacatggcggcggccgcggcacccacacatggtgccgcggtacctggtttaaaacctaggatttcaacagaagtgagtcgcagtgcccaaaaagctgggccacggcccctgggtttcaacccagaaaatcccaatttcagcttcgaaatttcatgcccaaacacacctaactcaagccaaatttacatacaatttaaaatcatccttcacaaatttgtaagtacccaagtagtgcattaaaatacatatatcatgcatcaaaatccaacaatatagacactttaaattcagatttaaaaacatcaaagctaggctccaaaccttgagctaaaatcaacacaactccatcttcaaacacttacacaatcaagccataaactccaacttaaagcaaacaattttagatctagaaatcacataattaacactaaatatcacc

SEQ ID NO: 66930 - DNA, 960 bp, Cannabis sativa
  modified_base (55)..(62): a, c, t, g, unknown or other
tcttacacaatataaacaatggattcatgacatttttttctttttcttttttttnnnnnnnnaaatttaattaaaaaaaattattttttacctaatgtgatatgggtaacttttcgagttgtgaatattttttttttaaatgacaaattttatgtaggtgaagaaaaaaataataaaaaaaattaagattttaagatgatatgtgtattttggcaactatatatgttgccctctattagagatgctctaaatggcattagtaatgtctatcttcatcacgagccgagaagggactaggaaggaacaggatgggacggatgaatgcatttctaccaaaaggggagagtttgaatttttgggagttagagggagtcattttctctccttctcttctctccctcttaccaaataatagatttcacctccaccttctactttcttctcccccaccactctccatctaggtattattagaaaaattaatcatcttaagatacaaatttgtatataatataaaacacaataatacatacaataattagatatacatacttggttgattcatagtaattaccacaatttgatagtacaatgctatcaactaagtcttcctctctagatctctaaattagaatagaatcagttttaatttctatttgaaaatcaaaagtatacaattgtaatgagacactatgcgaattagaaaagggacttagctatataatcttagttggactgagtctgtatcaaaagtttaaattaactaaaaaaatcaacacttctgtttcacttagattttacacacacaatgttcattaactattgattacaggctgacacatcaaaaaattatctaattataactcaaattttaataaaaccaataaaatttaatgtaagtacaaataaaaaaatataacacccatctttccttcctttcaaatatattgtttttttttt

SEQ ID NO: 66931 - DNA, 841 bp, Cannabis sativa
aatttagttatgcatgcttagttccaaagattattatttttctcttcttcaagatttgattgaggattttcttcctcttttattagtaaaataagagagatttatgatctctcttagttagatctatatgtttattgattatgtattatattgtacgtgtttcttttgaataaattatcaagatcctgccttgaattaatatctattagcttctttcgagtttatttatagattgtcttttaacggttttttggttgttgttgtgagatcttactttgtttaaatttaattctcttttaagcttaactatttatatttgttttggcggtttttatcgccgccatattttatgttttattaaagctaatttttgttgaatttattttaaaataacattattttaatagtttcttgttactttcatcaccgacaaatctagtagtgtagtcattttaagcattatttataacattatattactttagcgatttatcattatttttaacaacaatgtaaaatcttttagtgtattaaaggtaactcttttttaagtttattttttaattttatagttttcttattacctaattattatttattgttggttattataaatacaattacaaacaatatacatatataagagatagaatattattgaaaaattatttcaattttttaaaaattttacaggatatcttagacaataataaaaaaaaattagataccaaaacagattcgggtgcatcgatacattcattttaataaatacattatagaaacatcttaaaatatatatataaaaaatgtaaaataagtaaaataataaaaatctaatata

SEQ ID NO: 66932 - DNA, 1211 bp, Cannabis sativa
tgtaaagggttttatttagggcacaaaacccaataatgtgtgacttctgttagcttttcttttctgattaatggtgatattaaaggcagagtcattccgggaagagttttgaggcaaggggaccctctttcaccatttttatttttgttctgtgcggaggctttctcaaatctcattcaatacgaggaacaagaggctaccatgagagggcttcgttttgggaggtgtggattgtcagtctcacatttattttttgctgatgatagtttgatttttatggatgctgatatggagagttgccatcggtttaaaggtcttctagatttatactcggctgcctcaggacaattagttaattaccataagtctgaagtgtgttttgggagaaatgtggctcgggaggctagacagcaacttgcttcgtttatgggtgttcgagaggtagaaaaccatgggaagtatttgggattaccatcttttgttggccgaaacaagaaagaatttctggatcaaatcaaaaataaagtatgggctaagatgaaagggtggaaaagttctatgttctcaatggtgggtaaagaggtgctgatcaaagcggtggttcaagctattccgacttatacaatgtcttgtttccgactatctaagaagactatctcaagtatccatcgaatggctgcgaggttttggtggggctcttcggataaggagaagaagattcattggtgtaagtgggcacatttatgcaaaccaaaggataagggtggattgggattccgtgatttggggttgttcaatcaagctcttctagccaaacaagtgtggatatgcattaggttcccggataatctttgtagtcgagtgcttaaggcatcatactttcccaataggaacattttggaggctaagagtggagcacatgcgtcttttgtatggcgaagtttgatatgggggaagaaagtgattgttaatggctataggtggagagttgggaatggggaaaatgttcgggttcttgaagatccttggcttccgagaccggtcacttttaagatttatgataagccacttcttccggggaatatggttgtggcagatatgaaacttggggatggtagatgggatgaaagctttatcaatgcggtgtttaatcgtgaagatgcggagctcatactttctgtgcctatcatgggatgggaattagaagataa

SEQ ID NO: 66933 - DNA, 567 bp, Cannabis sativa
cacaaaaaattaattaagtttaattaaagttagagaaatgtgaaaaggcactgctgttgccaagcacctccaacgtgttaatatggttattggtctaatttagtatgaggtccatataatttaatataataacttttggggagtatcgctagccaatcgtaagacgacacgtcgtaagggtgctgcgcaatagcaatgctcttaaagttaagtgataaaaaatataccttccaatgatggttgactatattttgaatgtaagcagtgttttcataggatgccttagaggccatcatagagagtgacccataatatctggggtccccaaatttgatgttggtgtctagatccattctcttgtccagatttccaataaacgacacgaacttttctgatgttttatctggctttaccactttccctgtccaaattccacaattcacaacataatacattttttttcttatatattatgtaaattactaacatcattacatttttttaaaaaaagaagaatgcatatattatggtagcgttaggtagttaaaatagttaattaaaaccaat

SEQ ID NO: 66934 - DNA, 1402 bp, Cannabis sativa
tcttgttaatttgttgttatatgtatgttatttttattattattttggtgttatttaaatgttattttcatgttacttttatgtagtttttctggttgttttcatgttatttctattgaaaaccgtaaaaatataaaaaaaaaataaaaaaaaaattctttaaacgtaaaaatgtaatttatttacaaaaaatggtgccttgtgtaattatccctttatatttttatgtaaatattccttaattattgtaaattttattttcacaccataaattatttaaagggcttttcagagtaaaaaaaaaaactatattactaaaatacatatagacggtcttttaaacatgtatacagtccacaaactaaatatcacaataatacatctttttctaaacttttagccacacgaaacgaagcaaaaaaaaaaaaactcacctatgcaagcttcgatagatcaacccagcaagccaaccgaaacaaaacctaactaggtagagaaccaccattaattccgacgagttcacctgagaagatgaccaaaatcaatcaaaacaggggctgtttcaaattcatgaagaaaaagtgcagaaaaactactacaaaactgaaatttaactagaaatcttgtttaattcgcataaaactaatgttctgacttcaattttcagatccatgaaatgcatatctcaaaaatttgaactgaagttaaaattacatcaatactatagttagatatttatcccgatgtattttcgttgttttccaaattctaatagtaaatttgttcgtattaaatcaagaatagacatgtagatagagttacgtacgtggaaatactattatggttttaagtatttcataacggttgtattatagttgcataaacattttgctaactctctgaaacttgacatatcaattattataaattgataatgatacaatcaccagtggcaaaactacatatacctataaagtggccatgacccccctaactttttagaaaaagaaaaaaaaaatatacataatatataaattaaattagaaaattagattttacttattagaaaaatgtgataattcttttattactaagcctaataataaattgtgaagttgaaattaaaaaagaagcccaaacccaatagcccatttaaattagttatctattttatggtaaaaagtgacaaaaaaaatgattataatataatttatttttgaagagtacttttgtataatatatatttatatgtgtctttatatatgtatccttatggtatccaatatcacattaatatggtattttataagtggttagcgatttcttatattatttattaaattaaaatatttaggactcaatataattttacaccaataacgatatgtcactttttatagta

SEQ ID NO: 66935 - DNA, 1136 bp, Cannabis sativa
gaaacagtaaatcattcatagtaccatgtatatagataagcatcgaaatagttcatttatagtgaccaaattctcctttttataaataaaaatttttaactcaactttaaataaatggatgaagaaaaagtaaatttaccaagtattaaatttggtttatatcatattttgtgaaaaatttagtataattttttacataatataaatttatcacatatttaacatctaaaccaaatgaaaatacaccattgaggctctaaaatactgtacaaggtgtcattctttcattttgaaactatttaacatctaaacatcaaaggagtagtttgttttttctttcaggcaaataaatgaatagttgggcagcttgcaaactaagatgtctttttttttttgtgtgtgtgtgttagaaggggaataatttttattcaccggttaaaggaataacaacccaaaaggtcaagcaaaacaagctgcattctagctgaaaattaaggtggcgtttggttggaggtaatgaaatgaaatgaaatataaagaaaaccatttttattctattcttttgtttggtttgttaagggtattcagtttgccagttcatgcaaaaaccactacaacatcactggcatgcagttaaaaggatccttcgataccagttgacatcagttgagagggctaaagatggacctgagattcctcaaaagaatataggccattcttgtgaacaccagtcagaagagtgttgtgtgtcacctgatccttgacatggcaaaagtcaaggtaaaactcaaaatatacattgttgtctctactaaatttagagactctgagaaggtttttggtaattttagggacatgcaatagattatttaagactaaaagacgattggaatttaacataaaccaagattgaccaatattttcaatggacgaacctgtgccatctccaacgtacagattgtcagggccattgtaactgattcgattcatcaagttctgaacatcgggagtacagtggttagtggctcctttgtcggggtaccaattcgagacttgagtattgacattctgagttacattagcttgtggttgggtctgttgcgtagaactggaagccacacctgtgaaacttttat

SEQ ID NO: 66936 - DNA, 2646 bp, Cannabis sativa
ttcgtcctataagtctctgcaacgcgatatataaaatagtggctaaatgccttgctggccgaatgaagacaagtatgcaccaagcaatttcagaggagcaaagtgctttcgtggggggtagacttattcaagacaatgccataatcgggtttgaaagcctccattgtatgaagacaaaaagatttggaaatggaaagaaaatggctctaaagttggatatgtcaaaggcctacgatagagtggaatagaatttcttaagaacaatgatgcggggtttgggcgatgaggaacaatggatcggaaaaattatgagatgtgtggaaagtgttactttttcggtcctcattaatggtgaacaaattgggaattttcaacctacccagggtcttcgccaaggtgactcgctatctccataccttttccttctttgttcggaaggtctttcttgcctaattcatgaagctgagagggctggccgaataaatgggatccaatttgggagggataaaatcaaagtttcgcacttattcttcgcagatgatagctttgttttccttgaggcaaaggagaatgaatgtgatacgatgaagaacatcttgcagagatatgctaggctctcgggtcaacaagtaaatctagaaaagtctgaggtgagcatgggtaagaggatctcttcgaacatggggcaggatatggctaatcggctgggggttcggctggtctcacatcatgctaaatacttggggcttcctagctttgtgggaagaaagaaacaagaggtttttgaagtcattaaagaaaaagtatggagcaaactaaaaggttggaaatcttcaatgttctctcaagccggaaaggaaatattaatcaaagccgtgattcaagctataccaagctacaccatgagttgcttccggcttccaaaaaaactcattaaatctcttcactccttggccgctaatttctggtggggggatacaaaagatcacaagaaactccattggagtacttgggataaattatgtagacccaaggaagagggatgtcttggttttcgaagcctaactgagttcaaccaagcccttttggccaaacaagggtggaggcttattcataatccccaatctctccttacgcgagtattgaaaaatagctattatcctaacaaatcttttatgcaagcagggtgtcccgcgggagcttcttgtgtatggaaaggaatttattggggtaggaaaattttgaaggaaggtgctagatggaggattggaaatggtagagaaatcaatgtttgggaagataaatagcttccccggccacatgtagctactctttctcaatttcccggtcttccaccccaaactaaacttcataagtttatcacttgggatgggaattgggacatgggggagatcaccaaatattttcacaaatatgacatcccttggatccaaggaattcctatagatttatatatggaagacactttaatttggcctttcactcctaatggtcaatacattgtgaaaagtgggtatagggttggaagggagatgaatcttaatcccactagatgctctaatttgacagcaattcagagttggtggaaaatgctttggagccttcaccttccccctcgaatgaagctttttgggtggagaatgtgccacaattggctacctgctaagaccaatctgaagcatagaggtatggacatcaatactcaatgtgaatcttgtggaaggtatgatgaaaatcttactcatgctttatggaattgtgataagattaaaaatatatggaagctgctgccttggtataaaaaaatttccaaattgggagagggatctatgttcgatgtgttacaggcggtagagaagcaggttactcgggatgaatttgaagatacaatcaaagttctttgggcaatatgggagaatcgaaaccggcaatggaatcaacttccaagtatgaagggatatcagcttctcaattgggttttcaatgcctatccgaaggcctctacaatcgatctcacagctggccaacagaaggtggaaacttaccccaatccgaaacactggattcctcctgacagtgggtgtatttgtgttaatagtgatgcagcaatcaacgaaaatactactggtgtggggctcgatttcgtttggagaacaaccagtggcaaactgctttcagctgggatggtatatatgcccagcctgtgttctattaagatggctgaagcttgggccttgctggaagctttgaagaaacctcctgcgattgatacttctcagattgcagtccagactgattgcaaattgctggtggaagaaattaagactcaaggaaataccctcactgccgaaagaaacattatccacaagctcaatagggtgctggaaacttttaatagtgttcatatttttcatgtaaaaagaaccaataatgagtgtgcaaatttattagctaggaaatgtctagctgataaatctacccaattttttgacaattcttttcaggattggttagctaagttttgtaaggctgaccatcctcttgtggtgtagtttggttttggttctaataaattctttttcaaaaaaaaaaaaaaaattattaattgaattaaaaagttaagat

SEQ ID NO: 66937 - DNA, 781 bp, Cannabis sativa
  modified_base (419)..(421): a, c, t, g, unknown or other
tagacaaatggcaggcaatggcccaacaaaggcaacacagtcatcatataggcaacatagaagcatacacaagaagtatggataaacattgttttattattatatggtcatggtagggccacagattacacagctgggcccctatcatgctagtgacaaggtgcttcataagtcaccaggccaccccccctaaagagcttaatagggttttaagggatttccaggaacatatatgattttatctctctatacatatgtgaatggaattacaaaaataaagctaaacacaaaagtctccccaccccaatgaggtgcttggtgcaagacttaactaatgatcaagcaccaaggcatgctcatgttacaaaatggcccctttgtgggtgtgccatggggcagcacgccacattctcccccannnaattgttcggcgtcctcgacgaacttgctgtatggtcttaagtcttctccaaaaactactgtaagtcttccaccttctcccaactaatctagtcatcagtgaggcccttccatttgaccaagtactcttttctcttctttctcttcacacgaacagttcttttagcaatgatttcttctagttctttactactgcgtcattgaatgctggtgtcatccctggtagactagttgtgcactggatcttctagatcttcacgatacggcttgaggctgctgacgtgaaggaccgggtgtatcttcatccaagaaggtagttcaactttgtaggaggctaggccaactttggagatgactggaa

SEQ ID NO: 66938 - DNA, 1170 bp, Cannabis sativa
ttagttattactttcaatttcatagctttacacttattgctttcaatttcaagctttaccattattgttttcgatatatttttctaatacttttcattgaacttttatttgataaaatttttcattatgccaattgcttttaataagaaagcgtttatcttggacctggtaaaattgtttgaagacgtaagctgctaaatcaactttatatctaaatctcatggcaccaactttatatctaaatctcatggcaccaaatgttgtttgaagacgtaagctgcaaattaactttatcttggacctaataaagttgtatatcaactactatattcaacatacagtaactaatgctttagtggaataaagatattaatttagttggtttcattttagattgtaatttagtagtattttttttttctttgaaggaaacagaatattagacttttatttaataaacaatttatattcaatatgtttttttagccgaatgttctgaattttttaagaaaacagtttgttagatttgttttattttaaaaatcacttatattttttttaaaaaaaattaagagtggaatgtactgattttttttaaaaaatattttataaattatttttaaatttttatatttattggttaaaatttaagattataatcttaatatagatatgaataatctctcataacttaatagttattaataataaaatataactaaaaagattctacataaactaattttactccactagcggcttgattaaatatttgaatatattctaacttcacgatatagtttttcattcaattatcttttttttttcttttttgtttgcttctgtgctctataatactagattgaatattcaattattttcttcagcttttgctttccattacctagcgatttctcaaccatcatctttgattgtcatgcttagttatacatgtataattagtttttattatctatttttcagtgttatagtatatgttgaacttgataatactacaaaatcgtagatgttgtgatgtttgcagatatcatgaaaaaaatactttcatgtattgctgcctaaataatatactttactgtacagatatagttttaaataaataaaataaatgtacttgactatcaaaagtagattttatttattaaatta

SEQ ID NO: 66939 - DNA, 747 bp, Cannabis sativa
  modified_base (100)..(102): a, c, t, g, unknown or other
  modified_base (423)..(424): a, c, t, g, unknown or other
ctagggcccacccagcccaggggcccaaattttttttgtcctcttttgaaattatacaattttttttactgattttgaaaaataccacattttttctaannnaagggcccaaaaaaaaaattccctgtggcccactttgtttcagggccggccctgtgtgggtaccaaaagctaacagatgaacttgtttttgtaggaatcaaaaagaaaaggacaaatcctatggttcttggatagtggatattcaaagcatatgaccggtgatccatcaagattttcaagctttaagagcaagaaaagtggctttgtcaattttggagacagttcaaaaggaaaaatcttggacattggtgatattggtaatgtatactctccatgtatcaaaaatgtgcttcttgttgataatcttaaacataacttgcnnagtattagtcaattatgtgatataagttttcgtgttatttttgaatcctaaaaattctccattgaaaatgctttgactaatgaagttatttttcttgaataaggaaggatgtatgttattgatgttgactcctctgatagtaaaaataaatatttaaccgttatgaatgacaactcttagttgtggcataggagattgggacatgctagtatggattctatttcaaaattggttagaaaaatcttgttattgatttgccatctattccttttgtaaaagataaactttgtgatgtatgacaatttggaaaacaaattaaaaca

SEQ ID NO: 66940 - DNA, 977 bp, Cannabis sativa
tcccatatttatgaaaatttcccataacattaaagtcaaatagaggttacatggtatggtagtgtgacgtacacttgtgattttttgtttttttttttgttaagaaaaaagcagttactgtataaaaaaaattattaaaaaaaagtaggaaagagaactgttttatatatgtcatgtgtatgtatatattgatgggcttattttttttggctttaagttaataaactatgttattttaattttttttttgttatttaaaaaaatatatgtttaaaaaaaagcacatgtataattttaaaaataaaaaaaatatattagaatgttcataaaaattacatcatgaatgtcttagcaggtatactttatgatatttggctaaaatttgtgtataaataagaaaataacatttttattaggcactagtggtgtccagtaccttttataagtggcgccccactattagttagcgatattctctaaaatctattttcttaagttatatgggacttgatacttaattataccaatagcagtatgacatcgaggaaggttctagacaccagtgatgccttttagcaattctcataagaaaaagtgtatgaatctgagttgtatagatagtagcatgaaagagagcctcaaaaatagatttaatcttgtataggaaaggaagttgtctagtatagataaaattgttcttaaaaatgtaaaagagttgtaagtttttcttttgaaggggaatccctttgtggatgtaatagactttgtttgattaataaaaactatctttcttgataaaaaaaattagtaaattaaattaattttaaagataactatagtcaaactatccatgtaaataaattagtgacgaaagtacttaagtaatcaattttgttatagttaactattagcatataaaaaaataattaatagtgaaatttgtaagaaaaattattttttgaaaataaataactata

SEQ ID NO: 66941 - DNA, 782 bp, Cannabis sativa
tgtaaaaataaaaaaactccttttattttagaatgtttcctacccttttttattatactttcttaataattattaatgaataatgaaataattagtaatgttttgtttatatatatttatatatatatttaaaatgacaacggtatttaaagtgagatacggtcatgataattgttttgaatgtagttagattataagtgagatacgtgctatcaatgactttaaaaatgtagcgacgatcgcatgtaagatacagtacttaattttaaatattctcaataaattacatattttaaacttttaaatttaatttattttatcattttatattttttataatattttgttcattaataactcaacatatacaataaaattaataaatacttaaaacaaaaggcggcttttttatttttacacttcaaaatagttttttcttgtatttttacagattctacatagaaactcctattgtaactagcgttgcaacctaaattgcaacaaaaaatcgtatagaaatctctattgcaactagcgttgcaaccattttagaaactcaaaccgtaaatttaaaaaaaaagttaaaaaaatagtatatcgaataatttctctcgaaaaaatctaaactacgaaccaaaaataaatatttaaaattgccgcacgaagagcgactatgttacttagtttaaaaaatagtagaatttacacttaagatgagattttgaaagttttttacttaaatatagcatatttaattatctcaaaaatatatatatatatat

SEQ ID NO: 66942 - DNA, 796 bp, Cannabis sativa
ttaagaaactttgaaaaaaaaaatgggtacttcttatgtagaaaagtttcttagtcttcttcttcttccttttttttttgttttctaataattatataagttcaagttatttaggactactcgtaatttttttttaaaattctgaataatttacagtattaaaaataaagttaaaacgtcgcttaccaagcgtataagaaaagacagtcatgcaacaaaatattttaacttttatattttacactgtaaattatttaaaaaatttacaggtgagtttaaataactaaaacatatacaatacaaaaaataaactacaaaactcttatgtgaatgtcaaaaatagatagaagatctatcaaaataccactgtatacttttttattgtaaaatcacttactctcatatttgataaattggcaaaattaattgtttgtggtattttcaaaatatattttgtttcttgttttggtgtgaaaatatttttaaatcaaaatattctatttatgtaaataaataaattaatttttttaatataaagtatataatatcttaatatttatatttatgaaaatttactaggttcaatgaatataaatattatggaacttacaacaattacgacaaatttaagagagagtctttatttgtataagtcaatttagtttgtaatcattaagggtgcgtttggaagtaactgtgtaattactaggtagggtaattactagggtgataattacacagtgtagtaattacactatattttaaaatgcaaggtatgtttggatatgaggtggta

SEQ ID NO: 66943 - DNA, 745 bp, Cannabis sativa
  modified_base (695)..(708): a, c, t, g, unknown or other
tctttcacaaaaggactaaacacatatatgttagactacatttcattcgagacactatctcagaaggaagagtgtagctttctaaagtttcaacaagaggaaatcaatcaggcatgctcaccaaatctctactaacagcaaagtttaggcactttctaaacttgctacagatatcactgatgacggagtcttctctcttattgaaaattttcagttagatgcattatagtcagggtggagaattgtgatatattgactgttaatacattagctcttataatatttattagtattaccattggctatgctataaagcctcttgaaaccgttaagatagttacagttcaagtacaggacctatgcctacaaatagtttccttattcattcggatagaagtgaacttgtgtgtacaatttctaaacgagcaataaagattcagagagaagttttcccgtgaatgtaagttggctgaagacaagctgaaccatgtattcctttagttttttttttcttttgaaactaggctccccgcctaaccctatgaccaggaaactattgcaattgctatataggtacccagtagggacttgaacctcagaccttgtggaagcaaaacaaatgtctgaacctttggactatcccctcttgggttattccttttgggttctttggtacgccgtattacaccgtattnnnnnnnnnnnnnntatattaaattatattttatgcaatatttttatgtaa

SEQ ID NO: 66944 - DNA, 1458 bp, Cannabis sativa
aaattggatttataggttttttttatattataaattttacttttatataatcaaaaccagtttcctaatgaaaaaactagtttcttaattaaaaaaaccagtttcttgaagaaaaaaccaatttcttgatgaaaaaatcagtttcataatgaaggatctttgtgattgattttgatcacatgagaaactaaacaatttgaatagcatgagagaaaaaaatcttgtgtggctagagagagcgtgatcctatttgaaaaattgattatcttttttaatatttttttatggcattttctatttaaatacccatatatttagtaagtttagttataaaataccatatttagtggaattaactttacatgccactaactagtgcccagttgaatcgtacgcgaaaaatcactcctttagaattttcacgatatttttctcttaatggaaatctattaataaattaaaatatgcaagtcttgtgtttcatgacatggtgtgattgtttctggttgagattgtttcttgtttttctggtttgagattgcttcaggttctccattgttttctggtttgacaatctaggttttctggtttttgccattattttcttcctgggtgcgactgtttttctactttcttggggtgcgactgtcttccagggtgcgactggcttgccattgttttctggtttggctttcctggggtgcaattgttttttggtttgccattgttttctagtgtgtgatatttctagggttgtttttctagttcgtgtttgtttttcctgacatgagattgtcttcctggggtgtgattttcttggtttggtttggtttggctggttcacgtctgtagctctggtttgcgattgctccaggctttgtcgtgtttggttgttggttttagtcatggcttcattgtcttctccagtggaccttagtttggaaagtgtgtcgatcattcctctggaggaggaagaagagcctacagtcagttatgaggggccacttattgacgaggcggaggttgatactcgatggagtattatgggtcgtttttttacggatacgccgattgatttcatggcgatgcagaacctcatcatggctatgctttggaagcctgatattatgatgggcatgtatgtgaaggagttaggaggtaacaagtatatttttcaattctatcatgaaattgacattcaaagggtgatggataggagtccatggacgtttaaaatgctcctctcatctttgaacggttgaaaccaggggatgtttctcgagaggttcctttgcatcatctcaatatatgggtacaactacatgatattaggtcaggcttcaaaacaaaacaagttgtacgggatgctggaaattatattggtatgtatgtgaaggagtgaggaggtaacaagtatatttttcaattctatcatgaaattgacattcaaagggtgat

SEQ ID NO: 66945 - DNA, 848 bp, Cannabis sativa
  modified_base (451)..(451): a, c, t, g, unknown or other
ctcctagaaactaatgcatatgccgagcacttacaatcatttgttagctgtaaattttgttgggtttttttgccattgatgcttgattctgtgaattttgataaaagttacgcttcctttttttttttattattacttatacattttgttattaagttgtgaagaaaaaaaaagagaagtgcggattggaatattatatgtgatctcatggaatgtctaaattgtaataggaaaaggaatacaataaataattaaagaaaattcaatcatagatgtacaacaacaaaaactgtatttttttttttttgatctaatgggatttattttatttattttattttatttaaataaaaagtgatccatgaatttttcatgaaccattttatttttaatataaataaaaagtcacccataaatttttcataaatcaagaattctgttatataggcanactttatatagaatagataatatgttgattcacgtcaaaaaaaaataatatgttgattattttttaatatattactcatcaaatagttgtttaaaaaataaaattatatatttggtatatggactaaaatttgatcaacatatatatgatcaaattcaatctttcacctaaatgttacttgtggagccacctaaaagttaattttattatagttttagtattttttttttcctttttagattttggtatctaatttcttgatacgtgcaccaaaattctagatgacagtagcatatttatcatgatttcccaattgtttattttgttcaccaatatattagtttttggaataagcaaaggtgattccctacttacacttttcaacctgagaaagagc

SEQ ID NO: 66946 - DNA, 1107 bp, Cannabis sativa
ggaggctctttgtggagaagcggcggcctgttattgcttggcggtgtctgttgctttagatctgaagtataagtatgttattgtggagagtgactcgagattaacaatcaatgctctcaatgggaaggcatctcattgggctctagagaactatgtctccttttgtactaagtcttctcattatttcatttgttgtaatttttcgaatgttagtaggaactgtaactttgcggcccacaatgtcgctaagtgggctttcacccaccaggtatatggatcgatcccaatcaactctgtaccggagaaaatattgtgtaacgaccatgagatctaattttctttaatatatatctacgcttatttttaaaataaataaataaactatagggcactaaatttgtatacacccgattaatcacttcctacgatcaaatatattatgcttaatcagacatcaatctagctagtgtatttttctaaaagtgtattgatgatggaaatacttgccggtaaccagggttaattaatttatttatattgataaagtttaataattaaatatacatttatgtatcttccagtctatgaaattcattacatacatataattaaataaaaaaattgttaattatgatttttgtcctcgaattttaacgtgtcaaatattgctgggcacaaattataataatacctaaaaagatcctataccggaaaagtaactctttgttgattcagttcttttagctatccattcttgctgggcacaaattatgataatacctaaaaagatcctgtataaagtgaatgctatttgtaggaaattcttatgaaaatgtatggtagactctaatggctcgagaagtgttaaacaaagagtgaaggacgactggaatttaggagtattaatttccaaatggaatgaggctgccattggaaaatatgtttggatggtagcaacgaaacatgacatgctttgggtttggttataagttcatatagtctattttggaacagatgattggtgggcctatacagtcccaaataccagcagttggtactggagacaggttgttatagagtgaaagagaaatacaagaaacttaatat

SEQ ID NO: 66947 - DNA, 791 bp, Cannabis sativa
ataactttgaaagaaaatatatagataaaataagtacacagtagcttttattcaactttttaaatattgattataaaagtttcttaaactaatatataattacttaactgtgaataacataaatattcatgcatgaaatattgttttcccgagaaggcgaatttgacatcatggcaattgtgaactcaaagcaaaaccccttttattatacttaaaattactcaaaactttgtgtcttttctgctttgtttcttgatttattactattcatacaaaaccacgcgaatttctaattatcaattcaatgttatacatggcaagtctattaaattaaaaaaaaaattaaaaaatattattggtgtctaatattttttttggtatcttattattattggtgttagatattattagtatctaaaataactagcattataattaattaataataattctttataatgtttattaaactaaaataaatttaacacggtattaaattacattaatatatagcaatgtcgctatataccaatactaaataatataaatacctttaaacatttttcttaaattaaacacaccgcgtatattctttgcaagctgagacaaagattcaataatttcgaggatgtacatctctccaaaaattaagttgtaacatataaaataatacaaaactttaaaatcccaataaagcaaaaccttattattaataaagaaatcgaaaacctagctctacttaatgtaaaattaaaaaacaaacatccaatatatatatatataaatcttca

SEQ ID NO: 66948 - DNA, 1343 bp, Cannabis sativa
  modified_base (1305)..(1318): a, c, t, g, unknown or other
ggtaaaataattccaacagacatgatatgtggaagtttaaacacagaaattatggtacagtaataaattaattgtcttggagagataccaaaataacaagcaatatcaatctcgcattatgcgttggcaataaaactatgaattgagcaacagatggtgagatgatagcaatagaagtcttctcaggtctaacagactgaagttacatcgctggaaaaggtagataattagttctttaagagcttgcagcttattaacatgcatacttgtaagtatgttgaaagacttagggaaataacaataatataacttttttcaaaggactaagtctaaaagtttcccttgaaaggctatagtggtgaaaaatagtttaacaatcgtctcgcagaatacaacaaactatcacttaaacactgtcaagtaatgcgagccacagcaagaatgtaccatgtaaaagcaaaccgcttcaagataagactaaaagacggttaccaacaattattttattgtacatgttgtaaaagtgaaacgtgaagattgttcacgtttcacgaacagttatctagatacggtcaaaatgaataactttcataaaaaactcctataaaaagggacagaatctaaaggaaaaggatcaatcatttttggaagtagagactctgtgagattgagtaaatattcatatttattcctttgtaattaatgtactttctcaagaaatattcaaaaataagaatggctcgtgtagtataaagatttaactacaaaaccacgtaaaactctttgtgttctacatatatttattaattataaatatttattctttatttaaaatgttttatttattgttaaggaatatttgagttaacaaaaactaattggcaataagaggagtagttcatacattttatttatacagtgtcacctaaagggtggggaagcaagggtcactaccccaggcctctaacccaaagaggcccaaatatttatatatttccatgaaaaaaatgtgaacatgtaagcccaagattttttttttgttgaattattgcaacttagagtttcaaaaaaccaattaaataaatattaaaaaaagggggcataatttaatatttttattttgcttatttgttttaataaaaatcaaatggttctagaaagtaattttatatatatatatatatatataaactagtaggagacacacgtgctccgcacgtgtataaattaaatatagatttatatataaatttcaataattttaaaaatttacaagtctggttttttttagggtaaataccattnnnnnnnnnnnnnnttgtaaaagttatcaattggaccct

SEQ ID NO: 66949 - DNA, 752 bp, Cannabis sativa
ctttgctcatatccaatttgagggtcgagtagcttctgctttcccttattttatgcttcaaatgatgtatcaactcaaaagcaacaaggatattatcggtgatgagtcgattagagagaaaagcactttgtgtttcagagataaccactggaagaacctctttgaatctgatagcaagggtcttggaaattattttgtaaatgacattacagaggcttattggtcggaaatcactcataccttgggtaaccttaatctttggtattaatgtgatgagtgattgattaaaagatgccatactgtgaccgtcattaagaactcccaaagcaacctttgtgactacatctccaacaataggccaatattggtggtagaacatagcagacatgccatcactccctgggctcttatctggattaatcgttttaagagcattaaacactccagtactcgtgaaaggctgtgttagagcatcattcatagctgaggtgattgttgttggaatggtgtctaaaacatggttcaaagcttctctgtttactgcagttgcagaaaaaagatcctcaaagtaagatgtaatgatggctgtcataccagtttttgaactcaccacatgaccattatgatcaaccagggatttaatggtattatgttgttttcgggaagaggcatatgcatgaaaaaacttggtattttggtctccattttgcatccaatctactcatgaacgttgttgccaatacatctcttct

SEQ ID NO: 66950 - DNA, 889 bp, Cannabis sativa
taaaaacaaatttttgaaaacaaaagacagaaaacaataccaaacatactcttagtttctatctttcctcaataattatggcttgtatgtgttaaatgagaaaatatgaattatgtgatatataaatgtgagtggaaaatgacaaattgccttatatgttatttatgcttatgtgtgtgtcttagggacaaaatggtcttttggccaaatatttctatttcattaaaaacaattatcagccaaaagaaaaaacacatttctcggtttttgaaaccccaaactgcccaacctctctctctctctctctctctctctctctctctctcgctgatctctctgatctctctatctctccattttatgatctcaacacaaattttggaaaagggcttgaattctagtttaaatcttgtgtattttcttactttgagcttgaagaacataaagtaactatcattaatctcttttacttgtttgaaattttggatttaagcttgttaatggtgttatgtgtgttcttaagtattgtgcttgcatgttagtgaaaattatgtgaattgtggtgattgtagtatggtcgtgttatagtgtttatgcttgaatcatccatgctgttttaaaatatttggatagggttttgatatttaatttatggagaattaaccttgaaattctgggtttgtgcgttgaattgctgagtttcatatgcttgatgatttatgtgctattttgattcttgttgcatgccaaagttgtgtttatggatttgtatttgagctacttattgagctcattttcaaaccaatattagattggataggtaaagagtaaatttttgtttatgcatggcaatttgatgaattttaggtatgatatatgttgggtttga

SEQ ID NO: 66951 - DNA, 1785 bp, Cannabis sativa
agagagagagaagagaggattagggtttcagacatagagctttatggcttaaaatgagacttagggttttagggttgagttaaagctctttaaataggagagcttaaaccctaattagcagataaaataagagatatttacatattaaattaataaatataaatgaccaaattgctcattgaaagtagatattttcatagcatcttagtgagctttgaaggcccaacttgtagtttggcttgctgtcaacggatgaagactgcacatcaatgtcctacaagggaaaagttggccaaccatgctcctgccaaaatctggcaggtcttgttcctgccagggtctggcaagtcatacaagatctgcaggttgaggtctggtcagccatactcctaccaagatatggtaggtcctattcctgccaaggtctagcaggtcgtgttcctgccagggtctgacaggtcatgttcctaccagctttgtcaagagttggctaggtctttgcatgtgctagccaaccttggtgatggccagccttggcgatggctagcctcgatagatggaggccagtccttgaagatggaggccaacctttggaggtggaggccagcctttgtacacatttttcttgcagaggttaggctttcttggtcgaacgaaccctttgttggtttgaaagtcaccttttggttggccagcttatgctcaaaccctggccggccatacaagctcatcttggtcggcctatagactctccttggccagccaaacatggtggtagagctccttgacgactggcttaactcttttcgcttgttgcttgacggttttaccataccttataaggagactttattctgctattggcaagattgtattccacatgtactctgtcttggcttacgtggacataccacgtcaggtggacaaattttgagataacaattttcatatataaaataataaaaaataaaaataatttttcttcactactaaattactcatctaaaacagaaaaaaaaaatattcttaagaataaattatcaactatttatatatgaactcgatatgtatacaataattagtatatgtaaataaacttcaatatataaataatattttagttgaaccacaaaatttttattactatttgggtaattaatcaattacttatagaagtaaaaataaattaaatctaatattgagtcacatcaaagtaaaaaaaaaattgagttttatttattgatttcatgtgcaacacctaaagtattgttaaacaatgtgaagttgtgccacctcacgtcctcacctatcttaaactatcttttatataaatatatatcttttaatattattttcatacataaaattataaaaataattttttttcactattaaattattcatctaaaataatcttaaaaaattatcaactatctatttataaactcgatatataataattagtatatgtaaataaactcaaataaaaaaataggaatattgacagtaaaaccactcaaattttatattttttaacacttaactacataagccgattttttgacggtaaaacctaccaaacttatcttattttattttgctctttacacttctgtccaaaaatctcagttaagtgccacggtagactgtctacgtgtacacgagtgtacacgtggcacgtttttaatggtcaacataatattaattatttaaatattataaaattttgcaaaaaaatatttaaaatttaaaaaataattttaaaaaataaagtaaattacaaaa

SEQ ID NO: 66952 - DNA, 1434 bp, Cannabis sativa
ttatatgtgattattaaagcatgttaggaagcatattagattatggttatttattttaaatgtgttgccttaaaatctataggagcagtattaagtaatatgatcgctatctaacctgcctggcttatgggttcataggctaagtcctattaaatggatgcccaatgaaatacaagaagtctgggtaatatggttgagaccggaggcgatcagggaaatcaaattccctggaatccgcgtggtcgcggttgaggccgtggcagaattcaaggtgatcatcttgtatatccaccacaagctcctcttgattaagagcagaggtttatggagatgcaatatcaaatccgccaacaagaaaaagaaattttgagattaaggcagtagggtcctcctgccgtgcctccataacaagctttggtcgttgtagctccaacggtgccagcagaacaacctgttgccagcaaccgtatggagccaatatacgaaagattccgtaagcaagcacttccattgtttttgggaggtccagatgtaatgaaggctgagcagtggctcactgagattgagcgaattttgaatttcatgggggtggttggaaatgatcgggtaacttgcgccacatttcaattctaagaagatgctatcgtgtgttgggagttggtgtcctcactcgagacatcactataatgacctaggaagagttctgagagttattcaatgccaagtattacaatgaagcagtccgtagtgctaagcagaaagaattcactgagttggtgcaaactgaggggatgttagttactgagtatacaacaaagtttgaccatttggccaagctcgcctcgggtattatgcctaaagacttcagtaagaaagaaaaatatctagtcagtttgaatgtgagaattagacatgatttggtgatcactactaaagaggtagcatcatacacaaagatggttgagaaagctctccgagccgagggtgcggtaaagtttctctaggagccctatgtgactccaaatgttggtgggacccccactcttcctacgcctgcttatggtaggaatggtggtgattccaccactaaccagaagagaaaagttaccccagtatctagtggctcggggcagagcaagcagttctgcgggaaccaaggtagaggtggatgctaggcttattcttaccttgattgcacacgttgtatgaaacatcatcccggagagtgtaactggaagacatgctttcagtgcggcatggtagggcatttcaagaaagattgccctgaggcaaagaaagaagagaagaagccataggcaaagcccacaactgctcgggtgtttgccatcactcaagctgattttgcagacatttcttctgtggtgacaggtcagtttcctatcaacaactccttttatactgtgttatttgatt

SEQ ID NO: 66953 - DNA, 1220 bp, Cannabis sativa
  modified_base (1142)..(1149): a, c, t, g, unknown or other
tttcaattttaaaaacagaaaacataaattttgattttttttaaataaaaaaattatgaatatcatttatttttattttttaacaaatatataaaatcataaatcaaataaaaaatactcattaacatcttaaaaaaaatcaagtaatttaaaattacaaaactcattatccaacacaaaactgacaaattcatagtaaatatgaactaataattgtctaatcttgaagaaaacgaaaaagagttctaattgttaataacaagtcattcatacaaacaatgtcatacaaacaaagtcatacaaataaagtcatacaaacaaagtcatttatacaaacttaatcattcataaatcccaacaattataaagtgtaaaggttaaacaaagtgaaaaaaaaaaatcacttcaaatagttcaaccaatcagtaaagacttgaaatccttgtgcttttgtcttaacaaattgtatttgttccttagttgcatatcagtgtaacttctcttcgcttgtgcataaagctcctcctttatacgcttccacgattgctttgtaaaggttgtagtattcctatttttcccttcaaaacttcttcttccataagttcaatataaagctcactatcacattcaagcataaactaatccaatccaatcccattccaacaaagcaacaatagaattaagaaaaaaaaattacaatcattgtcttgtctctaacaaaagaaaatctgcacaataattttctcaatataagaatcatttatcaataaaatgggcacatgcccttattagcaatttcaaggaagcaaagaatgaggacaaacttaagcactaaaataatactgttcatctaccctttgtaatgaaaagggttctgtattcatgttcatcttatttttaagttggaagctgatgataaagttgtacagtacatacatatcattaggttaagccaagcaaatgcaagtaataatttaatttacagttaaaaagtaggtagatagataaatatggaacgaagtatagtctttatctaagttgagaaagctaacttgtttcttctattaccctcacaccattggttctcttccattgaataggggtatatgatatgatgacactgataatctagcagagtatannnnnnnnaaattaaagttactgctgaagaatttattttttataaggtaacttggctttgatgacaagtttaattgaca

SEQ ID NO: 66954 - DNA, 832 bp, Cannabis sativa
atctataccaatgtggaattgttgtattatggtctagaggcacattctctaaacttcccttgctaacaccatttttctggtttgttagttagttcagttaaaaacagttatgtctataaatagtcataactgtagaatgcataggatttagtttttcagttcattaactccaagattggtggttcttgtttgagttggtagtctatttaaatgtgttgttcttgtttagatgagggttctacattgagtactggtgtgtctgatccagtagctcacagtgtgaggtttaaattgtatttctttatctacttgtttcctataaggactaccaacaacattgtattcgaatcactactgcattcatgatcatagagaagtgcctccatggctgaacttttgattccatttcaagtttaatttcaagttttacttatactgttttaattcaattcttgctattgtttatttaacttgattatttgtcattgttcatgcatctttcttcttggtcctaacacatgtgattgtttgaatgacatcagtaacttatcaatctctttttgatgttttaggtggtgtaaatgacttgacaagtggatactaatgtttgtttatggagtcttgatgaagcttttaattttatcaaagtttttttttctaaacttctaagtgtatctctttcaggtctaggtctacctacaaaaataattgtatatgtatcaaaataagtaaattaaagtatctacatagcaataacaatgcaaatataaatgattaactgaagataatctctaaataaagtgagaacttatgataaagataacatccacaa

SEQ ID NO: 66955 - DNA, 860 bp, Cannabis sativa
atgaaaatataggaataggaattgaatgaaataaaatttaaaatacataaaaaaaattgataataaaatcattaatttttctttcttgttacattggaatggtttttttttttttttaaaatggaatagtcattccaccaaaatagtgaaaagagcattccattggaattttattctaatactttaaaatgcaaccaaacaaagaaatgaaataaaaattgttttctttccatttcattctattttattacctaaagtgtcagaattatacgaatatatagatacattggaattatgacttggtagtagtattattttacttttagacattaaaattatctctttctttatatgatattgtatattatagttatagttggtatttaataagttttcgaaaaatgataaatatttataatataaatgatttaaatttaatactataatagagttttgataattagataaatgttatgtttggtgtgattttataaataaaaaagaattgtaagtattaattatagtttcacttttaccatatgttaatgtccttactatagaactctcatgagtttttaattgtagtattatcatattttcccaaaaattattaaggatttggaatattgtttttaattgaaaaaaaattatgtttattggaaagtataaaacctcaaattcccttctaatactagtactactttgaatgtagcaacaacaatgggctacttttgactatgtttgggctttagaaaaggaaaaaaaatggttctcattctaagaatacggtatttttaaaaattacaacaaaagattgcctattttcttataaaaagaaaaatagagaaggctcatggatg

SEQ ID NO: 66956 - DNA, 926 bp, Cannabis sativa
cacacgtggcgtccctatagattagggcgttacacagagcttcatctagtccaaggtttccaagatgagctctcatcttctcgcaccaaagacagaagttatttttcaacctaaacttctcaatgtcgaccttaacacttgtcatcttccttgatcagtgcacctttaattctgttcctcaatttcttcttctcacacgccttggtcttgatcttcaccaatcgagttatttctcccataatcataagctctgatatcactgttagaattttccaatagtaactcgatcttgatcctgtacacataagcaatacgtaagcaatacaagaacaacaatggaagaactagaaatgtaatcaaatagaatttaaatcacatagtgtagaggttcgaattttccctcacatttgtgaagagcctaatcctctctctaaattccctcatatggttcaatttgtccattcatctctcgtagtagatagctcgattacaatcaatagcaataattaagagtgtttcaatctctacgatctttacaatcaaaaaatttatatttatactgcacatcactacaataacaactacttttagtgataaccttttaaccacaacatatttttttgtgactaactgtgacttttagtcacaacaaaaaattacttgtgactaaaacattgtgactaaaacatagttttagtcataacatatatcactactacaaaacaagcctttaggagcacttttttcagcataataattaataaccgacactatagggttgaaatttttcggaaggaaatttgatgccacttttggcatcggttatttggaaataaccgacgctaaaagggtttataaccctagcccatcacttcgtcttcctcattcgatcagccaaccctgaaacccccaaaccctctccgcca

SEQ ID NO: 66957 - DNA, 717 bp, Cannabis sativa
  modified_base (26)..(46): a, c, t, g, unknown or other
tatattaataagtaaatctaattatnnnnnnnnnnnnnnnnnnnnnggcataaaacccaacagggatttcatggctgaaacatgtaaaattgttgaagtctacaaaatactaacagctcctacagaaagctatcactggagtaagcaggtttggtcgagactaaacatccccaagcatagcttcttgatatggctagcagttcaagacagactgaaaaaccagggagaggcagtttagattcaatgttgcagcagaggctacttgcattctctgcaatgatctgaatgaaaatacttctcacctattctttgactgtaagttctctcagagttgcttaagtcaaattaaagtctggttaaattggagagtagtatctgtctcactacaaggactattgagatggattaacaggtccaaggctagcaagttcagaagaggtatttttgctggtacaattgcagctctagtttaccacatttggaaagcaagaaatctcaaattgtggcaagcaaacacaatcgatccagaccaggttgttcaagaagtcaaatggcaagtcaaaactaggatcacctatgtgatgcctaagcaagttttaaacacagattaagaatggtttagtaatttgtaattagattacagtatggaagaatcattgagcaatttgtaattagcttatagattggaaatgtacagaaatattctggtctttaatg

SEQ ID NO: 66958 - DNA, 1223 bp, Cannabis sativa
tttttttggaatatttttatacataaaaaaaatttacgcccaccctccaattaaattctgggtccgctactgactacttgaggcttgctcaagtagctaggcgtagggggttagtggagttttgagatccaatttcagcttgtgtaatttaaaaatataataagtgcaaaccactttgtaaatatccctttaaaaataagtggcaaagactttattgttgaaataaagagggacatagctatgtagtggagtcaacttatttttatggacctagcttcgggctgcctcccaataacatcttctcttttgccacatcacattcgtccaacttcacatggagcactccaatatatcacattacattgaaatgtagcttaattaattgcaccattactaaagattcaacaaaaatagtttttttttattttttattttttatagtataactaaattagtcttgcaataatatgaaacatatagaaaaatacatattattctaaaaaaaaaatatagaaaaatacatatcattttaaaatgaaaattgttcatcatccgagaccgagtaatctgaggatcctaaaatagtgatcaaactagttgggaatgggatgaataataggaagagttttaaaaggacgtataagaagggagaccaaagaatttggagattaggtaggtaggtcattagttgagagttgaagtagtattgtagtagtagtctcaaaaagtcacagtccctgtttttgaggacgtccacggaacatgcgcctcaatcctgagtggacacgtctttatttcagaccacatagtcccacttaaattaataagtcttgaagtgattgataataaagctatacattatacatagctatatatataaaaaatgataaataaataaataaaaaaacctacatacctatatatctagccagttccatttctttcttataataataattaaaaaaaataaacacaaagtcaaagactttcccttgtcaaattttcattatttattttattcacattcatgcactgcaatacagtatactagacttagttccatttattcaagatgtcactaatgatatttagccaataaaaaaaaaatagatttttatttagaaaaaaaatatgaaatcagaaaaaaaaatatatatttttaaaaagaatttttttttttggctcctaaattaagtgagcccaaacacaagtctaacccgtct

SEQ ID NO: 66959 - DNA, 590 bp, Cannabis sativa
  modified_base (122)..(129): a, c, t, g, unknown or other
tctttctttctatgacatatcacaaatggtgaccttgtttggtgcttggatgatagcaaaggtcaccatataattaatttgatcagacagagttgaagaaatatataaatatatatatttannnnnnnntatatatatatatataggttactaataagaaatgcataattttttgttttaacagtcacaccaaataacttttattaagagtccatttttttcccatcctatctagctactaggagcctcttatttggtttaaaaaacaaattaataaaaatttaaaccaatagaaaactaattaaattaataatataaatttatataatatgtattaagtaacattgtcttcatgaccatgaataacataatggaaatgggacagagagggtttgaattattggaaccccatgagctcagctatatatatatttctatagttatatgattgaaatttcgaaatggtgctattctatacaggttggtccatgtgagcgatggttgatctgtttttaataataatgtatatcacatgagacgaattgaattgttggaaaagcaaattataattaacataaaataaaataaaa

SEQ ID NO: 66960 - DNA, 2969 bp, Cannabis sativa
aaaaaattaggataaaaagtaaaagtgaaatttgtaataatatacgtaatattaaaaataataacaaaaatgattctagtcatttcattgatcttaatacgaaagattattataccgaggctgaagattattttaccgaaataaagtaatctatctcttcaatcatattatttctccttctggtgtgtctttctctctcttttatttatttattttttataagtaagaaacctttattcaaacacaccaacacagagtcaagtggcagccacaaaggggctacctccctgaacacacagctcatggtaactcccgcgatcttggaatacctagccaaagaatcagcaaccgagttactcacacgaggaataaaagaaacagaataattttataaaaagagctaagtaaacaacaacagtcatgaaaagcagggaaagacccctaggcgtaaggaagttcacggctgtttagagccttgacagcaacttgggaatccgactccaccaacactgtcttgaagtccctttcccttgcccaagttagcgcactgagaatggcaagcaactcagcttcaagaacactctcgaacaaagtgtgctgcagtaagaccactgcattctcctctgcttccaccagttggaccgcactaatgcctgcaatcccttccataactgaggcatcaaccctcaaccacgcctcccacccttgggccaggccaacaccagcagcagggtcctctccagaaggttgatctttaatcagcgcatcactgaactcctaaaatctgcgaaggagtgatcttctcgacagctccaaatttggaaccgtgcctttgaacagagaattattcctgcaactccagatatgctcaactaaacaagcaccaaacaacataaccgactcaatctttgtgtctacgagcctcaaaaaccattcttcaaacgacagtctgcaatggttagtggtacaaattccccaagggctggagaaccacaagcttcgggcaaagtggcaatctctaaacaggtgagtatcggtttcattaccatcatggcacagcacacacagtttatcactctcctgcaagaaccccaaccgacttttaagagggagacaaccactcagagttctccaaagtagatttttctgtctgttatgaatcttgagcttccataagcttttccacaccctcttctcctcatgaaacctgaatttctgagcatgccaatacgcactattgactgaaaactctccgttactgctagccctccaaaacacaacatcgtttttgttaatcaacggctgaatccgcaaaatggcctcagctacacccgaagtgaagcattgtctaatcaagctttcattccacctttgggttcctgggagaaaaagatcagcaactgaggtaaaggcatgtgtcacgttgtaagagaaagagttgcaaacatcctgaggactaaaccccgaaacccacggcctggaccaaatgtccacattgcgttcccccacaagaattcccgcaccactagaacagagggcacgggtggatagaattcccttccaaactctcgagtcatccgacttaacttgaacattccaaaagtcttggactgcacaatactttgccttaagaatttgcacccacggcttatcgttttgctccccatctagcaattgccaagcaagcttcgccaaaagagccatgttgaaatccttaaactttctgaaacccaaccctccgtgccgcttgggttggcaacaatctccccaactcttcaaagctaaataccgcttcccattttttgaagatcctgtccaccagaaccaagacactaggctatccatctcagaacatatagtcacagggattttcaaagttgacatagcataacaaggaatactactgagcatagcactgatcaaggtttgtcttcccgcaaacgattactgtttcgctttccacccctccaaacggtttaggagcttctccttaatgaatttgaagtcatctcttctcctagccgagtagaagaagggatttcccaaatacctttccttcttgtcaagcaactgcaaatcaagaatctcctgaatgcatgatttatccctgccctgcactttcggggagaacaccagcccacttttccttcgactcactttttgtcccgaccattcttcgtatttttctaagcattggccaagaatcctagcttcagctgcggtagccttacaaaagaaaatggcatcatcagcgtaaaataaatgagaaataggctgagctgccttacccactttaatacccgagatttgatttttgttttccgctatacaatcaactttgataacacctcactgcagagaataaacagataaggcaaaagggggtcgccctggcacaggcctcttttaggagtaaaaggtttcagcggcgccccattcaaaagaaccgagtaagacacagacgacacacattgaaggatcatacggaaaaaaaggtcattgaaaccattagctctaagcactcgctaaagaaaactccattcgatgcgatcatacgccttgtgcatatccgttttaatcgccatgaatccccgcttgcctctgatttttttcaacgaatgcaaagcctctgaagcgagaacagaacactctacaatccatctccgtggtagaaaggctgactggaacgggctcaccagcttgtcaagcaccgacttcaatctgtctgtgagcaatctcgcaataatcttgtacccaaaattacagaggctaatcgggcgaaactgatcgaatgaagtcgggttttcactcttcgggataaggcacaggaacgtatgattgagtttctccacaaactttctactgatgaaaaaatcctgcaccatttggcaaacctcaggacccaccgtatcccaatattttctgaaaaaaaactcccgaaaatccgtccgggccaggcgccttcaacg

SEQ ID NO: 66961 - DNA, 1964 bp, Cannabis sativa
aaaaaaaaaaaaaaacttatataaggttagttatatccgtgacaactaattttatgttatattttattagctcatatttaattatttatttaaaaacaaattcattaattataaaaaattgaaattaaaaacgtgtaaatttattaaaaaattttaaatagatcaattaaaaatctataacaaataatcaaatttaaacatttgaaacttaagtttaaacaaaacgaaagtaaaaatcatcataagaaaacctaatttttttttttcaatcaaatccaaaatcataccactctctcatcaaaaaaaaaaaaaaaaaacatatcacttcattctaaatctcaatccttttgggttaaagaaaagggcaaatttgacttggagatttacttttgatcattatgtaggtatgctcaaacttacattttggaatattttattttgtattccaaatttaattttagtgagttttattttgattattttgctgtgttgttatacagttcatgtatataatccaccatggtttgatttaattcaatttatggtatgtaagagtgctaaaagaacatcatcaatatcaatggtgggtgttagtgatgatattgataatgatgacataattttggaactatatgatgatctcatccatcacatcctatcgtttctcccaactcgagatgtgattttgacatgccttctttcaaagcgttgaaaactcatatggtattcagtccccgcactcttttttgctaataataatgatgatgataatgttgataatcttgaaaagttttacaattatttcaaccaatatttgaaacaccgcaaaaaaggcatgtattttatcagcgattcaggcataactagttttaagtttgagatgcatccttcttcttatagaaggaaagatgaactcatagataaatggttagctttcacgattgagaataatgttaaggaaatacattttagtatgtacaatacattttggatgattgaggatctctattacttacctaaaataattgacaaggcaaagtatttgactattttggagttaaaggaggtaaatttggatgcttcttgttcatttagtttttcatctttaaaaactgtcattgaatgatgtttggaatggttataatgcaaaagatgacggtctagctaaatttttgttgggttgtccttttcttgagaaattgcggttacatgattattcttttttagataaaaaatttcagtttgtacagagttcaatcctcaagttcatggaatttacttatgaaatgctttcttcattacgaattgaagttgacgccataaatcttgaatctttgatactaaatggcgttcccttggacaggataaatttctcttcttgcaagaaaattacgagtcttgcattatttgattgttattgtaagaagaattacccatcatcactagaaattctcatttcaaatcttcctaatcttgagttgaaggatgccttaatgtggatttcaccttctttagaatcgttatctattaatgaaaaagtcattttttagctgctttacattgctgtaagtaattgctcattttgaatagggatatgacttttattactattctttgctaaatggtactttagtttatttataattaagattatgtttagtagctttgtactaatgaggtacgctcattacttatgttacgttattttttttattcatttatttgataagcattgctatgagacacccatagtacttagcaagattgttcggcaccatgggtgccttatttgattctatggtttaattttaagttgttattggtaactcatacacaatatctaatgtttgtatgtttttgtatatgtttataaacatgaaggtactcatttggccaaaaaaagttgaagaacatatattgttattataagaatatttttatttaaggaaatatatttctattta

SEQ ID NO: 66962 - DNA, 1287 bp, Cannabis sativa
aaataatcacaaaatcaagcgtcaaatgcatatcacacaatccactagacccctagctctcaataccaatcatagaaaataacatccaaaattggtagtcgcacctaataaccaccgtaataccgggattcaaattcaattcactccctgtacagattctaggtcgttcacctacaggtgagtggacacctgatctacctatgatgatacagagactaggtcgtggaacaacaatatatgcacaaatcataatcaacatgactctcatataagaataataaaagtacatattcccttttattttttagaaaattcggcaacatataggttgtattttaaataaactaaaaaatcatagcctgcataattatttgtacaaaatatatttggcactcagtgccccaaaacagtccagaaaaatgtgcagaataagtttttaattttttaagcaatttacaaatcataaaaatatgtctaatttattcaacacatataaaaatcaagtccaatagtcaaattgagtccctacctgtcccaagtcgttaactttgtctaaaagacaaactaaagctctcaagtcccgagctccaattgtttagtctaatcttagatattactcttacctataccattaaatggataaataattatcatcattgtattctactctcaaaattgagtctaatgacatataatatgactctgtttgaaatttggagttctaaaatctcacctaagcagtgcacattaactatcagtggtagtagaaattggtgtacagaaaacgtcaccgaaaataggggtagtatatatatatatatcatgatcaccttggcgactaaattacactcatgccacctatttgttaaaacagtacacaatattgccagaaagttgccagaaaagggcagagctacaaaaatgtcaccagaaaaagtagcgagttgggtgaaatggcttagtgtaggttattctccttgacgagttgagtctaatggtgaagacgactcatcaaacggacaccagaggtggtcgaaaaatctgttcaaagtttgaacctccaaactttgatgcgatcccgggcgaatggcggcgaaaggggcagcaccacttggggttgaggtcattgacacttggggattcgaatggtccggcgcatggtgctagacagtggtcggagaagggttttcggagtcacgctagtgatggcgtttgtgggttgtttctcttgtggtctgaaagagagagagagagagagagagagagatagaaagagagagagagaga

SEQ ID NO: 66963 - DNA, 764 bp, Cannabis sativa
  modified_base (529)..(529): a, c, t, g, unknown or other
gaagatcccttatcccacctcaagtatttcgagatgcaaatggacctataaggagcacgaggagatgtatgttgtagagtttttcctgccacactctcaaaggtcgtccaacaatggtatttaaagttggcgcttggaaagttcaattgatggacggctttctcctcgaaattccatggacaattctcctcctctcgccaacttccgttgcacctaagagatctagtcgaagtgaagcaaagaccaggggagcctctccgagcctacatcaacaaattcatgatagaggcgactaaggttgcacggctaaccgaagacggaaagttgtccgtgatacttgggtgcattgaagtccttggtaaactttggaaggacataagaaagaatggaccagtagatttgatgagtgactttcttgaccgtacagaaggtttcattaagcttgaagaagccattcagcgactagagggtgaacaaaaacctggccagccaaaagttccttctattgggacatccgtccagctccccnattacccaagcaattcaagctcgggtggtaaacggtttaacgacgaaaataggcaagggaatgggaaaaagggaaagttcactggcacgatcaaacaagctcccagggagaatcctaccaagtatactacatttaccatccggacggatgatatagaaagtgtgtacatggctactcagtcgttatccccgtacaagaagcctgcacccattgaaaaagatgtcagcaagagaga

SEQ ID NO: 66964 - DNA, 1958 bp, Cannabis sativa
atatatatatatatatagccatggaaacctacactatcaactgcaagaagattcatcttttgacttgaaatatttgctagctttttatatcataatcaaagatgtttttttcaactttaaattattataaatatcttaattaaaaaaaatagattatgagtttacacttatatttacacgaacggtaatgggatatggcatcatcatcataatcatcattaattatgatatttcatcatcaaaaaatgacaaaaattagtgtttgcaatttagtccttgtaaaggttaataattatatcataactaaatatagtacaattttcacactatttgctttctagagcgcgctacattaaggagtgtagtttaaaatgaaaattaaataccatttaatttaaataaatgttaagagttggattaaaatctgattaattagtataataattcataatgcactatatataagagtatatttaaattaaattttgaacaaaaaaataaaatttaatgacctgaaccaattaaagactgtcacgtatgacttttaacaatcaggtacttacaaaatttttgttttataggtgtctgactgttaagtgttaagtaaattgttacgtggaatctgtgattggtcctaattcaaatatatcaataaaaaataacacgtggataatgatttgacatttaacgctcacgtacctacagagttctagaaatataacttatgtattattactgctaaaaattaaacttaagtatttattttaaactgaaagttaaatttaagtatttatactgtaaattaatcaatttttaaaagtataacttaaatattattactgtcaaaaattaaatttaagtatttatttacaattaaaaattaaatttaaatatttaattatactacaaattattctatatatttaaaattagattttaaaataatagtccaaattaagaatatgtttcatgtgaacttgatttgtacttttttgagataaatgtagaaaatcacataagcattgtatatataagtacttagtacatatataatagagtgaaaggaaaagctaaagaatctatatatgcatatagtagtgatgatgtaagaaatggaatatattacgaaataaagagaagaggagggccatacatacattataatagatatatttatggaagaggtctagggccacaaatataataatatatatgtataaataaagatggtttgaattgaaaaattgaataataataataataataataatagtgttattaatatccatttgacattatgagattgactttgcatatatagtgtggggttattagattagtctggcaatggtggaaatccaagtcattttcaagtggctttgtccatactctgtcctttggatccatattcatcattgcataaattcttatatataattaattatgaaaaattaatcctaaaattcactaatatattatattattattaatataattaaatattaaattttatttatcttaatttagtaattattataaataatcgctacaaattatcactttatttttcgtgttaattagtacttctagtatatctcatgctagtataatttttttttattatttgattgattattttaaactttattttttttacttcatataaattattctaaaaataacaaaaaaaaaatgataaaatatttatagtgacaaacatgtcaattaaggttgtcgaataaagttaaatgcatttataaacacaaatatgtattagaatattttcatagaacaatccaaatttaattaccaagaaaataatatataatcaacaatatacattatgatttagaatgacatagttttaaaaaataaaatcatggaattcttttagttatagagaaccacaacaatatatgtattaactatatacaacatatctcacttcttcatcacca

SEQ ID NO: 66965 - DNA, 1243 bp, Cannabis sativa
aagttgacattccaactagagtttatgttttctggtctgtcttagttaagatggctcagtttttgtactttggcatgaataaggcctatcacaaacatatttgaggcatcataatcagaatcagaacactttcatttttgagcacccgaggcagcacccaggttgacatattatcaacctagggcgcttccaatcacaatactgaagaagtatcacgagcattttatttgtctctgtccaaaacgaggagaaaagtgcttttaggaaagaactggatcgacttagaggccaaagcagggacccaatgcccacgttgacctaggcgctgggccaagcgcccaggttgacattttttcaacttgggccatttccaatagtagtttagaagaagtcttctaggaatattctttgttttatcaataattaagatttgagtgttttttgggaactaacaaagtcatctaggagccaaaactgggacccagaaatatgcaagttttgctgggaataaaacggaaccatctggtggcaaaaagttggacccaacaccaggttgattgacactagtgttgtgcccagagcccaggttaacatgttgtcaacgtgggatatttccagtcattttcccccaaaagtgttttgagtagagctgtacatcggtcggtttgggcagtttatcttatatattttctaacccaatctaaagttcgggttgctaaaatttaagtgtaacccaaccaatttaaaaaaaaaaatctgtaaatcgaccaacagtttgggcggtttggtcgggttaacctgcccaaactggccaaacttttttttttgtttcaaaatcaaagtcaataaaaattaaaaaagataaattaaaaatattagattctaccaaatcacaacacaatatatataactttgaaactaacaattaagtatataactttatattattatatatttaaccatttatgttatatataataaaaattaagaagtaaaaaaacataataatccaaagtcaggttggtcggcttattcgatttaattgggcgagtcggacctattttcaacccgcccaattaacagattgggcggtttgtaatttttttcgggttatttcgttttgtaatttttatcggttttttcaatttgatttggacggattattcagtttgggcggtttttacgaatttttttgtacagccctaattctgagcatcttttttatcttcggaaataatgaaga

SEQ ID NO: 66966 - DNA, 1668 bp, Cannabis sativa
aataacacactaaataagtaatgaaaataaatctgtttctttattgataattcaatagaaaagattaacattgaaatagagttttatttagggcacaaagcccaacataaaaaccaacacattcctaacctagtttagacttgttagtaggtgtatggatgcctagttacatgtcggttatatgtttatgttttatacttttctttattgagtctgttgactaatagatatatgtttcatgtgcaggtaaaggctagggctaaataattgtgagtattggggctcagtgaagattgtacatatctggatgattagacttggagtgtttagatcttcgggacaacacgagcttagtttcattagtagctaccaacacttttgttatgtttaaatttaaagaatagattttgggatcccgggttcagtaaaaagtttacattttttatgtttatttatgaaaatattttattattataaagtttcaattaaacacgattttataataaacactttgattagtaaaggccatcatagtaattaaagaaaagcacggtagtgcacctaaactagtagggtgttacatgttgatttggttacagtcagaataagcgttcatgaatgtgaggagttcacagcctgctatagcgtccactagttgattgatttggggaagcagaaaataatctttggggaatccactttccatttggtttgggcaccagaataaggttggatacccacaccgagtaaaaagcttccttaatgaaattgttttcctattatctctcgacttcttccttgagagccttggagcactctttgtcaaggagtctacatttctgttgtacaagcttgaattttttttatcgatgttgaggacatgacagataactttggggttgatcccaatcatgttctcatgcgaccaagtgaaaatgtcttaatttttcttgagacaagccacaagaaatgcacttaaggcctttgttaggttcgtaccaatcttgacaaccttggtcgagttcgtcgtagtgaaggaaatttccttgagttcctcgatcaaacctactcccgagtcaatatccccaaaatgagggtcaatattgtccccgtcttcggcacaccttcaagtagccttgattgcggttaccattcattaacccatgataagcttttctgatgtaaattaatttagcatttgggataaaaaaaaaaatggattatttcacaaatacacaaaaacaaaaaaaaaaaaaattacaaaaatacggttatacagaattttaatcatttttacgattattatgattttatttacagaaaatacggtcttttgatatatttttatgatctactcttgttaatttgttgttattttttgttgttgtttacttagatgttattatcctgttacttttatgtattttttttgtagttttcatatttttttatagaataccgtaaaaatgtaaaaaaaagtctttcagtgtaaaactataattttttttttacaaaaaatagtattttatataagaacattattattggacaccaatgatacccaacacttctataggtggcatctcacaattagttaacgatattttctaaaaattatttttttaagttatatgagatctcatgcttatttacactaataatagtatg

SEQ ID NO: 66967 - DNA, 1233 bp, Cannabis sativa
tatagtcgtgtttattataattgtttaagacattttgtgaaattttgagaaattcgaaataatttataatatagaatgtttaaatagtttatttcacgcacgtataaaaaaaaaaatcatgcatgcaacagacagtttgaaccttattttcagtgcgttaattttttttttattttctcagaattttataggatgtcttaaataattacaatgtacatgaccacaaaaaaattagactaaaaaaatttctcgattgccaaaatagataaaagtgcatcgatgtatcatttttaggaagtgaattgaaattttctaatactttataatatttattaaatatttcaaaaaaaaaaaaacttggtacaagagtagtttttgatcttattattataataatatgacttgaaatatgcatgaaagttagcgggttttggtttaccttaaacgagtttgagtcaattttcacgttgacctgtttaataaatggatcgtgtttgagttgactttaaaactcgaaattaatccgttaatgacttatttaaaattaatttatggcattattaatagatcataaatgtttgtatatgtcataaaggcattatacatgtggccaacttggatggttcttgtgtgaagcttgtcttccgtaaatgtagtgtcttctgaatagcttgtcattaatctggaaacgcaattttggatagcttactattagtcaaggatatgttcatccataaggagtgcttttacgaatcggatagcttgtccgtattaaagcttccagattatctactgaaagcatgttctcaagcttacgtggattattattgctagtgatgagctgaaacatttaaggcggtgtaaatgtgtcacgatagtttcagagctaatttagaaaacaatacaaatctataaatagctatcaaatctttgtaatcaagtgagtgatttaaattataattgcttgaacgaaaatcatgatagtgtaaggttgatagagatagtctaaactagatagagatattttctcgtaatctttgagagtttgtaaggattcttgtaaccttgataaacattgatatcaataaagatatgagtactattgttgttccgaccgagatatagtgttatattattttataatataataataaagtagattaaaatgtgataaatatatgtgaataatatatattaagtgtatggtaaataaatgtgtaacctatgatttta

SEQ ID NO: 66968 - DNA, 1130 bp, Cannabis sativa
aaccatataatttataaggggaattttatttgcacgctacaaaataataaatatatttttatattttttaaaaaataaacttaaaataatatttaaaaattattcttaatattttttaaaagaattcttacattattttgtattaattttaatattttctaataaaatttatattttttattttaattttatttgttataatatttaaaatataatttatttctatttgataggtatattttttaagaatatgaattggaaaaaaaaaataaagatatatattttatgtaaaataaaaattattatactgaagtacattaataaaattttaagatgtaaataaaatttccaaaaatataattgttgaacctgaatttttccatcagatgaggctgcatataacatttctccaagtgtatctgaggtcaaagaagtaaatttggtgtgtcctcctccacaactcattttaatggaagcaattcttgtatatctctctttaatccaaatatcaatgtttccacatttagaggctgtaaatataaaatcattgtttatggatattccttggatatcaaatccacttggaaatgatcctattattgcctttgatgacaacaagaatatctgagaaaaaagaaaaattgaaacattatcataaacttgattaaataattacatgagtaatttgtggcataaatatttaaatttaatttaaagttacagataaatatctaaatttaactctcagttacagataaatatctaagttttactcttggttacaggtaaatatctaagtttaatttttgacattaataatacttaagttatattttttgaattttcgtaagtaattgatcattaagtgttaaatcaatagccacgtgacatccacatcattaaatttttattttttaatttaaaaattaattttaatatactgataaaaaatgacatgtggataataacttaacacttcacggtcaagtacctatgaaagttgcagactgtcaaaaattaaacttatctatttatctgcaatcaaaaattaaacttaagtttttaagccgcaaattactcttaataacatctcgattaattgcaacataatctctattcaatcaaatatt

SEQ ID NO: 66969 - DNA, 642 bp, Cannabis sativa
taccactcttttatatattcacatgttattatatatttaagtaagagaaatttagacagtgtacttaaaataagatttttttacattttaattacagattttttatttgagtaaatattattttagaggtttataaaaattacttatttggttttctgttttgttaaatgataatacagaccctatatttttttttaaaaaaaaagtacaaaatagactatgagcttaatttttgtcaaattaaaatttaataataacctgatctagaggtgttatgaccagattagttacattttttgtatctgttcgtggtaaaaactgatttcatgttggttatataaaaaaatgacgaaaattgagtttaaagtctattttgtaccattttaaaaaacacagggtctaaattgtcatttatcaaaacaaatagtgtaatcagtaacttttacaaaacacaggatccaaaatgatatttatcctttttattttacatttttacatattctcttttttttaggtttttcacttgtttttttttttttttttttttgtttttttagaaggaaacattatttttatgttatagaagcaatgtgataataacaaaaaaaataatactccgtgtttttatataaaaaagaaaat

SEQ ID NO: 66970 - DNA, 1174 bp, Cannabis sativa
aattttaaaattttataagcgtatttttgtaaataaaaaatttaagccgtaaaattataaataaaatatataaaaaaatagtatttttgaaaattttcaattcttttcaatgaaaaatatatataattagaaaaagcttttaattttgaaaaaaaaaaaacgtttatcaaaagactagaggtggtttgcttcataatttaatgttacagctaaattatttctttggacaggtaaaaaactagaggtcgtttgatcatctttctcttaattgcactttaagtagaatggttggttcttagttgaaatggttcattggggaaaaaaaaaaaaaattggctcttaatataaaaataaatagtatttttaaaaattattaaaaatatatatttttttaaaaggttttttttttatttgggtccctaaaataagtagatcctaagtgcgggtctaatctgtctatgcctaaggccgattaaagtatagtttggggtgaaaaaattgtaaagggaatgctcatatagattgcttaaatgattacgccatgaacattcggttgctgttgaggcatcgctggtgtatcatctttggaggtcccgaaatgtggcctttttggaacgtaaatttccaagagttgagtgtataagtgatccaaattaagagggatgtcttagctcattgtaatctttttttgacagataaatcttgtatatataaaaattgggtgcaaaccttacatgtataggatgtttattgcttgatactatcttgtacatgttcctgtattttagaaacttttattggtgtttgtagttggtttcgtgagctataaattttttacttgcttactggaaaaaaaatgttaccacaaaatctattaataaaataataaaaatatcacaaaagtaaatagaaaagtatgcaatttttgcaattcgaatattatataatttataaattttaatcaaattgatagcattaattttaattaccaaaacttaaatattacatatttattatgtctcaaatttacattatttcttaacatgttattggaacttatttttgtgttaagtaccttatattttagctttaaataacttatttacatctccaaaatatatttcttaaacattataatattaaaataaggagcaaacaaaatttagttgatggt

SEQ ID NO: 66971 - DNA, 821 bp, Cannabis sativa
agtaactctaaaactatttagtgagacttcaatgcgcgtcactaatgagggtgactggaaagatagtttttagtgacacttcacacgtgtcactaaaattttttacattcactttctgtgcgtcactataagcctatagagtcaggttttgtcagtctgaaaaaataacagccacacacatgaagtgtcactatatcttttttaattctttttttttaatgctaatatgctttttatatataaaaaaattaatattaatttttaaaattcagattatatattataaatttataaaaaataatttaattaattatatatttatcaattataaattaatatattttaattttagttataaaattattaataaacaaatatatatatatttattgtttaattttattctaatttaattttattttatattattaataaaatgataatatattattaacagaatatttgaactgaaatatagactaaacaaaattataaaatacacacattatactttatatcaaaatgtacattaggtatatgacattaattttaaccaaaaaaataaataaatcacaggaaatacatttaacaaaaatcagaacatgtttagaaccaaaaaaaaaaacctaaaaaactaaaaataaaccagtcgtaaatctcggaccaccaccgccggccattaacccaaaccattcttggcgaaaaaccccaaattacctcagtccacctacacagcaaagagagagaaacagagagacaaacaaaaaatcaaataatcatataatcaaataatctaatcagcaggcttcataaaaatttcc

SEQ ID NO: 66972 - DNA, 1996 bp, Cannabis sativa
atgtgagaaatagaaaaaaaaagtaggtgggcacatgggaaatgtggcgagaagtaggtgacgattttttaatgggtaaaaccgtcaggtataagactctcctaaaagttctcattttattaaaaagcgtcgcctatatattttgtttactacaattttaaaccgtcgagaatactaaatttttcatgacagttttaaatagttatttaatttttttttaagaacgtcgcgaattttaatatttgtagtagtgtaaaaatatattaaaaaaaatatggatgtaaagcatatttcatatgtagctacttttcttagtagtctcacttggagtgtcacgtgcttgactataaacaaactttctcaacttctaaagtataaacatgctaaaatgtattagtggtgttattcttttacgtgttaatattgctattggttcaattaagtatcgagtctcatatagtttaatataataatttttagagagtatcactaacgaattgcaaggcgacatgtctagacatgctagacaccattgatgcccaataacaatactcttttatggctacttttcttcgatcttcctctaccaatgaatgaattttatgattttgtcacatattaattaaaattagtataaaatatttattgagagattatattaattctgtaatgatatataattaatatcggtggtgtcgcgtgaaatctagagttatttaattaattaattgcatacataataattattattaattatatgaaccgtgcaaccacgtccatatatatggacattaattatttaattttattagaaaaagcttattattaaatataattttcatgaattatctttcttttttttaactcattttcatgaattatcttaaacagcaaaaacacacacaaattatttattatctcttaattaattatcagtactcttaatttaacaaaattctcaaatatatgtattgtttaacagttgatgaactaactatataatatcatatatatggatgttagtgaatatttattccccaaggtatttatatcgaactcataataagtgaagatatatatattatatttatgtaaatgtaataattagacgtataattttcgaattttattttattaaaggcaaaaataattttagcatgaacatatatatacttatttgtaagaatttatatacataaatatataaacaaattatgaagaaaaaaaaaatgagagggcaataacgaaggacgacggctttggcctttttttttttattaaaaacataataatatataattcatactttttcccaaaaattatgtacattatttggtccctcctaacaaagtttcttacattttgacctaaaatcaagctttcctttttgtttttgactgggtattatagttatggatacttctacaatatacattcttaaaagaggtttatgatatcatgtactttttatctgtttcagtaattgggaaaaatttttagtttaatttttttatagtcatctatgttgtagttatttaagacattttacaaaattttgagagattcgaaaaaatataacacggcaaaaataagattcaaatagtctgttgcacgcgaaattcttttattttacacgtgtgaaatagactatttgaattctatttttgggcgtgttaaatttttttaaatttatcaaaattttgtggatcgatatcataaataaatacaacttaaataatcataaaaaaattaaactaaaaaattctttaaaatattgccaaaataaataaaaatacatcggtggacagctaaattttttctatagttattgtatatcaaatattaaatatgggatctatcggatctcatttcaatgttttgttaataacaaaattatattttgttaactatatattaatattaattattacatatttttggatgaccatcaaactcgaacatttagtaataatcccaattactacatatatatata

SEQ ID NO: 66973 - DNA, 829 bp, Cannabis sativa
tgtacattcaggggtggacatgagttttttgttgtattcttaaaacgatcactctagattcactactacaaatttaccttttagtgacacatttgagtgacacacatttttttgtgtgtcactaaagaattagagatgagctttagtgacactcacaaaataactctaaaaatacaatgttagtgtcttagaatttgggtcactaaatgtatgaagtgtcactaaaaagttattttcactttttatttttatttttttttataaaatatactggtatatagtgacactcctagcgcgaatgaataagtgtgtccctacttgcatagcgcgtcaccatatcctaatctattttttattttttttttattttctttttaaaaattatagttgggatccgtgtaataattattcatttttttcctttttttttttttaaatatggactgatttcaaaattttaataatgataataaatgaatttattaaagtagcaataaattattgatttcaacaaaaaggcattaaagacaaaagagaaaacaattttcaaaataaaaaccctagagtttctctgccttctctctctcgaacgatgcttcccaacccagacggcaccaccggcttcccaacccagacggcgccatcgacttcccaacccaaacggcgcctctcgccgactccgaacctgacggcaccgaaggaatgactccgaacctcaccgtctccgcttcctcttctctctgccttgcccacgcgactgcagatttgaaactccaaggtatataaactggtcttcttctctgtttattgtctctctctctctctctct

SEQ ID NO: 66974 - DNA, 1122 bp, Cannabis sativa
tgtattattaattaaaagaataatacttaagtttaactttcagttattttcaaaaaaaaaaaaagtttaattttcagttgtagataaatatttttgagtttaattttttacggtaataatacttaagttatatttatgtaactgttaaaattaaattaatgtccacgtggtagtccttaattggtccagattattaaatttttattttttatttaaaaaatttaaataatgtaatgatacttgaaatttaatagccagatatttactaaaattttataaatataatttaagtattattattaacgttggaaattaaacttaagtatgttaaacttaaatatttatgctataaattactctaattaaaataaaatttaaaaaaagaaattattttctacgatcaaaactacacatacaatagattatttgacatttgtgtacgtatattataattaattacaccaagaaatatctgaaaataataactatatacacgtagaaagactgaaatagaatatatatagttgcagcacaaaatgactcccctatatatagacatgtatgatgtatatatgtacatatatatatatatataaatacatccgcttgaataatacaccaaaatagtcatcaccatcgccatgcagtcattaaattatatgaattttggactgtttaatgatgacaatgaataaaactttatgattcgcatcatcatattatttggacctacatgacgaaatttataatattaatatttctttttggcataattaaaatttgacagtagacagtagtcttgtttagctgagtttaggtgaccaagtggtgtacatgttggtgtgttttatagtagtatgctgcctagtttatatgataagtgatattttcataaatattttcaatattgtccaaattaaaatagaacttggtattagtcatttattttggtctaaaaatacaatcagatttgaagaactatagtaattagtatgaagtcatagccatatgttttcagagcaaaaattagtagaatgctaaaagttagaatgctcttttagagggagaactacttgatgttagccatctccaccacccctagtaccttggtgctaagcaggg

SEQ ID NO: 66975 - DNA, 572 bp, Cannabis sativa
aaatttaatcaatataagtcaaaatgatacaaattttaaatgtaaaagcaccaacatttaaacaatctaattcaaaaactacacaaattttaaacaaaaaagcaccaacaaaaagctcacttattgtagtgggtgcaaaataatgcaaaataaagagttttttttttaaaaaaaaaatctaacaattttagcaagtattaaaattcttatttgaatttaaaaaaaaaaaaaacagttattaaattgtattgctcaataaaatactcattattacattactactatttaaatattacataacaaaattttcaaatatcaccagcccattgaagctcacgcttagtttgtttaaacaatgaatgagagttaaatgtggagcaaaatatgtcaatttgaagaggatacaaaagatacaaaaacaaagtgattggaacaatttgaagtgttgtgataagaataggtatccacattgaactttgacgatacgcaatgaacaccgccatacaaaaagcaattgtcatagttgccatggagacgaaaagcgaagtgagtccaataatcaacctcttagg

SEQ ID NO: 66976 - DNA, 631 bp, Cannabis sativa
  modified_base (345)..(347): a, c, t, g, unknown or other
tttttttttctaaagggcccaatttaaaaatttcgcacaaggcccccaaaatacttggcccggccctataagagaatactaagcaccagtggtaccctttacgatttttctttaatttattattactatatatatatatatagctagctgagaagcctgaaatgttacttctaatatgcgatggatcgaatttaaataattacctggctctctattccatgtaactcaattaatgatttttataagcattattaaattgttgcttaacatgtatttttcctccgtttcctcccggaagaaaggaaccctctctccaagtgccttattattattattatttttttnnnaaaaaaaattaaaaaaaataatgatgattaaagaataaaagaatctatgcgtaccttaggtgctctctgagaagatcgaaaagaatcagagtgttggtcaaagattctgataaatgttaagagagaagaaaagataagagaaatagggaaaatatggcctttgccttttcatgatgttcaagagactcatgttgacacggcattattattgcggccattcagattttaccattaatttgataccaacgaaacttataataaagacatagagagagagagagaga

SEQ ID NO: 66977 - DNA, 1847 bp, Cannabis sativa
  modified_base (32)..(60): a, c, t, g, unknown or other
  modified_base (1043)..(1043): a, c, t, g, unknown or other
tttagaaagttcttatttaggatgttaataannnnnnnnnnnnnnnnnnnnnnnnnnnnngtaaaataaatttccaacagtaatacccacaagggacccatttattttaaaacaaaattaaattatgaataaaaatggtaaattgtataaaaatattatatatgttaataatttaaaatagacaatactatctaaaataaaataaaaatatttaaaaatttactaataataaactacaaagcacataaagataatatatgataattaaaaataatattataaaataagtaaaaaattaaatgggtccccatcgaggggatatctccatccccatatgtgtaacattccctgttctccccccatttcccatttaggcgaggaatccttacccggcccattaggggcgggtacccatgggccctaatacacatcggtgcaatttccatccctattgccaatacaaggtacaaccatgtataagattgtatagaaactaagagattgattggcttcataactaaaattttattttcagtttataaaaatagaaaataatttttaaaaactaatagagagcatttggccaaattttctaaaaattgttttttaaaaattaaattttaaaaaacaaatagaaaacatcaaaatgttgttttttatttcaaaaatatttttttgcctgacatattcttttttacatttttgctcacatacttgaacttgtatcctggacccggacccagaatcgaacccgaaccctgatctggactcggtccccaaaccccagacctggaccttagatcctagacccaaactccagacctaaacacatacccaaactctaaccccagatctggaccccaaccccgaccccggatctagacccggacccggatccaagtccaagatttagttcgaggtgggatgtgttcatgtcatggttagggtataggatattgaatttttttagtaagaaaaaaatctaataatagttttaaaaaatttgggtcaaataccattaaatttttaaaatgacaaaagantattttctattctcacttttgaaaacacaattctgaaaattaaaaactaaaaacacaaccaaacagctagcccttaaagatgttgaaaagtgttttaaagcataataatgagcatggtttcaacaatattcagtggctgacacacaaaagcatgtcaagttcttatatagagtcaagctaatctcaaaaagaaccttatatgatcagctcttagatatggaggcaagggcaagacagaaatacacaaaggtacaaaaaacttatgtttatttatccgggtggcaagagattatcatgattgtattgcacgattagataggaaacaatgtaacttacaaaaggcatctcaaggcagccgacgaggaaacaagggaggcaagacttcgtgagggtggttggagcacaactttcacgttcagcttttgggtatgacgaagagggaaagacaccaactgctcgttggctttttgatattgataggccttaggataaataaaaagggcatatgtgtaattgtaatgggataggagtattatatataggaaagaatagtgagaaaaagggtgtgaagaatttggtttagtttgtaactttgggagagaaccaggctctcgaaattctgggtattaatgaaaggcattccgccatttttatccaaaaactattattcttcctctattttctgcaattgattaattttgataggaaaattcctatcaaatggtatcagagcacaagttcataggacctgagaaggacactagtatggagctgatgggtgaaagaatggaggccttccgctca

SEQ ID NO: 66978 - DNA, 678 bp, Cannabis sativa
aaccgacggcataggtgcacacgtgtcaataaagtgtgcacctatgccgtcggttcttagctaggaaccgacggcatagggtctcccaaaaaccctcaaaaattccccatttccagccgacgggataggttttatttatatatatacctatggtttttaccaaaaaatcgcctctaaatgtcaatttcgaatcaggtgggtgttttcacaccctttagcttccctttctataaaaagggttaaaaaaggggaagctaaagacccatattgtagtagtggcaggcagagcaaagtctaaaacaatcatcttcaacaacgggccatttgccttaaagtttgttgccaagagatttttaacacccatttttgaaggttttttcaacaatggtaatggggaagataaagaccaagtaatggccatttatggaacagaaaaaagtaggaaaaagcttggcaaaaatgttgttagatgatgaaggatggcaattaaggaagatagacaaaataattttttttttatcaaaaatagttttgatcgttggacaagttttcaaacagaaagctacaatgaaaactaaaatgaaaatgaaaaaaaaatagaaaaaaatttgatagaaaaggaggaaaagtagattgtgaaggtggtataatgacatcatgcatgtgtaagaggtatta

SEQ ID NO: 66979 - DNA, 957 bp, Cannabis sativa
gaattgacaaatcatgagaattaaacttttgaacatataatcattattatattccactgtgctgatgacactataatcaaagacaaatatatatatttatatatgttatggacttaatagaatttatacattaaacatagtcatgaaataaatcatttaaaccatgcaacataaaagcgatttgtgatcttacattaattagtaaatctgattatattgaaatgggttttatttattagggcacaaaactcaataaaggctccatgcggttaccagtaacaagttgttctactggcaccactagaaccaaagtagccggcacttgctgaggaggcatagtagaatgaccttgctgtctcagcctctggatctctttatcttgctgattaattcaggcttgcatttctacaaacctttgctcccaatccttaaaagtatgtggtagattttcataaccagctccttgaaatctaccatggcctctgccgcgtccacatggatgtagaggattttgacctccccgaccgcctccagtctcaaccatattatagggcttagcttgcgaacccataagtcaggtaggttagacatcaatcatatataacctaaataccgcatagatggatttttagggaacacattaaaaaactaacatattactaacatgcttcctatctgaatttctaaccaaataaattactaaacaagtaaagacttactaaatcctgagtcaagcttgtctctaacgatgattgtacatatcttgacggtcttcgataaacaacctggcaacttccataatgattaatataatgatttggacatccataaataatatttcataataccccccttggatgtccataataactgcctcaataaaaacttctctgaaaaacttggtcaaaagaaaaaaagtacagtgtaaactaactccccctcatttagccatttgtg

SEQ ID NO: 66980 - DNA, 757 bp, Cannabis sativa
gcttcttccaaagcatacgactttctggatgtagatgatgatatctatacagatggatcttctatctatcgtataattcttatatatacgatataatgaagtaccacatgagtagctatagtgactagatttgtggtgcctgttgtggtggcaggattgaccacatccacgatattcataggaataatagatgtggtttgaacatgaacatcaagatctgcagtctgtgggtcttacaaaaacccaaagatacatatggtgcaatcggacttcttctcgtgttaaccatcgcgtttgatcagatacgatatccactcactctcaatgacaacaccaaactgttgacctcgaaaagttgccaaggaacaatgtcgtataaatctgatgtttgccacgtgatacacaattagaactcgaaagttaagaacacaaagaagtttattggggttcaacccccttagatagcggggaatgacctactcctattttagttgtattgataccgagggataatactactctgatcattataggtgggatatgatatagctcccttaagatacaaagtatgaatcaaagaggacaaatctcaagtgttgagaatgctatatgggcttgtagattagatagagagagtgatatgaaacttagagacttaggcttagaatgaggtttggcacctagtgacttaggttttttttggattgagttaagactctttatataggagagcttaaactctaatttaataataaag

SEQ ID NO: 66981 - DNA, 1523 bp, Cannabis sativa
  modified_base (1454)..(1454): a, c, t, g, unknown or other
agccaaaacatcatttcatgcaaaatttattttcttacaattcaagaaaacattaagagaagagctaagaacctttaccttgattaaaatcacttaaacccctattgaattttcttgaataattgaagaacaaaatgaaccctagctgctacaagcgtggaacgagagagagagagagagagagacagagagatagacagagagagagagagtctgagagaaaaaagcttttcctttgaatttttcttattttttggaaaaataggcgaaatgaaataaataagtgattttattaaatcctttttgagccaaaaactaacaattaaattcagattattaattcaaattaaacattactaaagataaaagactaatggggcaaaattaaacattacaactatcccccccttaaaaggatttcgtcctcaaaatctaacctgaacaactctggatattgagctctcatgtctgattctaactcccaagtggcttcctccaccttgctatttctccagagtactttgactagagctatggtcttgttctgaagagccttatcctttctgtcaacgatctgaactggttgttcctcataagacatatctggttgcatctcaagattctcatagctaagtacatgagctgggtctgaaacgtattttctcaacatagagacatggaatacgttatgaagtgctaaaagagctgcaggcaaagctaatcgatatgccacttgtccaacctttttgagaatctcgaaaggtctagtaaacctagggcataacttgcctctttttacgaaactctttatccccttcattggagatactcgtaagaacacgtgatcccctacttggaactcaacatttctgcgttttggatctgcataactcttttgcctactttgagaggaaagcattctaactttaatcttctcaattgcctcattggcccgctgtactgattctggaccaaggtatttcctctcccctgtctaattccaatggatgggagatctacatttctgcaatataatagttcatagggagccattcctatcgtactctgataactgttattatacgaaaattctatcaacggtaggtatttactccaggagacttcaaaatccataacacaggcttgtaacatatcttccagtatctgaatcgtcctttcggactatctatcagtctgaggatggaaggttgtactgaatttcagtttggtacccatagcccgttgtaaactttgccaaaacttcaaagtaaacttcggatctctctctgaaactatggtttttggcacaccatgcaaccttattatttccttgacatacaaatctgcgtattgatccactgaaatggttgttttaactggtaaaaagtgtgcagacttcgtaaactgatccactacagcccaaatagaatcaaacaaacctgtggttctaggtnacccaaccacaaagtccattgtgatatcttcccatttccattcacgtagggttaaaggttgcaacaacc

SEQ ID NO: 66982 - DNA, 791 bp, Cannabis sativa
atgactctcaaacaatccgactccaccaccacattcgtccatctgttgtctttaatccaactcagagcctcctttatgccaattgctttcaccacgtgggacttgaacataccctctttgagtaggctcttagcttgtaggacaaccgtagccgctgtccttgctatcaatccaataagtcattatataatttttttgtataaaaaaaagtgcacaaaaaaatatcttctaatatatataatctcaaaacaactactattaccgtatagtttacttttaataatataaatttgataataaataaatgtaatagttcataaaatgacaattttgatctatgttttagaatttatatattacactttgtatttaaaaagaaaactaaaagtagacaattttgctttcattatctttatatcttggctattaaaaatcgatatcattctcatatctcgttctataagcttttagtattatgaatacaagataatgtagacacttataaaattgtcaactaaatgatttaaaattttaagtatatcactgttgaaaagaaaattgtttttgagaatttcaatcatcccaaaatttttagatttatgacctgtttgacacagcttttgaaaaagctaaaagctgttttttgaaaaaactatgataaaaatgtatttggtaagcagttaaaaaacaattttttaaagaatttttggatacatagtatgacaatattattggttgtagtgttaggatacatagtatttatgtgaggtgaaaaacatatagtgaaaatt

SEQ ID NO: 66983 - DNA, 966 bp, Cannabis sativa
gacaaatgtggttctcatcccaaatatttagaatccgaaaagacctaaacatttcaagcctatatctctgtgtaatgtgatgtacaaggttatatccaaaatagttgcaaatagaattaaacctatccttccttcgataatatgccctacacaagcggacctttgtcccgggtcggaatatacaggataacaatgtgattgtgcaagagataatccactcctttaacaggaaaagaggaaaagaaggatgttttgcaataaaaattgatcttgttaaagcgtatgataggttaaactagaagtccattgatcatgctcttgattggttcggtttcccccaaaaatttcgtaattgggtttcttagtgcatctccaccacctcactgaatgtatgccttaacggtggaatggtgggaaagattatgccctcttgtgggcttcgccaaggtgaccctctttctccctacctcttcatttgtgctgaaatactatctagactattggaagagggcctgaggaagggcgactttaagggcataaagttaatcaggggagggccggtcctaacgcacttattttttgttgatgacttaattctggttagacgggccaatgtgaatgaagccaaatgcttttggaattgtctagaaaagttttgctcatggtctggtcaacaagtgaacaagctcaaaacgtcaatcttcttcagcaagaatactcccaatgggatgagaagaggcattaaggaagtgttgggtattggctctcaggagggtgtcattaaatatctgggtatgcctcttttcagatcaagacaaaaggatgcggatttcaattgcatccttgatagacttacatctaaattgcagagatggaaagaaagacactttccaaggcagggcgtgcgaccctgattaaatctgttggcctatcgcttccgatttatgccatgcaaaccaccaaact

SEQ ID NO: 66984 - DNA, 798 bp, Cannabis sativa
ggcttgaagtggggacgttacaggatagaatatgaaagtatatgtggatgacatgctcgtcaaatctaagaaggttgggggcccatagaggatctatatgaatgcttcaaaatcctcagaaaatacaacatgaaactcaatcccttaaagtgttcctttgaggtcagctcgagtaagtttcttggatttatcattaaggctcgaggaatagaagccaacccagagaaaatacaagccctcctagatatgaaatcgctaacaaaaacaaaggaaacacaaagcttaattggttggatagccgtgttcagtagatttgtttcaaagtcgatggacaagtgtgttcccttcttcaacatccttcgaggtaacaataagtttgaatagacagaggaatgcaaaaatgctttttatgagctaaaaagacaactcacaaagcctcacatactctcaaaaccattggatggagaggaattagggatatacttggcagtcactgaatacgcagtgagtgttgtgctgataagagaagaaaacaatgtctagcatctagtctactatatcaacaaacaacttatagaaacagaaggtagatatcctttaattgagaagcttacttactgtctgatcttagccataagaaagttaaggccctatttccaagctcatcctgttcgggtctataccgaccaacccttgcactaagttttgcaaaatcctgatgcttctaaaaggttactcaagtggactatagagttacgtcagtatgaaataatattttaaccccacacagtagtaaaa

SEQ ID NO: 66985 - DNA, 1061 bp, Cannabis sativa
  modified_base (654)..(659): a, c, t, g, unknown or other
caaacatgcaaacttcagtttgcttttctagcttgccatctttctttcttaagatatgagcagggcacccccaaattctgtagtggtgtaaactaggtatacgatcactccataattctaaaggtgtcttagggactgatttagatgaaacaacatttaaaatgtcagttgccatctgaatagcatatccccagaaggacgtatgcagagttaaatagctaagaatgttcctaaccatttctaaaagcgtgtgatttcttctttctgtaactttatttttctgtggagtgataaggacagtcagttgggattcaattccaagtacaattaaatgatatttgaactgcatatccatatattatctacccctattattttgcaagatctttaaggttttatccaattggttttgaaagaatactagaaattgtcgaaacttctcaaacatttctcatttcttatgcataaggcaaatatgaccatatctggattaattgtcaatgaaagtgacaaagtactcataaccacctctagctttgacattcaatggtccacagagatctgaatgcactattcgtagtggttctttggcacgttctccctttgtagagaaagaacttttgtcatttttccttctaggcaagattcacaaannnnnnattcacctaaggtgacattttttaatgcaccacatttggttaacttgccaagtctatcatagcctatatgaccaagatgtaagtgccatagatttgtttcgtcttcattattgatcttttgctttttgtggtttctaggtttagctatctaaaacagtttgttattaagcgcaaatagttcatctggtcttagatcataaagcccttgttccatagtagcaacacaaatttgaatatcattacgagaaataattgaatcaaaattcaaaaaattcaatttatatttgctgcaattctaaacatgaaacatgaatcaagtttctactaaaatttggaataaacataacattgtctaaaatcaaaaaattgttctaaagcttgagtttagcttttcctctagct

SEQ ID NO: 66986 - DNA, 872 bp, Cannabis sativa
acataaaattatttatttaaaaataaaaaaaattaaaaataatttgaaattggggaaaaaaatttgaaataaataaaacgtaattaaattaaaaactaaaaaacccctaattttgaaccctaaaattatcacaccacatctccctcccgcatctcccaccctctccctgttcattatcgcacagccacccgtccaaccaccccaaaaacccatccacggccaaaatggaagccaaaccaccatctgaataatccccacgacccaaaaaccccaacccaattgtctccgtccatccacagccaaccccaaaccaccatcctatttctttttttctttctctctctacgtttagctcggcccaacgctggagggttgtctctgtccatccacagccaaaatggaagacacgaatggcttcttgagccgtccgaggaagagaacgattaacgatgctcttctccttctggtgctggtgcgggcacaggcgagagagagaatatagtgagcggtggggtggcgatttttgggagcagggacctccgtcgtggtcctcagccgtagctccgcctccgtcctctcctcacgtatcttcgtcccaagctcagcttccgcctcaggccctaaatccctccccgtcttcatcttcttccacggcggtggcttcgcattcctaagccccgatgaaatcgtgtccaagtgcgagcttgaaggcggttagggttttggggttggtgactatacaaccattttttggtggtgaggagagctgggaatggggagtcgactagggttagttctgagatggggacgatgatgaggctgattttgaggagtggctagggtttctgagatgaagaagttagagggagaag

SEQ ID NO: 66987 - DNA, 707 bp, Cannabis sativa
tccaagttttttttaaagagtgatcagaatcacactatgacaatcatcgacacagataaattttcagtcaacaagttaattgtctaactaaagatatacagagtcagaatatgagtcactacaaagcgacttatataagactaagttatcttaaaaaattagataaaacaactcgaaaccaccttcgagaagcatctgaaaaaataaccaattagacgaaaaactaccttcaaaatagatagatataaaaagtggattagcacactatacaacgataatattgtgaatttttaaattaaaaaaaaaaactcaattattattttaataaaaaaaatttatcttttaaacttttttcattcagcatgtcgctattgtagatctaagtcttttaaaatagaaatatattagtcaattaacttacaccatacataaatagatctccaagtgtctttgattacttgtaaagtttgtaaccattcttgatatcattaagatgttttgcaagaatttccttgtaccttgagtctcctcgaaggtcttcataagcttttctactaaaaaaaagaaaaaaattatcagattttcaaaataaataatatatatattgagatataattttatttgttattgtacttttaatccgtctgcagctgagaaaattatcttattatatatattcatcatgataacaaatacagaggtcgata

SEQ ID NO: 66988 - DNA, 706 bp, Cannabis sativa
  modified_base (37)..(50): a, c, t, g, unknown or other
taaaataataaattagacttttaataataataataannnnnnnnnnnnnnataataataataataataagattactattgagtagtttttgatcagagaatagttgttgttttttttttaataaggatgagattgaaagaatgtaagaatccctaaaattaattggtaaatggggaattttaaaattaaatgagggcaattgagtcaagtgaaaaattctttaaaccaaaattgtagcttcccgtaaaagctaaaatctcaaagctagggtgggccaacttttcctaaaagctattttttaaattttaccaaacacatattaactcataactttttccaaaagtgattttaattttttaaaaagctctctcaaacggggcctaaggggtttcaccacaaatgtcccgaaaatatgtacatataatttacctttaaaaataagtatgtttatttaagttataaaatattaaattttttaaaatttaagataattctaaaaagtatttcttaatttttttttataaacatagtttaatagttttatattttttttttttgacaaagaggagattcaaaatttgaattccttttccccaatgtaaaaaaatgctatttttttagtgaatatcaaaataaaattaaaaatgaagagtaataaagtaaatgaaattattaatagatcgtaaattttgtttttttttttttt

SEQ ID NO: 66989 - DNA, 658 bp, Cannabis sativa
cctttacattcttttctttgcattaatatttatgaagaatgttggccgttggatatataagcttttgttccatgattaacttttacttattaaaactgaacattttgatgctttcaatgtgcttcactttatttctgatttacaggtccaagtttataaactcgtttgtgtagctaatttacagagttctgcatttcttatctgttaaatccttgtctattgtattgagattcaggtatctccaaaggaaattccagctccaaaaaactcagcgttgcctctcaatgcttatatgctgcataatcttgctcatgtggagctaaatgcaattgatttggcttgggatactgttgttcggttttcgccattcagtgaaacacttgaggaggggttctttgctgatttcgctcatgttgctgatgatgagagtcgccattttgcttggtgttcacagagacttgccgagcttggttacaagtgaggagggtcgttaatttgggggtagataacaatttcctgtttcttcagctgatgtgcctttttttctgttgtaacaagatatggagacatgcctgctcacaatttgctttggagggagtgtgaaaaaacatctgataatgttgctgcacgtttggcagcaatcccactagtacaggta

SEQ ID NO: 66990 - DNA, 1517 bp, Cannabis sativa
gtccttcgtcttgcgtacctttaacaagcggttgcagctttagctcgttatgttacatcctttgtttcgtgcttaactgtgtttattgctgattgcacttaacaaatttctttatatatcatcgaaaataaattcctcgaaaatgtttggtaatgattaacattgaaaatatctggttggagccatttatttatggctatatggttatatttttttactagtggccctctaggcggttatgttagagactagagagtcaaatgctttcttggagagagtccctcaattaatgagttaaagggaataaattgataaaaggactggcacttaattcataaaattgagttctttcgtctttctccagatttcatcagcttccagaatttgaccaaggaaagagaagttgtcgtaggcgcttagctggtcataatgagcgtcggaggaagccaccgcatggttcattagtgtctacacgctatggttggattttgtaccttatatatgtttagatgttagtatattacaactccaagctaatgtgatcttgaaagaccctgattgtggccttttaccatcacactacatagattttggtttttcccattcaccccaactagtattgacatgacactgacctcaaatatgttctgtttgttaatgtagataacagcggcagagttggtagctttctaatggacttctcagcataccctaggcttagcggaagagacgcctggccaaatggaagaatatcggagcgggtgcctggaaatcaaagtgccattccaactgggaagtacattccgtatccgtggcagagcaactcagataattcttcatccaacctatacctgcagacttcaggctgcggaacgagtatcccagctaatcatggaattcctccgcctccgggagaatgcatctcagcagtcgcggactcaagctgtgctctctctcttctgtcaaatgaaccatggggctctagaaaccggtcatcatctggtattgggttgcaatccttgatgaacacccaaggggcacctgtggctgaaccaacatcagctactcacagtgaaactgtcaatcacttccaaaacacttcttggtgcatgaaggatgatatggatggtagcagttcacaccagatccttcctgatcttggccttggtcagttctcgcattccctcacaggtcagttctctggtgagcttgagctgtctcaacagggtaggaggccatatatggaatctgaacactcgagggattatggttcctccagtcagcacatgcactggtcactctgaggtccagtctattgttagtagttctaatgagaacccaagtctctttcaaagaattagtaagtttaaaaacatttgcaagtaaaacttctgctcttctcttgggccaaatatcaaaactgaattgctttgtgtggttgttgtcttatcccttgttttgactaatataatattttggacccttgtggatatttctgctgttcaaagttttgttat

SEQ ID NO: 66991 - DNA, 661 bp, Cannabis sativa
cactactacaaaaatgagtttcagtgacacacgttgaatgactctaaaactctatagtgacacttcactgcgcgtcactaatgtaggtgactggaaaggtagtatttagtgacactgcgaatgagtcactgaacccatttagaatcactcaccgtgcgtcactatagggttttagactcagaccttgtcagacttcaaaagtaacagctactcttatcgcatgtcactgtatctatgtttttttttttattttcattattttttacaattagtatgactatatttaattttttgggttataatattaaataatatatttattaataaataaatatacaaatgttatacaaaatattacaaagaataattaatcaaaataaacatataatattaagcatagtcttatatatatacaaattattcaaacaaaactaacatcacaacagttaaatcagtattatatagctaaaaaattatacaatactatttattgtctacatattttaacctaaaaaatgcctacaacaattactgaccaatttcaaaacaaataaaaaaatttcacaatcagtttttatgaacgaaactaacgaaccccaatcctccattgaaccattatgaacctaaaaaacaacaaaccaatttcaaaacaaataaaaaa

SEQ ID NO: 66992 - DNA, 772 bp, Cannabis sativa
  modified_base (111)..(112): a, c, t, g, unknown or other
  modified_base (541)..(541): a, c, t, g, unknown or other
ttgtgctaaacatcactagtacccaagaaatgttaaaggtattagtagtgtctagcaccttccctcttacgtcgctattggtccaactaagtatcgagtctcatataattnnatataataacttttaaagaatatagctaattaattgtatgtcgccacttagagatcttcggtaccactattagctaataacaatgctcatttatatctattctatataaaatgtggctatataactgaatttttggtttatgagaaattattgagtgactttttttttttaaaaaataaaaaaatagtaaattattagatgttgcacgtaaagggtcggcataaacctaaatataattaatccacttaataaagtgttgcaattaatcataaatttgttcatattgtttatttttttattaaaaattatttttaaattttgatatttagaattagttaaattttaaatattattttaaattaaatatgaatgttttgatagtttaactatatgagtattttcattaattccaaagataaatttaagacnaataatatttttttttaattattattaaaaagtgtaatattaatttttgtttttatttaaatcactatgcttttaaatttcaaaattatgttgaatattattaattttaaaattttgatattaaaaaaaattaaacactaaaataaaattaacaaacagcacgtaatatatataaatatatatatctttatacattaaaagtgcctatctaacggcatttcttggtttaac

SEQ ID NO: 66993 - DNA, 828 bp, Cannabis sativa
ctaaaatcggacttagaattgcataacataagaaaagtgtgagattgagagattccactaattttataagtttcatttaaagggaatcatattgctttatgagtgcttatttgattaacattaaatagagatatcttgttacttaatttaagttaaatctatcatcactcgagaaaaggttaatagattacattaggattcttgaaattgcaaattataggataaattgagataatcggtaaattgatattcatagtttgaaataggaaaatcaatgctctgggttgtactttctaattaaaaatcgttgtttctctgtttatttttctatttattttattatatgattcttaattataattgactttgttatctaattaaagtataaaattaaaaagtataataattagtaaaatttaataatcaatccccgtggattcgataactttttaatattaaaactttgctacaataatattgtacgcttgcagtaaaaatagtgtatcatcgttacattttcaccctcaacaatcatgtataaccttttcgcgataattgtggggacaataaatggtggtttaagcagtgagggtaaagaagtgatctgatcgccaacaacgtataaccttttcgtgttggttgtagagacaatagatggtggtctgagcattgagtgagcgagaagtttgggattgagcttaaatttacagtgtagtctctgtacaagagctcaagttgcctacatttatataagagatcaaatttcatcgtagttcagttggagggtagaatcaatattccactacatgattcaaatatgttatccta

SEQ ID NO: 66994 - DNA, 595 bp, Cannabis sativa
  modified_base (173)..(176): a, c, t, g, unknown or other
actgtagcgtgccttagcattagggcgttacaatttccatggccaatttctgctaatcgtttgaagaattacggttttcgcgtgtttattaggttttcaagaattaggttagaattttcctttttctttctgaaatttcaatggcagatcgtaataataataataataataannnnaataataataataataatgctttggcaaaatcgatatggatgaaacaagctgaggaggcgaagatcaagagggaggctgagaaagctgccacagctaaagctgctttcgaagccacatttaaagacgtggaaaagaatcgtgtcaaagatataacagaaggggtttcatttgacagcgagagcgaagaagctgagacccaaaacccccgagacccaataccccgaaacccaaaacccccaagccccaaaacctgaaaccccgacctcctcctctccccaatctctcgaccaacgtccggggaccaccaggtggtgagacggtgcttcgactccagtggtgagaagagagagagaaagagagggctgggaggggttttgtagaaaaagaagaagaaagaagtgttatcccaatttttgca

SEQ ID NO: 66995 - DNA, 1020 bp, Cannabis sativa
gttcatgacttcctccttggtaaagtcatccacagaattccatggtttcattaccataggtttcctgtcaaagaaggcatacccttgctccataattttgtctctcatttccatattctaaaacctgataatgaagataccctttgctagcagacctactttcaccaccgcatccttccatatttgaggaacaaatccatcaagtatgttaattggaggattcgctccaatcacataacaaaccaaggaaggctgccaatagttcacctcttcagcaatgtcctcaaactcaatcttaatactcttctttcgtgcagatccagcatctgccatatccttctctgcttgtgcaaaactagcttccaggttcttggttacactagatctgagaattggaggagagatcttcttccccaaactcacatcctgagcaaccctattagaaatcgtgagccactctgaaagatcctgaatctcactaacaggcaatttcagaccttccttgcactgttccattgcctccgagtactgttccattgattccgaattctcaggaatctctagttcttgaataccaatcaccgcatccatggatctgattttgataaccttatccgatgaagacgacactattttcttccctttagctttcacttttccggccatttttgcccttttcgccatagccccggtgtagcaccgaaagagagagaagagcaggaaaagtttttgatttagctaagcaacagtttgtatatcttttcctcgcataagaccttacagtcagcaggttgtatatatactctgctacttacgcaattaatgagtttttctataaaaagcgatttcatcgatccatattccctttatcttgacacgtgttctccactgagatgataaccgaatttcgggtataacaagatctaaaggtattatgaaaaaactgtttacattttctgtatctgttcgtgttagaaattgtttttaagttggttatattaaaaaaagttgtcaaaaatt

SEQ ID NO: 66996 - DNA, 597 bp, Cannabis sativa
aaattgcacacatcaaaatcttctcaagaacaaaaaaaaaaggaactccgtgaatgaaaaaaagcttcagtcgcatacatcaaaactttaatcaataaattttcagaatcaatcaagctttcactcattctaccattcgacatatcaaccaaacaatcaatacaacaatgcgatcaacaatcagaagtttatcagaagtttatctttcacaccgtattcaacaaaacatacatcaaacattgcagaatatatatatgcatgcaacactcaaagaagtaagagagttagcaactttagtagtatgtcttcgctctttggtacaaaaatagtattgggacaacaaatatagagcattatctacattcacatacttgataactatctcaggaaaaatactgcataaatatagagatatcagcttgaagtacaaggaacaattttatttattttgtattaccttgtaacaaaataaacctactaatttattattgtatgacaaaattatacacctgataaaaaactctgcatgtatagttacaaggtagtttataaaaagtacaaatgcatgcattcttgaactaagatatatatatatat

SEQ ID NO: 66997 - DNA, 3165 bp, Cannabis sativa
gactaagtggtatttgtgtaataaaacaaactttgtaagtaaaaaagtagatataggcgtgtaggaatatttaggtaataaattgtgcaaaagtaaaaatttcttttctttttttattttataacaaataaaaaatatccatatatatatatatttagaaatatcaatagatatttcagaaatattcatagatatttcaatatatatctccgatttttcttagaaaaaagatatcatgcttaaagcaattcactatcttttgagatatatcgatgaaaaatatcgaaatttaattccttagtgactagaaaggagaaggaatctagttagcccccaccctcacccccacccactacccatttttcatttcaaacttagccaccaactccaaatgcaccagtcatttcatttgacctttttattttctctaccaaatttaactcattgaataatataccgtttattcattgatattcaacttagtaatacaaagcatttataagaagaaataaaaatacatataaacaaagcataattagctaccctcatattgtctgtcacattaacatcacacataatagttaaaactaagcttgtacagttgtttcaattccaactttccgagaatatttgacatttttggactcttcggcttcccacagctcaggtaatgcttctttgatgttatgaatgctctctagtgcataatcaacaccaccaattcggtgagaacaaccaacctatacaaacatttcataccaaaatgatgagaaaacaatcctggaggcccttttaaaataccaacaaagctcaacagtcaatacatatcattatacaaaacttaatggcagaaacttacccaaacagtagtgaggcccatttttttcccagtttgaatattgtagatgttatcatcaaagaatacctgaacaaggggaaccaatagttagtaaacagcagtaatagacaatgttttggtcaacatacatacaaccaatgaccaagctattatcttagtatcttacagctcgttgagggttgattttcagcatcttgaaaacttcttcaaatgaattttcaaatggtttgcagacaactggagactttggaagagctgaatctccattgtcactgctttgtcccaactcagatttaccctcgctaacagcaggcttagcttccttataatttggatttagagtctcaaagcatataatttcctgaaagcaatcctccaatccaagcctgctaagtgctctagccgcatgattcttgtccccatttgtaaaaatctacacaaaactcaacaacacaaagtaataagaggacatcctttcataataaactaataaaaaaagaatctcattctaaagatcaaataaacaaaataataggtgggcagttattaaaaatgcttgatatcaaaagtgagagaactcacaattttccgaataggaatgctgagcaaaagactcctcagaacatggtctggtttaagcagattgtaaggcaatctcccatggacgaaactgcaagccaattagctttaaattagacgctagacaaatacatattcaattgtaattcagaaaattaaatgaaaaatgattcagtacctgtggaaatcatcaaagtcaaagtcatatcccatagcctggaaagaggaaaaaaaagaaaaaaatcaaacttgttaatcaacgttctctagatgacatattttctacattcaaatcaatgggatatgaaaaagggttgtttaaatataccttgagaccagccattgttgtcccatacttcttgtacaaagaggaacataattcagggactttatcctcctgtatttcaagcttgtgaatcatatattctgtaatggaaacatagcaaaaatttaatctttattcaaactgttcaagtgcagtacatatttacacataaaaacataacaagaaaaaaaattaggtaaatggttaggcaagaatgtgaagcatatttacctttaatgttattagtgacttgggctgaaagacccgaagccttaggataaagggtgtcatctaaatctgaaagtaaaatattagagactaagttatattcaatttcaatatctatagaataaaaaataacatcatgtattaaaaataaaataaaataaccatgaactttatgctttaaaattataaattaaggttttaccaaagagaagacagtcgtattttgattccaatgcttgtttgtactgatccttgttttccattatttattaataatattctcccctgtcaaaactgcagaaacaaaaaaagaaaaaatcagcacataacaaatggaccaattaaacttaagcagaattgcatcaataaaatgaaaaatcaaaatcctgaaattattacaatactaatacactgtcaccaaaagatttatttttcttacgtaaggaaatacaataatctcaagtaaaatccctaaaacttgtaagatcaaaaccccaaaatggaaaaatacaatcaaaagaagaaaagaaaaaacaaaataaaacacttaacatcaacagatcaaaacagaatgcgacactggatttttttttcaaactcaaacgctactttcacccagccatgacccccacacataacaacaaaacaaaatcaaagaaatgtgatatcacaacaataaaaagaacacatttttacaaaacaactaaagaaatggaaaaaaaaataccagactgaaaatggccggttatgagtaaaacgaagatcaaaagaaaaagtggactgaaagaaaaggatgtatggagtagagagagaggaagggaatgaggggattttattggatgcgatggcgaacatctagaaataaaataaaaaaaaaatatattcagaaagtcttagccaagacaatttgactggttccacgtggtactaccagtatttgacacgttgcattttcttgtgggaacggtccatttcacacttctctggaacagccgcttcccattgaccaccaactgtctctctctctattatttttatttttatttttatttttattgatgttattattaattattgaaattattgtattttccaccaattgatagtgctatgagattcttttgtattttttttttttttggcactttctctaaattcaagtgtttttttggag

SEQ ID NO: 66998 - DNA, 552 bp, Cannabis sativa
atctagatcctggtaaaaaatatccaatataaaggaccactgacaattatggattcattagaggatatttttccttcaaggcattattttttagttggatttctcctctctgacctaaatttttgtacatatatgattttatccttttttctaacaaaggaatctcgagtttctacaatggaaagtcaaaatcatttacaagtctacttctaagagatacaatgttccactacaaacattgtaaaattataatacttattcaagaaaatgaaagaatcttctaatattcaatcatgtttgggagaagaatcagagtttttggttagcaacgtgcattttaatctgagttcgtgtccaaccgtcacattgactaactgatcaattttaggcattggaaaacaatcttttagatatgccttattcagatcggagaagtctatgcgagttctccaggttccatttggttttggtactaatactgggtttgaaatccaaagaaggtaaaatgcttctctaatgaagttgatggttagcaacttattaacctcttct

SEQ ID NO: 66999 - DNA, 1084 bp, Cannabis sativa
  modified_base (184)..(185): a, c, t, g, unknown or other
acgaatttacccaataattcgattgcttcttttgctcaattaatagatgtttttgtagaacaatttgcgagcagcaggaaattggagaaactctcagatgacctatactgcatcaaacaaaggagaggtgaagccttacgagactatgtggcaagattcaatgctgaaaaagtttccatcacannatgcaacgtggacacagccattactgacttccgtaaaggcctgctagtagaatctgatctttacaaagaactgacaaaatatccatgcaagacaatggaggacgtgcttgccaaagcttgggcacaaatcaagtgggaggaagacgaatctaatagacaatcaacaatgtcctactcttactctcgcgacagtagagtaccgaagagggtagatcgacgatagaccaactgttattcagaaccttatccaaccaacagatcacggtcatacagagatagcgagaactccacccaaccacacaaaccaaaagattacattaccaagacaacactatctcgaaggatgagagaattagacaagggaccgattcctgaatacaacctgaacattagccctgtcgaagtagttgcagtaatgaagggaatgggaaaccaagtgaagtggcctgaaaaagattaaaaacccagcagcaatgcgcgacacgacaaagtggtgtgaatttataatgaccacggacataccactctagagtgcatatcattaaggtatgaagtggctgaactcttgcgcaaaggtcaattgcgagattttttattagactagggaaaggcagccgtgacgaaagcagacaagaggccgacaacagcaccagagccacctcagcacacccgaacatgtaatgtcatctttggaaggtcagaggtcagcgacgtaacatactcagccgctaagaggcatgcacgtgaaatagtcaggacagagggtagaccacagattcaaccagcagcctacagcggccagatcatcagcttcgtggacgacgaagctttagatttgcttaatcctcaccatgatgctttagtcatttctttatttatttcgaattgttttactaaac

SEQ ID NO: 67000 - DNA, 1748 bp, Cannabis sativa
gttggaggacttgtttgaacaaaggaacattgatttaatctgaagtatcccctgtcttcagcttcaattgaggatacttggttttgggcttttaagacttatggtgattactcagtcaaaagtacatatcgagctttgcatgtgagtagtgggagatggaactctcaagataattcagatttttggaagaagttttgaaacctgcagttgcctccaaaagtgaaaaactttatctggcgaggtctcacaaattgtctcccaactcttttttctcttcgatcgaaacgtgttaatgtgagtagtttatgtcctctgtgtagtagggaggatggcacttttcgaaagttttaccataaagacaacaattggcgcaacgaatacgcacaacaagcttatgtaagtttacattgatatttattaatttatgaacatttctttcaatttattttgtattcaaattgactatttaatttaattgatttttttaggaccaagtggtttagttggctgcaaatcaaccagtgcccattgaggatcagcctgctgagaatgctatagatcccacctagtatccacgagaactgcatgttatgatgcaagtactgggtgagcaatatcgacatttgagaggctttgtccatctcccatgattgaaggcagttgggggcaaaagagcacgtgccacgaattcttctgcctcatcgactattactatggaatagtatgaggccttatagaaaaagtggaggaggcacaaaaggaatatctgtatgaaacacaacaattatacttcaaacgattccaatatcagtttgagtatctctctcaggttgtgcctgatttcataggaggtcttcaactattctctactcctcctagtgctagatcgtcatcgcatcgttttgaaacttagaataataattttgatgacattaccgactttagaataaatatcttttaatattttgtttagttactaataactttagaaacttttgtttacttactaactttagtacaaattgaacatgtttataaattttagttcgatcgtgatactatttaattataaatgctaataccgttttttttaattatgtttttttttaaatctaatttaacatttaaaattaattataatactattataaattattaaaatataataaatgatcaaaatctaaaaaaaaattaaaacaaaggcttttacagagtatttttgcaccggcaaaacttataccctaaacactaagactcttttctacgcataaatgcgctggtataggtcactcacgaaatccatttggtgggtaaaggtttgccagtgcaactatgcatcagcacaacttttctttacccaacaaatgaaaaaatgaacaaaacttttatcggcgcaaagatgcataatggtaccggtaaaagcatgtttaatttaccgacagagatttacgatcaacttttgccggcacataaagtttgtcggcgcgctatgcctacttttgccgatgcaaaaatactccggcaaaagtaacatttctttagtgctaataatagtttcacagtattaaattataactcgattccctacttatactaatacaatacccgcaatccctacttatatgtttaacattttttcaggtgtatatgatttatttattttttggcaatatcgtgatcagttcttgttgattcattcaaatacagtagaacatctattcaagaatacacttgggaccaagaaaata

SEQ ID NO: 67001 - DNA, 2083 bp, Cannabis sativa
  modified_base (30)..(63): a, c, t, g, unknown or other
aacataaaataatttctgatctttattaannnnnnnnnnnnnnnnnnnnnnnnnnnnnnnnnnttagggcacaaaacccaacagtcccaaactttttgatggtttacctcttgaatcactttccaattcctacctctaactaaatcatcgagatagaaaacttgcttgacctgagtagcaagaatgtatggctcatctttataccagtcactactgatgttgatactagtggtattttttgcagtaataattctcttttttcttggatctgtattgaaccatttacaccgaaacaataccaccgtatatgcatcagtaaatgacacatgcaatatttcgaaaagctcgccataataactaaaaccttctatgccaggcacacacactccactattttgggtgaggcaatttttgtctcgatcggatgtaataaacctagcaccgtttattacacacccttgataggaataggtaacaagatctgatccagatgctaaagctagcaattcctccccatgatgacctaaagatccaatcttgtgcaactcgtagatctaaattgggattacaaaatattagaaccaattaatttcaaatcatactcagtaagtgattacgaatgaagataccttattataaaatcacgatgggaactcctgtttgtgtaatttcttatgatctgcattaggatcccttcgtttcatgagatcaaggtgttccctagtcattatttgtttgtgttagaattttagtttatggaattacaaataatgagagaaaaaaaaaagtaattgacttacttcatataaggttcaacttcagtggaattcaaaaataagaaccattcaatagttctcctcttgtgcccattcattggaattaaaattcctttaccaagtggacgacattgggattgaaacacaaataagtgtcgtggaacatattgtgcatcctcattgtgattggggcaattaaattttgttgtgacgcctttaaagtacatcgaacaaaatgtcaaagcctcatcagcaacatatccttctgctatggatccttcaagacgagctttatttctaacatatcccttcaattttttcatgtacctctcaaaagggtacatccacctcataaacaccggcccacccattatagcctcatttggcaaatgtaagaccaaatggatcataatgtcgaaaaaagctgggggaaaaattaattctagcttgcacaatatcaagatgagttttttttttttgtgctttctccatatcttttacatttaatttccttgaacataattgtctaaagaaatggcatagttctgttatggtgtctcctatattttttggaaaaaatccaaaaacaccgagtgaaagtaaccgttgcattattacatgacagtcatgggacttcaaccccgaaatattgtcgtcattctcacttaccttcttcttcaagttagaacaaaagccatctgggaactttgaaccttttataaattgacaaaaccgttttctttcttcagtatccaacacgtaaggagtgtgtggcttcattaatcttttgttctcatcttcataaatccacaaccactctttaattcccatcttcttcagatcatgtctaacattaacagtatctttagacttttcattatctaagatggtgccgaggaggctgtcacacacattcttctcaatatgcatgacgtctagattatgttttaacttgagtgtactccagtactcaagttcgtaaaaaatgcttttttttctccaattactttcactcgcatttctttttcgtttcaatcctccaaaactttcatgttttcctgggatttgaggtggtagagcatttacttgttctaaaatctacttgcacgtaaactttctctgggcacgtctttcctcaactttaccatcaaagtctaagtcccgcctcatctcatgattatggggtaaaaatctccaatgaccaacataagatgtcttcccaataacacggatggaagatgtatctgttggaaatattttaccaggatctatttactatcatatatgttttattaacaccctaatat

SEQ ID NO: 67002 - DNA, 724 bp, Cannabis sativa
gagaaaatgtgaaaagagacaaacaattttttacgtggttggggcattagttagcctcagtccatgagttagtgttactcagtagttcgttagcttgaaaagcctttaggagtacaatgaatatgttctcaagttttcctaagtaagtttttgcaagagaatttaacccttaatccattggattttatgggtacttatagtagtttgagaattatatttacgtttcctttttcctctattggggaacgtacagtgaataacacacttgggctgcttcgttaagtccagcccatgatggagaggatttgctgactaggtagagtagatttgcttggattttgttaacaccgtgttctttgattatgggcaatcatctgtgaattaattgcttgatatccgttttaggaagttttcccatttagcatgataagatcctctttcaagatctagtaactattgtttccttatttatgtgtaggaatgaaaacggataatggatgagtcttctaggaacacactgtctcacccttccgccctcatggttccaggctagcttccacgaatgagttgtcaatgatggaatgctctatggtcgcagagcttgatacgttcctggaaagacttgtccaaatgggattggcccactttatctgcactgagaaacctactaatgggcccattatttaaacatgaatatgtccaatgctagaaatactgataacat

SEQ ID NO: 67003 - DNA, 924 bp, Cannabis sativa
taatttatttttttgtactattatttttttttcataaaatttgttgttacaactttattctttcaattttttttttttcttttaaagttagtgatatatagttaaaaaaaaacaactataaactgaaaagcaattaaaaaataacaaaataaatgcacatatatacaataaaaatatacacgataaaaaaaatgcacataagctaaacaactatagaatacgtaaacaacaacaaaaaaataactagacatcaatgttgttaaaatatgcaaaatattcataaattaactctaaataaataataaaatatccaaaaaaatatatatatatactacttttattaattatgtataaataataaataacaaaatattcataaattaactctaaataataaaatatctaaatatatatatatatattacttttattaattatgtaaaagatagaaaggtataaaaggagtgttgttaatgaaaatttcattattactcacataccctatatttcacaaattataaaaagaaaatgtaaattgtactagggaaagtacaagaatgtttataataattaagaacaaaattatttaaaatttatcaatggaaacaaaattgttacatgttaacttgatgctactatgtctctaatatgtctcatgagacatgatgataaactataaaattaaccattttagacacatatttagataactatcaaatttgattttattctagatgtacaaattcttttatatattttattagagtgaatagcatctggtataaatctaataaaaacaaaatgaattatatgtaacactgctagccttgcattacattgaactattgggtttaacttaattatacataaatttacaatatcaatgacaggctatttttttaattcattattaatatcttgtat

SEQ ID NO: 67004 - DNA, 2319 bp, Cannabis sativa
cttttctcacaccgatcagtccaaacaaacttcaaattcttttgggtcagttgggtgttgcaattttctagaaaccctcaatgcatcgacgataataaccagctaaacacaaaaagcttctaacttcagtagttgattttggtgttggccaatctcgaacagcttcgatcatggccggatcaaccatgatcccatttttatccactatgtgccctaggaaagagacacgtggtaacccaaaatcacacttcttgaacttaggatacaacttgtgatctcataaccattgtaatactgatatgagatatagttcatgtttctcttctgactcaaaacaaacaagaatgtcatctataaacactatcacacatttatccaggtaatccttgaatacccgattcataagatccataaatgtcgctggggcattggtgactcttaatgacatcaccagaaactcataatgaccataccgagtatgaaaggtagtctttgggatatattcttctcgaattctcagttgatggtaacctgagcgaagtttgatttttgaaaagaccgtcttacccttcagttgatcaaataattcgtcaattcgtggtagtggatacttgttcttaatagtaagcttattcaattcccaataatcgatacacattcatagtgacccatatttcatcttcacgaataacactggagcacccaaaggagaataacttggtcttatgaatcccaagttaagtaactcctagagttggatctttaattctttctattctgctggagccatttggtatggtgcctttaatactggttctgctcctgaaactaactccatcacaaattcaatttctcaggaacgtggtaatttggtaagtcttcaggaaatacatcaaggaattcgcacaccaatctcgtatcctcaggtccagataacacaggttgtctggtatccactatagtgactaggaatcccggacaacctctgcacatcaaatcttttgctcttaaaagtgttattttagttatgcgcgtcccttgaactttacccacaaacactgctagattggcactgtcgggctcaaacaccaccatcttctgcttacagtcgatcgttgccctatacttagacaggaaatccattcctaggattatgccaaaattagacatttgtaactcaattagatttgtggttaactcataaccgtcaatccaaaaagacaaggaccgaatccaccgagtgaatacaataaggtctcccgaggataacatggtgccaaaccccgaagcatatacatcacattgtttatgaaaactttcaattactctactcaacacataagaaggagtagctcccgaatcaaataacacagaataagaacaaccgttaatggataattgacctatcaccactgacagactagctagtgtcagtctgagtcatagtaaatagacatctcgggttctggttggtattcttctttggctcttctttcttaccctgtggacaatctctaataaagtggcccaccatgccacactgaaagcaagtcttggcccgacactcaccctgatgatgtttctttcattttggacactctagatatgatctgaatgaggacccgtggccctgacggccatctttgtgtccccaaaactttctatcactcgtcgatgtcctagaagcttcagccttccatttgtgattagggttaccaccgtcggtccccttactgacaataccacccacaggaggattcgatgtcatggcggcatcctttgcagtttgctctttcatcacatgttgctctgcctcttcagctatcaaggctaattcgaccactttcctgtataaaatgtggtgagcaatggtaattttcaagttccgactgattgtggcattcagtcccctcacatacttttatttttgggtgaagtctgttggtaccaaatcaccagcaaacttagatagcagatcaaattccaaggtatactcacccacaatcattttacctggagtcaacttcacaaagtcttccatatgtgaagtccttacaacgatgttataaattttttcctcaaatagactcttaaactcatcccaagtcatagtactaacatctcgggtctaccccacaatgtcccaccagacgcgggcatgatcttgtaacataaatgtagtacaatttattctttctgttcccgtcacccccatattatctaggatgttgcagcttaacaaagcgttcaaatatggaatctctatgtagcagtataaatcctaggttacccaccactcgcataggagctggtggtaac

SEQ ID NO: 67005 - DNA, 1164 bp, Cannabis sativa
aaaaaaaatctctagcgactattcaaccccaaaaaaataaaccgattgcagtagagccgaaaaaaaagaggccaccaaaaatctaaaaataccgatccgaaaagtagagcaaaaagagccacttgtgcagggatagtgagccaaaaagggtcgcttatgatcgagttgtccaagataaccattgccaattagtttggggatggaacctcattcatcttatcctcaaattctaacaaaaggccctccctattttagctaaattcaatttgaatcttgtgtagaactataaaaaaaaagaatcattttttaatattttaattattagagggttcttttccgattttttaatatagatggcccaaattagaatttagctaataattaattagcatttgataagtcattattatcgaaaagaaaacaaatgaggcaaaaatattgtcttatttttttcgtaaataatatctaaattcaattttgatcaaaataattttaaatatttataagtttacgagtaaaagtttctgtaaatttatcttttgtagcgaatataaataaagagaaaattttaatgagttaaggataatgtttggtagcattataattttattgtctaaattttcttaaaaaatacttaccttaattactattatatctatatcataaattcttatcactttggtgaaaaaaaaaaaaaaaaaagttggcaagcaagaaaatattttgatttaactttaataaaataggaagtttgtaatatagttgagctaatcaaaatgagatcttttcataaacaaataaataatcaaaaattgacaagtagagatttggtgaagtttgatcccattggttggtctgagttcaacccaagttgcctatgtataagctttatttaataaaaggtttttttttttttttttttttctaatatatattggcaatgacatgattttctttcttatatattttacttagttaattaaaggaggtcactagtgatttgtagaggatttgctttatacatatatttcattttcttttttcatcaaaataatgatcacattttttgcattgtataaaagtttcatactagcataggcggacccacattgtagcgagggggggggggggggggggggggcccccccccccaaaaaaaaaaaa

SEQ ID NO: 67006 - DNA, 1199 bp, Cannabis sativa
atctttattagttttattaaaattaagattgatctcaaaaaaaaaaaaaaattagattgattggatagttctttgatgtattagcttatattgttagtgatcaataattaatggatttaatatctatttgtgtataaagtctaattgaagtagaaatatagacttttgtagttgactgaagcttttgatgagcaggtccagtttatcctaactctataaatacatatagtttcatcacagttgtatatttttgaataatcagataaaataaaactgcttctgatttagagatctagagagaaaaacttagttgatagtattgcactatcaaattacactaatttctatgaatcaatcaaatatgtatacctaattattatctattattattgtcttgtacattatatataaattagtatgttgagtttattattatttatttgtgtaaagaaagtaaataattaaatttaaatataacaatactaaaataatatttaaaaaatatagtaaataattttgatatttaggagatttttttttttttaatcatgtacttgattagttaagatcactggtaaatttttagaaattttaaataatttagagtgccaaaaataaagttcaaacagtgaaaacagtggtacgtgcaataaaatatttaaacttattttcagcacgataaattatttaaaattttataaaatttaacaataaattcaaacaaaatgataaataacagtgtataatattttgatacataattttagaacacactttatttgaaagctgaaaattaattattaatcagtacttaagatagttagagaaccaatccaacattttggaatgggcctcatttgcagattttgatgctgcttcatcatccaagttgtacctcactgtccaaccatgttcaacctttgggataatctcaacatggctctcaacctataccattgccaaccattcattaatttatgcatacaattaattaatataattaaaacttattcatttatacaattcatatcaattattatcaaaattaatttagagaaagtggccactcactcacccacaacaatgtagcaaaaggaaaatattcttaaaaatttcccctaataataaatatatattttttcaagtccagacgtgacaaatgctaattggctcattattagagttattgtgagaaaaga

SEQ ID NO: 67007 - DNA, 641 bp, Cannabis sativa
tggaacaaatcgatgatgtggacgtgatccatgccgtccagcgcctggatgatcgcctgtttcacagtgaactgtgagaacttcacctgaaagctggttttggttgctgactgatttttttatttttattattacataatttttttgtttatattaaattgtaatatttatgtttataatttattttgaatttgtatatatatattttttatggatattgtgaaatatgaaattttttcattaagcgtaatttggtatagttttaatgaattattatctttaaatttaaaaatattttaattgtatttatttttattaatattttttttgataaaaattaatattataatataaatgtaatatttaaaatatttattaaaaagtaattaaatttaatttacatcatatttttgccaatataaacatctatttaaagtgactttttttcaacagtgtaaatcgtcatctattaaagtaatttttcttaacagttataagtttttcttttaaagttctgtatttttatgatactcacgtagtcaacaatttttcaaaccgatgagaaatagtataaaaatagttatatactagtcacagtatagtattgtaatagtagcactactgcatgagaagcaagaaat

SEQ ID NO: 67008 - DNA, 746 bp, Cannabis sativa
agttgtggttcaagctgtcaatagctcggtccccatgacctcacagtttggattttcagttcaagattgtcgattattactctcttctctaaactatatttctgtttgttttgttaaatgatctacaaataaggcctttcattgtgttgctagagagtcttgtttcatgtcagattatatttttaattagcatactgctcctgcatccttaatggacattgtaatggttaaacgttattgaataaaatttctcaccattgttcaaaaaaaaaaaaaaaaactaatcaattacaagttaatcacttacaaagtattaaaccacacattttcctctattgaaattgtttttacatccaaacttttgattctatgctttacattttctttcacttgttgaacacaacttttaattgttttcatcttgtcatttaaaaggcaatcatcatttcggttcatccatatttgatacaccaagctcgctattcctataattattattttgttcttaaacttagagagcttagcctgagagatctgtctgagcagttgatgagttcacatttatacacttgtttatctaataattgactaaaaataagtatttatgtatagatttgatgaatactaaaaataagtattcgtacacttatttttagtcaattattagataaataagtatttatgtatagatttgatgtgttttctccaagtgtagttttgtgcttaaaagacaattctgtaataga

SEQ ID NO: 67009 - DNA, 1359 bp, Cannabis sativa
attattaccgtcaaaaattaaactaaaatatttatttgcaactaataattaaatttaggtatttacaccgtaaattactcttatttaaataattattcaacatttaactcaagtatatttatatatatagtgtatatacatgtatgtgagaaataagtcagcaattagttaaagattaattaagatttttgctcctctgaatttttcagtccgttaaaaattttctttgaattattgagattgtttgttgaattcaaagatttatgtttgttaaatttcattcaattttactaacatgagattatctatgtaccaaattgtacccttcgaactttgtcatgtaacaaattatgtcctccaaatttttactctttttttatatgtactaaattttactctttgaatttttatagacactagacatccactagtaaaatcagaaggaattccttaaatccaacatgtctcaatagtttggaagaaatttttaaaagcaaaaaaattttgagggcacaatttaatacttgtctaaaaaagcaaaaattcaaattagtttcattttttttaattaatcataaaatacttttaaaataatttaaaataatattaatccaataaattaattaaattatttttaacaactcatagtgatttttatatgcttaatgtatgaatgtgtattttatatttacctgcataagagtctcttcaccactatggttcttatctccttgtcttgtattcctcgtttgctatccatctaataatttataattaatattctcaaacacaaagaaaagtttcaagatatatgtgtacattgattaatgcaatcttttcataaattatacatatttatataaaattgagtaaattagttaactaattaatgtttcttgattgtagttagtgtttctctaataactcaccaaccctcatgtcacaattaattaagtttattatttaactattgcacgtgaaaagtgtattatgttgataattttatcaaaatcaagaatagtttgtcctattatatttttaatcaattgcatttgagtacttagatccatattggttaaaatataatagcactttaatttctaaaacatagttagtttattaattaatctcctttgacatattaaagcactattggaatattggataatatatctatataatcaaatccacaacaaattctagattttaccactgaggttcttatcatcaacatattcccaattaattaatacataaagagcttatctggtacgatatattgtattgtattgtgttagattatgttgtattgtattgtattagtgttatttaatacaatactatatttggtattgactt

SEQ ID NO: 67010 - DNA, 879 bp, Cannabis sativa
gatttaaattgttttcccttgagatctacatttttttttagatctgattttcctggttttggaaggaaaatggttgagaatgggttgagggattcgcccgctgggtcacaaagaagatggagggttccattttccttggctggtatttttgtaatttaacaacttttaatttctatttttgtttatttcactttttggggtcataaatgtaaacttgttccatttttaatttattatagaaaaaatccctataaaataggtaatcactactcatttttatttttttttgaatatatgtattaactcttaaatattatttaatgctaatttctatttattatttttcagttcaagctccataaaaaaaattgtagagaagtattcacgacaaataaaaaaaagtattatttatgttatatattatataagttgacatatataccatttttttttttttagaaaataacgtatcaaaacatatttttacataatactcataatgtacaagctttaaatcatatatgaaagatggtatatatttaaatattttattatataataaataatagtatgatggattttatatattttttttaaaattatttatttgtcacaggctttgaatcatttatgtatactaacaaataactaccttcaaatagacaagaatgattaggaagcacttctttatcactacttatgtcttatgtatttatcttttgataattttattgttattttgaataaatttaaattgattaaatgaatgtataaatgttattttgactcctatttttttttaaaagttttgactcctattttattcggtatacaaatatatattgtgcttattacttatgtttaacaagaatattaatt

SEQ ID NO: 67011 - DNA, 3035 bp, Cannabis sativa
tcaaataactccctcatctgacggctgttgtacatcacagattacaatccgtgaaagtacaataacgagacaaaatcatatccctatatatattatcatttttatttttgtccacgtgacgtgtacatggacaaaatcaataccacgtgaagtacaatttacaataagaaagtcaagtcatctacacaacacttcaattgacaggaagtctgagtgcctatgcgggacaaagaaatgacgaaccagccaccctaagggggttggccgaccacccatcgctagccctatggccagcataggccggccagcctccaactattattgggctgcccagcctgcaccgtccacgtacatacttagctagccagcctgcacctaccaggcatttggtgcgcagccttcatttgagcagagtaagctaagttgcgattgtggcttcaacaaccaacgaaaacagagagaaatatcagccactcccttattcatggggtataactaacccatttaatatttattatttaattgtgtaaataaggcttaatagttcctatttttgagggatacaagttgttaatcttcatgtaaagtctactatataaagagcatgagtcaaatcctaattctctcaatcttaagtctctaagctcactaaaagctctcaatctcaagtttgaaaccctaactcactcttcccttctctctcacacgcccaaggctttattctcacttgggatttgccacttgattctcatattgtaatcttaagagagccacttcagattccacaatccttgtgatctaagtggtattatctctggtattaatacaaccaaaaggggagtaggtcattatccgctaactaaaggggccgaacctctataaaaatcttatgtctcttttattttcctattctaattgtatacatgtggtaaacatcaataataaatacgactctgctgtcggttggccaaatttgagataaacagtttggtattttcattgagagcgagttgtcaatttatctaatcaaacatcatggttaacataaggagaactccggctacaacttctgcctcatttagtcttccttaagaccctatggcggctaatcctaatctccgtgttccagccacaattggaatctctacaaacctgacgaatttggccaaccctgccatctcggtaggcaccgcaaactttgccacaatgactggtcaggtggacactaacaacccagttggtcttaatgaccaacctatgcctccactggcgccttgtactgaaggaatggccaatgtggagcaacccctgggcaccacgattgggtctggtcctggtattaggctagagagatagagcaacaatttggcgagccaaccattggtgagccccatgtagacttgggagatgatctcaagttagctggacttagagaggttgtctgttaagtcagccaaactgaagaaccacgagctattggctatgatgtatttgtaaaacagagatgaaagtttctaagattgttggatgataacgagtacatcctccgatctcatcaggcaaagctagatcgccataatagagaagctagtgacctgataaggcagtttaatgaaagaattgctgaaagaggtcgggatctcatcagagatcaactctaagggagactggttaatagattagggagtgtctacaaataaactttctaaccaatttcatttggaactaggatagaccttcccctgtcttaaggaggacaagtcttgccacaaagatcttgtggcaagaataggcagacctcaacaattagtagtctggggggcagccagagatctctggctcaacaacacccctaatttgtcgacctttggcaagccagccccttagtggtgcacctctagccagccaacaaggtggactcctatcccgaaacatctaggaccaagtaacccaaaggcaaatctttaatcggctaagtctgggaatgggtggaaacacccaagataacaaaaaattgagaagtgagtccaaccacttcagatatttagatccacctaactccagaagttggtgtgatctaccccttgtcaacacataggctgaactagccaatcagggaagaacgggaagctaggccctacccaacataaagctggccgaccatgagcaacagtctaaagtagggctggctggccaaggccagttcccctacattggagtggctggccaaagccagctactatgcttagggctggccaacctcgagcataccttttcctagggtatagccaaccagattttggcccattcagagctgcagcccatccaagaagggccaatcagccaggcccctgcaacattggatccttatatgcaagaacagatcaaataagagacctgatcaagggcctagctggcccaaaaactttagatcttgaacttgataggttaagggattcaccattttcgacatacatcaatgcctttcccttgcccaagttcaagatgtcggtatggaagacgtataccagacgagaggacccacatgcacacatcaagtacttcgagatgcaacttgatctctagaagattactagtgatgtgtgatgtttgatcttcccaaaaaccctattagaaacaactcagcaatggtacttcaagttggctctaggaagatttaattcttgaaaagaattttcccaagaattttatactcaattctcatccttaagactgataccttcacaacaggaagaccttgtcgagctcaaacaacgacaaggaaaacctacgaaggattacatccaaaggttcatggtcgaggccatcaaggtcaaaggcctaatagaagaagactgatatacgaccatactggggggcatccttccattaagtgacttctgtaaagatatttagaggatctcaaccaacaatatgaaggagttctttgatagggctgacaactttatcaagctgaaagaagctgttcgacaagcccaatcatagtaagtcagcaataggaagtctcagggtgc

SEQ ID NO: 67012 - DNA, 1182 bp, Cannabis sativa
taggaacgacccttttcgaacaacgcagagtctacattaatcttgatactatcaccatgtggaggacaccaatgctcacttccatctcctgcttggtaagcagagaaagacgtatcgggatgactgacgagcatttttccattgatcaagatactttttagcaaacccaacaatgttctcaggatgaaccgtttttccattccaaaccaggttgtttcgggcaccccaaatagcccaacaaatagttgccattgtacatactgattcgtggtagcatactgaaacacgcgacgacaacagtcaagaaaaccaatcccaggagtgacaaccgtgcctattccaactcgattccaacactgtttgataacacggcaggttaccaaacaatgcaaaacactctcctcttcttccatacagatgggacaaagcacattaacatcgacccgctttgttctgagctgtatcattgtaggcagacattgagtgcacgcccaccacagcagattgctgatttttgaagggagtttcagtttccacagcttgcactagaaggcagcaatctcatcatcaaacgagttatttttttgtttctgcagaaaattatacgctgatttgacagaatacacaccagagttttcaaatgaccaaaacaaatggtttgttgctgcagaagatgacaaagggatactgaaaattaaggtctgatcccttgcctcaaaaagatcagcaatgatttcatgatcccaaccagagccatccatagaaaaaaggcttgccacggtaacatccacaagtgcagggtgagtggaagtaacccaaggattggattcatttggaagccacgggtccttaaaactgaaatggaacgcccattaccaacgcaccaatggatccctgcacgaactaggtcttgagcttccacaatactccgccaaatgaagcttggattagacccgaattgagcattaagaaaagaaccatccgcataataccttgctttaaaaattcttgagaccaaagaggagggtctagtaagcaaccgccagccctactttccaaggagagcgagattaaagtcacacaaatctcgaaatcccatgcctcctccccttttattcttgcaaagtttatcccatgacatccagtgaatgcccttgttgtcactcttcgtggaccgccacc

SEQ ID NO: 67013 - DNA, 556 bp, Cannabis sativa
gatatagattttttaatatattaattgttcattattttttaaaattttaatttaaaaaaaagaagccacaacatggcaaaaaaaagctaattaatttttttttttttttaaaaaaaaagccacaacgtggcaaaaaaaaagctaaatttttatttgagttatcattttttaaaaaaaaataatgaattaaggaaaaaatatattttatattaattaaactatatgaaattaataaaagattaaagaaagaaagaattaagggaaaaaaaaaaaaaaaaagatgacttaaaagcatttttagaccgcaacgtcaccccctcatacttctactttatgtatatagacttttagcaattttttcttgcccttaaatattaaaatttttatagcaaaactttttataatttaaaaatatacacatataattttataattaaaattttattatacttataactttaatttaaaatcatcacacttaattatttaattctttttatttaaatatttaaaaagtataaagtgaaataagatgaatatatttttcaaaaaaaaa

SEQ ID NO: 67014 - DNA, 860 bp, Cannabis sativa
caaagtggttaaaacatcaacaataacaaccctaattaaggaattatgtaaaatatccaaaaatatatatgtgaccaaatcttctaaatttttaatttgatatactttcctttcatatatttatttatataatggtaattgtaattattaattatgagataaaaagaagaggagtaatttggatcgtaaaagactttccaaaaaaaaaaaagagaaagaaaagaattcataaaatcaaacaaaaataaaagaatagaatttccattatatatataaatatatattgttgttacagattcacttatttacccttaagttgtataacactaatcacagggtttgacaaatatacccttacatcagatacaacaaatatcaagactaaagaacacaaagacagttacaactgaaacagttataaaaacagttacaaatatcactagggctctgtcctagatcagatcacagaacagtatttaaaaagaggtgcttttctcagatacaacaagcaataatatacaacaagcaaaataaagagtcacagccagagagatacaacaacagagaacaacatcagaaataacaacaaagtacaaataatttccaacatatatatatttatatatatttctaccatctaaaaaaaatagtggcatgcatgtaaaaccaacacaaagcatagcctaacacattttaagaaaaacaagccaaaataacacactcaaaaatcgaaacgagtgaaggaagtcaacagataggattatcaccaattaattagaggagaaaacttgtctgtattaatcagacatagcaactaaaatgaacatttctcaaacccaaacacgcttattgggcaaagc

SEQ ID NO: 67015 - DNA, 579 bp, Cannabis sativa
tagtgggttctttttctgttcttaaatttgccaagtatactttgggtttaaaaatgcctttcttggatctagtgatcatggggtggctgttatgagtactgggaggttgtggaatatgtaatggttgggaagaggaggcagtatgtggatcaggtatagcattaggttgatttggggaggctgtttgtgaggctgctggtgtatgagactcaaataagggattattactgaattcttgttgttgtatgggagcaggcagcggctgtgagacacgtaaggatggattttgagtgttattgataggtggaaagacatgtgtgggaggtataggataggcagtatagttgagagatgggttcggattgggattattctgagaattggaagtagaaaataattcttgataaggaaattcagcttcattaaattgaacacttctagccacatatatcctaccactatggtgaagacacctataacctttttgtgtcatgctatagccaatgaataagcatttggaagatctaaatgaaactttgtgagattggtatggtcttaagaggggaaaacaagaacaac

SEQ ID NO: 67016 - DNA, 565 bp, Cannabis sativa
atgttgaataaaatggattacattgaaatagagtgttatttagggcataaaacctaacacatataacccaataaccttgcaagtgaagcaccatcatgagaatcagtcactctcagccatgacgggggccaaccaccacttgctgtttgttatgaaaatttgtaaggtagtttatagctcagataacagtgagctcaaaaattaactcaacattactatagactttcctgttatgctgaaaccaaattcaccacaaaattaattaccataactaattaatcatctcttgtatatatttaagtatatatttaaaagattctatttaaattttaaaagtatatatttacaaaataaaaaaataaacataaaaaatattctcacattattatttatcctacactgttaagtgggataaataatttcacacaaatgaaattaacagaatatattattcagtgctccactatgtcttaaactagctctttattgttgaacacccacgtacatttataaaaacatttaaaagcaatatgttgcttgctagtgaataaatatatatatatat

SEQ ID NO: 67017 - DNA, 1012 bp, Cannabis sativa
ttagttatttatttaatttaaattaaattaaaataaactagattttgaaaattagttggatatttaaatttaaatttaagatattttaagaattcattagatttaaatattttcaaacaacctaatttgaattcaagttaagatattttttaaatattttattttaaaatagaaatatcttaaccaactttctagatattgttacattgtttgtttgtttaaatgtttgattcaaaatttattagcaaacctattatttatatgatttaaattgccatgattaacttgtagataaatccaataatctaattttaatcatagttcaattgttaatagatcaaataaataatatgtaatagataattttgtaatttctttcatttgtgataaacttagtaactgaataggacccatccaaaattaatttgtatatatgagcttatatgtttgttattaggcttagatgcatataggaagcctatttatttttggatatataaatagactaagttgctaaaaataaaatatcattttgatagttttatttaggcccaataagtattaggcttattcaattaataataactatttaattaaaggtaaaattcctctcttttgggccttgtgtgagaattagagggtcaatagtagtgggcgcggcatagttaacacagtcttccctcacaagaaccatcccaaatgtgaaggctcatttgtcttatttaaataattgtattaggctaattatattagtttaacctaattaaaattgattagcaacattaggctaattatattagtttaacctaattaaaattgattagcaacataactaattttaaaataaatgaaaattaatttttcattagattattttaaaattgatttagaaaaatacacttagtttaataaaataaactctagacagtaatttctagtaactaattaatattttctaatatttaattaagtagaaaatatatttaagctaaaaattaattttggaccaact

SEQ ID NO: 67018 - DNA, 1056 bp, Cannabis sativa
aaaaaaaaaaaaaaaccatctatttatttaattatttttcgaataatatgatattacatattaatcttctctaaagaaaattactaaaatttattcatattttaaataaaattacatttaactctctaaatatatattttaattatagtaaacttttctcattaaatatatgacaattctattcttaaatagatgtatttatgaatcagtaactcaacagaaaacatttaacatgccatatcagctcggcaatgctaagggttgtgacacccctagagttgcagtggaggcaaaggtagaagtggagctagaagatgtcatcatcttggggacagatggagtttgggacaacatattcgtatgggagatggaacaagtgttaaaggagaaaataaagaacatggatttgaagaatcttagtagttatattgcatcgttggcactttataactcttttgacaagtttcgaaaaactcctttctcaatagcatctacagaggccggtaaaccttgtagaggaggcaaatttgatgatatcactgtggtgattggaaggattgttgttgaggaagagtagcaaagaagttagggtttgtaattgtacgtacgtaactgcatgggatgatgattaattagagtgtagattagagtgggtgccaatctgattgggatgtactcgatctacactcatatatgatatgatattatgatgataccttacatttctatattaattcaaatacacttttttacttgtatatacaattaattgctattgtaattatttttttaacaaataattaataacattttttatataattattactattattgtaatattatacattcatttaccgagtcttgaactttgatccagtcttgtcttttgacatggtgtgttaatcgttttttctggaattagttttgtattattggtttgttattactccagtatcatggcgtccggaagttgtgtaaagtccttttttggcaagttaggtgacaaaataatttttccctttttatggtaagattgctatgcattcattttcga

SEQ ID NO: 67019 - DNA, 1091 bp, Cannabis sativa
aactatggaaaaatttctaaatcttgagatatattattaagcatactaataaactcattatgacaaacatcattaccattgacaacaaaaatcaagcaaagacaattaaataaagttgttacactcataaaacccaaacgaaggcaaagaaaaaaaccataaaacaaagtcatcgcctatgctatatggggctcaatggtaccaatcaacggaaaagcactagaaaacaacattatcttattggtgtcagaattctcatcacgaaactagcatcaacaaatagattaacatcacccaaagtcaactcacattggtgccagaattcaaactcgatcccgaactaggagggtgttaaccattattcgaagaccctccaacttgagcatcttgatacctccaaagatagttaagagcctaaaggcttaccatattatttgacaaaagcttgtgatcatgaacaaaagtgttacgtctatgccaaataaaccaactaagagtaataaactcctcaaactcttgtttactcaaaatattcatacaacccaacaggagctcataaaagacacattttaactcttaaaatcccttgagagagcatgatccatttcacagagaatattgttgcagtgttcgaaaactcaaatattgggaggaaagaaataatcacctatctaggatgtgttttggaacaagtctggagaactagaaacgatatctgcaggagaggtacaagaattaactttgagatggtaatgaggaaaattcaattggctttccatgactattccacctttaatggtagagatgaatccttggatggaatagcagttcacttagaggactgaattgagaaagtagattggaagagagtattggacgggaagcaggttatctgtactgatgctttttggatgaaagatgaagctgggctggcagcagtaatgcgaatgaaaaattcagatttttggacacacaagacttcgagaatcaaggcgtatccagctctgcaagttgaattaaaggtcattttgttaactctgcaatgggctttggaagaaaagtgggaagaaatatgtgtgctttcggattgt

SEQ ID NO: 67020 - DNA, 723 bp, Cannabis sativa
aatgcctattcaagggcagagttaatcttcttcttgaagcttcgtccaggtttgtctctggtacagtaagtgagcatatctgcttcgttctcttctcttccccctaatttctcttccttttcaatttattttgcattgatttctccatgacaaccttaatcattgcaaatagccccgtatctttcgtgctcagcacatatttaatgcattttctctttcccagttgcatttaattttgacggcaccctcttttgggcatttaatgtttgctcagacccttcctctcctctacttctttctcaagtctcataaatcaacccaaaccatcttttttatcgcctccaacatttactcctgggtaatcattcctcctctgcctctgcagatagccgttccaggaatcgaagcgatgattcagaacttccctcatcccttgacgcgtccttccctctccaggtattttctacacccttctttccttccctctgtctatttaatctttgtgtgtttggctcgattgacatcctctcctcatctacccatcatttttgccctaacctttactgctccttcaatggcttcctcctccaccaacccaaacattctcactgctctctctgaagaagaaagtctcatccatgatttcgaccacatctcactctctttttcttccgatcccaactccttctgccttatttttaaacttctatctcctagaactgc

SEQ ID NO: 67021 - DNA, 2144 bp, Cannabis sativa
ctttgggtagtaatccaagttacactttgagaagtgtttttgaggctgaggagttagttcggtcagggctacgacgaattgtgggtgatggttctaacgtctctatactggctgagccttggcttcttgatgatgtgaatccttttattgaatctttgcatccaggccttgtggggaagacagttgattctttgatgaaagtaggcttggttgaatgggatgagaaagttgttacagatgtgctcaatgttagggatcaatcgctagtttggaagattcctctctcttcgtcatcgacgagtgatatgtggtattggttgaaggatgagtcaagtctgttcactgtaaagagtgcttatgctatgctacaatcgttgaaaactagtagtagtttaaatgataactctggtttttggcgttagttatggcagcttaagcttcctcccaaggtgttaaattttctgtggagggcgtcctctaacagtctcccaacccgtttccagcttccgtctagacatgtaccacttgattcaacttgtcccttatgtcttgctgctcctgagacagccctgcatatattggtgagatgtccttttgctcaaagttgctggaacataatcaaagttcaagcagttgcacctggtgcgatgcttttctctagttgtttggagcttggattggttagttggagcacaaccgaaatcattaaggatgctatgacttgttggtcaatttggactcaccgtaatgacctggtttggaactccaagcaaccagttcctagtgacgtggtgacattggctaaactaaattatgtagactggtttaatgctcaacaacataatggtattgatgtacctgttgatggcctccatgtccaaagtgttaatcactggactgctcctgatctcccttatgttaaagttaatgttgatggtgcaatctttactactcaggggcgttatggtgtgggtcttgttgtaaggactgctgctggtttggtgttggcagtgagagttcttcccaaaagtggctctttgcagcctcatgtggtcgaagccattggcatcaaggaggcgttatcttagagcaaagcgaatggatggcctaaggtggtcattgagtcagattgtttaagagttattaatgatttgctaaagtttaaacatatggtttctttttatggccatattctttttgattgtaagaatttgattgctgattttgttgatgtttcttttaattttgttaagcggtctgctaataaggttgcgcatgctttggcgcgatcttctctttgtgaggctgaccatattttcagtggggataccctaccttttgtagttgcatccttagttttggatgatttgagttaatgaagttaagcattattaaaaaaaatatatatctataaaaattgttatgaaatattatttatgaatgtccaaatcaccaaattaattatcaccattaatactaaattttatttttcatttattacattgatttagtttcccatttttttagttatatttttttgttttgtataattaggggttcaccattggaataaataactgaaaatttttcattcactttctctttctctcttcatcttcttctttttcttttttttcttatctattttatactattctatgttattttataacacgttatcaacacgagtctctgcccaagtcccaaggtaaatattttgttaaagttcttgagttgttttaaggtcatgatacactaaatatatatttctatatatatatgtacttatctgactgaaataatttcaagaaccctttttttctttttctttttatctatatatctatatattatatatagatgtatatatttttatatgtttattattgaattcatatacactgtgtgatattatatcctgatatatgtatgtatatatttttatatgtttttatatgtgtattattgaatttatatatattatatgctctattgttatctatgatatagtagagaaaatctatataaattatgcacatatccagaagattatatttcctcgataaaatattgcatatatcctgaagattatgcgtcctcaataaaatcttgcatatatcttgaagattatgcaaatataatat

SEQ ID NO: 67022 - DNA, 1247 bp, Cannabis sativa
aaggtcaattttatcatttaacaaaacaaatagtctaatcggtaatttttacaaaacacagaattcaaaatgatatttacccttttactattattatatgatcaggttataatagtaaaattttgattcctatcaaaaatggattattttcttatgtagctcacgattatgtaactacggaataaaaaaattaggattgtagcaacatattaaagttataaaattttaaatcaatagttgctagtacgattcgttgatgcccgttcttcggtgcaagtaatatcagttcagattacggatgtagtgtgacatcaaagtgaaggtgttgtatataatatagattatatatgacaagtaccgatatgtatgaagctgcctttattaatatgtcatttatcataaagactagattcatatcataacgataacgatgatcaatagtagatcggcctaaattttaagttatcatgaactcgtgttcatgttattaatttctttgattcactcgttaaagtttctcagaaaagatgattctaacaacttttattttagaaatctaataatataaatggctggaaacatgatttacaattataaaatcctaacttttctaacggatcgaatgctggttcccttaagtgttaattctagaactagaatgttgtgcacaaatttagatgcgatctaaattataagatcctaactttcctaacatgtcatttaccatatttttccttcatttttttttctttctagtagtcattataattctcttcttcttcaatcttcatactactatcactaaaggttatagccgccaaaatcaccacccacctttacctataaccactgaaaccaccaccatagcctattttttaaattcaaatcacacataaaaaaaaattaaataaaattcaaaataaatttaaacaaatctaaattcaacaaacacgcacgtatatatacaaaaatctcaatcccaaaatctagattggaaaaccctaaactttttttcccacaatcatatcttttctcatatctaaatacaaaaaacacaaaaaatctaaatagggatatttatacacaaaaatattaaaaaaaaaagaatctaaaaaataaatgtggaaaatctttacggtatggtttttctcaatagatctgatgagagagagagaaatgcgatcatgattaggaaagggcgaagagattaagagatcaggactgagagatagatatatatatatata

SEQ ID NO: 67023 - DNA, 806 bp, Cannabis sativa
tttaccgtggtcaaggtgtttccctatggagctttggagttgaaaggtgaaggtccaacaaccttcaaagttaatggacagcgtttaaagttttacttgggagatcaaatttaccaagcaaagtccgccattattctagcgcctctgtagacaacaactcagcgtccggctagatgacgataaagacagcgctcttgggaggcagcccaagtgttttctttagtttttttttcagactttttatttatgtttttagtctatgttttagaatttttagggttttaaatttttagtcaagtactagacattaaatttttccagttgaatcgtgaaaaacctgaaaaaaaaaaaaaatttcgagaccgggatcccagtggtcgcgaccctggtcgcaacctggacgatacagaaacaactcaaaaattcttagttccagtggtcacgactaggtattgtgctagtcgcaaccctttttcccggtcgcgaccctcgtcgcgaccacctcaatttttagaagcccctgaatttcaaattcgagctagtcgtgaccagccttagggctagtcgcgaccagctcaagattttctataaatacccacttttcccccattcaaccctacaccaatttcaaatcttctattcatctctcaatcgaccctaaccacttcccattcaaaaatttcaatttttcttccccaaatcatcaaatcttctcatcttttaaccaatttctcaatccacaccatcaaaaatcccaatttcatcatcaatcaccactttctcatcaaaaaccatacccaaaaata

SEQ ID NO: 67024 - DNA, 1085 bp, Cannabis sativa
ccaaagcgaaattggaaattttattcattcaaaaaagaaaaaggctaagtttgagggaattggaaggagacctcatcaacgggagtgaaccatctaagatgaaaccttggaactgaagagtcggagtgagtgagccgagtcagataacaggtttcggagatgttgaactcggccgccacggattgcaaccattgctcgtccttttcttcctctagcaacaaaacagcagctgggtttcccttgaatgctgagtcagtgaaagcatccacctgtttttagatcaactcagacctcattcatatatatatatatttatatattatatatagcatatggagggagagaccggaagagagagagagtaccacagagtatttgacggggttctttgccattttcctgaaaagaatgatgaatgagctttgtttgtacaaagtaattgcaaaggagtaaaattaatagagatggagattgatagaaaagagaaaacatgtatttcagtttcaacttgtttgagttgactaatgtgattttattgtaaaaaaagctaactaaacaagatcagacaggtggatatggcatattttttttaatcattttttttgttaattaatgttgaattttaacatgcactaaattaatctattcaactttaaaggtcgttaaaattctttcttgaactattaaaattgttagatttaagattttttttttttttttaattttagtaaagaaagtctaacatggatgaaagtttaggggacttgattcagtacatgtcaaagtcaggcatggccctgggcataggcgggctaggcctatgcctagggcccacccagttcaggggcccaaattttttttttctcttttaaaattagatattttttttactgattttgaaaaataccacattttttctaatataagggcccaaatttgttttttcccagtggcccactttgtttcagggccggccctagtcaaagttcaaagagcatgatttgataaatatcaaagtctaaagagcatgatttagtacaatgacaattaaagaaaaaattcgtaaaattgaataaaattagaca

SEQ ID NO: 67025 - DNA, 806 bp, Cannabis sativa
ctttcatctacttccctcagtggggtgggatgttctctggcccatctgatcatactaattcaccaacagaacataatcttctgcttgaatagtttcaccttttcaacaatgtacattcaaacattcacactaaatttttgctcacctacagctatgttacttttgtttctcagcttttggtaaaaaaaaaaaaaccaaatttttacattctagcccttattttaaatattaatcttacattttaatccctaaattaaaatttatcacaaatataataattgatttaaaacactaacatagtaaaaaatacaaaataacaataaccagtatactaatattaaataaaataaaaacaacaaacacgaagttgtgaaactaaaaagaacaacataaataaaaataaatattaagtaaaataataatttaataaacacatatttactaaaaggaaatgggaatcaattgtatgagattgattctcattcatttgtttactaaattttagaatgggacaaattagtgaggcctacacaaattaaagaaaaaataaaggaaaagattctccctccatttttaaaaatacttttttctttccttaacttactttatattaattatatttttatttattaaaaataaaaaagacaaatatgtccttcaaaaatatataaataaaaaataatacatgtattaaacaatgacaatttagtcaaattaagtcattttgattacctttcctgattatgtaaataaaataaaatgattctgatttcttttccagccagtttagtaaacaacaaaataaa

SEQ ID NO: 67026 - DNA, 1606 bp, Cannabis sativa
tattattattattatttaaaagaagttatttttaagaaattatagttttattttgtaatttacagccctttggattggccatggcatcgttttctcaattctgtgtggtcattttctcattaaattgtgcagagtacataaattctatctgtattcgatttttagcacatgtgtttttaatgtttcttctatttgatttttatatattttagagacaacatgattgtatttaggttttagcttataataaatattaatattttgcccacaaagtcatgttcttctgcctctgctggcatttgggtgtgaataatgatagagaccatgtgataaaatgattttcttattgttattcttaagaaaaatattatagggagcaatggtgctatttttgccctctattgatgagagaaatattacctgggttcgagtcccaggtaaaacatgatgtaatatataaacgcttgaatcaaaaaaaaaaaaaatgagagaaattaggttaattatgatagattttttttagaaaacttttatttgttaaagttttttattggatttataaatttatgtcgaacatggtaattatttatgttaaattatgttcattcgaactttgacatatattaaatcgtgttctttaaactttttaaaaaatttctttgaacttctgagattgttgaattcaagaattttaatcaatattaggcgctcgttaataaaattaaatgaaaattcttgaatctaacaatctcattaatagttccacaagaattttttacgatatgaaaagttaaaagagtacaatttggtaaatgacaatacttgggggacaaatcttaattagatgagaaattataataaaattttgtatatacataattaagtatattaccaaattttagatttattttttaacaatgtaagacacctaattcaacccaaaagaattaggtaagtattttttaaaacacgagtattttataaaatttagaatgtttgccaactgataaattttaaaaggcaacacttaaattctttcaagaagaaaatgatgcaacttagagctcgtttggtataatttttagaaaagttaaaagttgatttttaaaaaaaaattaataaaaaatgtgtttggtaagtagttgaaaaacagtttattgaataatttataaaaaaactactgcgttaaagctaatgcaatccaacttttagaacaaaaaaaaatgttttgatgattaaaaaactctatcataaatgaatttttactaaaaatgtatttaattatttattacatattaaaagaaataaaatattttcttaaggaaaaaaaacatttaaatttattattttttatttttttcaaaaaatattttatatatttttttaatttaatttgtaattttattaatttgttaaatcagccaaaagacaagactgtaattcagtaggaacatccctcccactgaaaactcaatctggaaaagaatatgacgctctaataaagttgtgcgcagtcatataagcagatcgtttaataaaaaacaaagaaacattgtttaaaatagatagaagctttcgacagtccatcaccactcccccaagaggc

SEQ ID NO: 67027 - DNA, 744 bp, Cannabis sativa
tttaatatacaatactagtgaaaagctactagaatatttattttttgtgttattacgaaatgtaatttttactatattcatagctgaaaaaaattattttgtggtaattataaaagtgtagttataagagttatcactttatacacaattaaaaaatttaaagtggtacctcaaaaaaaaataacatgtcttgctatttgctaagcaaatcaatatatataattgaaaaagaaataaataaaaaatagtatatcctactaagcaaattaattattaaagaacaattaaatgctttaaagaaaaagaaagaaacaaataaaaattttatataaaataaacaaagtaaatacatatggacaaaaagaagttaatatttataaattttagtttaactttttcaaaggaatcttacacaataattacccaaaaaaactcagtttacatatatatatctaagcacatatatatgttagggaggccatggcccttatattgtataatatacatccgcctttggtcacatctttgaccactttagagtgtactgcgtctttttttactatttttttttttttggaaattgtgtgttttaagtactgttgcaagaaataataataataacaatacaatttatgtatgtatataaaaggtaatacattgaaacgagacatgagggattggctttttctcctcttcggtagaactccaagaactttttgcgaaaaggtatgtgttccttcttag

SEQ ID NO: 67028 - DNA, 1355 bp, Cannabis sativa
gaggagttaacggctgcaaacccctctaccccaaaagctgctaagtccaaggaatctcggggaggaagcttggacaggtctgaaccactgaaggctgggtctgagcttgtcagaagtgaacttaaacaggtgtgggcccctactccacctttgccggtgcttccagaggcaaagaagggcaaagggatgctcgcccactatatgaaccggctggttcctgaggttagtgagcaactggctggtgatgacaatgactcttctttggagttgctgatgggcggagacttgaaggaattcactagggtaagtctttcttgacacttccctttaatattttgtacttagctcaaatgctaaagttttttctttgtgcaggtcggtctgaagttggcctacacatactcccgggctaagtctgccgcttcctggaacacgaccctgtccaacaccctgagggcagaggtggacttggccaagaaggacgctgacgatgccagggtagagcttggagctgttcggatggatctgggtgaagccaacaagaagctctttactgcctagaagaagatagctgagatgactaatgatctcgaggtttctgaccggcttgaaaagaccattgagactatatctgctgaagtgaacagtcttcaggatgagaggacttctctttcgagtggttcttcgtcgggtggaggaggagctttcggccgaagtggcgaggctgaatgagaaggttaatgctctggagacagttggtcttgagctcttctatgacttttggaaggctaatcctcaggccaactttgactacttaggcggtgctaaggacatgtacctcgagttctgtgcttcccaagtagcctatggtgaaactgaggaggttgcttctacctctggccaaactgctgatgtacctcccattcaaacaacagatcttccagctttaactggcccagaagacccgaaccaagagcctgggactctagcagtttaaacacttctccttctgttgatgtacctcccgttcaaacaatagatcctcccatagggccttttttaagacatcatgaccggccaagcggtctttaattttggaattatttttcattttttagacaacaggctgaccgcgcagcttttactccgggtattacatgtttttcttatctttaatgaatttcattctctgtttataatcatcgtgcaatggtgattttttatctttaccaaatgttttgtacaggtataggtgcccccaagtgaccgagcagaggtatgactctttgttacttgtcttttacaaatatattttttatctgttcggtattttgggtttgaaataactatcttta

SEQ ID NO: 67029 - DNA, 789 bp, Cannabis sativa
atattatatatatattttttttttatttttattactgtttttttttatatatatattaaattaataattaaataaataaaaaaccctaaaaagtaaaaatcatttacacttcatatttcataaccctaaaaaacatagcagtcagccagccactgccgtgcctccattccacaccacaccaccagatctcactcacgaacgacctcacccacgccagaagagaagagaatcctcttttatcaatcagtctaattagtaattagtttactaaataatactaaccattacactgtgcccataacccggaaacaatgacttaaagtatagcctgtttccattgaagtaagatgatcaaatatatatagttttagtttattgatgatgcactttttcttaacttggtaatttttactgtatgttgttattttgagagattccttctttattgattagtaagaaattaagatttatatagcatatttgtattagtgaagacaaaatgaagaacacaccaacgttataatgtgaagttttgattttattatacttttctatatatttcatttctagacaaaactggctctagatgttcctcattgtcgtgattatatatattattatttgcatctttttcacggttttgttttgagttattttgagaatacagaattggacaaaagaccaaggggtcaacccgccaacccggtaaactcgaccaacagaaacccgaccaacccgaaacccgccaacctgaaacccgccaacccgtgccctattcgggtccgggtt

SEQ ID NO: 67030 - DNA, 708 bp, Cannabis sativa
  modified_base (92)..(98): a, c, t, g, unknown or other
taataataaattaaattaataatattacattaaaaaaattattcaattatttatatatatttatatattcataactatacatatgtgtgaannnnnnnttttactttgcagaatataggaatagtgttttttgtatagaaaaaatttattatgaattgaacaaaaaaaagcatgtgtgagattatgaatctaattttttcataatgcattatttttatattctaatcatataaagttgatgtcatcattgtagtttctattgatatccttaaatttctaaacttaacactcagtgtatcgttctgttagttaatcaataaagtatcgcatgtaaatatagtattggccaaactaataattcttttagaaaaaataattttaaaaaacaaaaaataattaaaataaattcatattatttggaaaaaaatattatataaatattaaatgaaataaaaattaattttgccatcttcttccagccatattatgtttacatattaacaataaacttttttttgtaaggacattaacaataaactttgattctcgattcaaatgttatttttcaattttatttttatatattcaaaattttcattccacatactttctactaatatttttcaatcaatgaaaagaaaagaccaactttaattcccgtatgaaaaatcaaactttcaatcccaataatcaatagaaacaacatca

SEQ ID NO: 67031 - DNA, 1085 bp, Cannabis sativa
ttttttttacctagtatattaaaacaatatatgctatttttaagcatatattgtcaaatttcccataaaaaatagtacatttattgtggtataaatttaaaattttacactatagcaaatgttgtaccaaatttggcacaaaatttactatgtgccaaatttacattactttttggcacaccattagagcatattttttgttaaatgagctatattttagtttttcaccacttatttatacttccattaaaaatgttctaacttactataataagttacaagtaaaaattctttttttaaaattcaaattaattataattaattatatatttaaaatgggtaatctttatatgataatggaagtattataataatcaaccaaaagctagttgtaaaaactattccaattcaatttatatcttatgaattagacaaaagttttacccattaagttgatcatccagtatagatcaataacttaattatatgattatcttttcttacatgtatatatagatagattcatatgctatattgaagttagatgatgaaaaaaaaaaaaaaaaagctcatatttaatagagtatatatggtaagattttgtacatttaccataagtactcaatatacataattgaagtgatcaaagacattaaagattgttcaatagaactcatcatcacagaaaacaatattatttgattttctagaacacttttcatcaacttttcaattatcatataattaaatccaaaaacatttcaattgaattattgaaaggattaaagaaatagtattacctaataaatcagcagtaataaatcaaattctactcaaataaattcagaaaacaaaccctaaagactacaggttcagacagagctagaattacaaatttgcatgctataacccaactaacaacttcaaaaatttcaaggaacaaaggtttcttgggttaccttatcttattccttccaattgctattgaattccccttgaattcctagctagaaaaggctgaaaatcaaaaatggaacccttagttcctccttactttcctgaattcagagagagagagagagaga

SEQ ID NO: 67032 - DNA, 813 bp, Cannabis sativa
aggctactcatggacgactagattcaaggtgtgatggatctttcttggtggtgagagtatatcccgatggggtggtggaactacgtgatgcactttcaagacgaaaattcttcgtgaaaagccaaggagtgaagtttgggggtggtgaggtcaacaaagcaaagacctccatcactttgaaagaagcttcaagaaggacttcgggttgccttgaccttattgtatcacatttgggcaacccaagcgcggaagaacaagattgtatttagctatatatattatataataagtttgggcgccaccccttgtaaaaaaaaaagagaagagtttgattaaaattaagtttggggtgtgccaccccttgaaaaaaaaaagagtaaaagaagaaaaagaaaaaaaaaattattatatacatacttataaaattacatatatatatcactttcaatttcctatagttactaatgattttgctgtggtgtggtgatctttattgctggtgcaaagtagggaatgatagaaaaataggttgctggaatagggtgtgaagcagatttgtgtgctgaagcagtaagtccccgttgttacagcatcgcttcagaattttcaagcagggactctagtgggggaagagtccgaatcttgagggagtatctcttttttccttagttagttaacctagtttgaatgttattgtgcttgtgtgtgatgaaataagtgtgttagtttaagtgttgctactatttgtgtttgttactttgtgagtctacttttgttgttgactttagtattgtgtgtaataagcattatgtg

SEQ ID NO: 67033 - DNA, 1047 bp, Cannabis sativa
tggtgcaatgggaggaccgcaaatttgatttttgagaaacttgacagaatagtgtgcaatcctggttggaaagagagatttcgaaagaataccgtatcgctcttaaattggtggaattcggatcataggcctattttgcttcaagctagtccggggaaaaatgtggaaactttcaataaaaggtggggtactagatttcatttcgaacaagcttgggcgaacaatgaagaatttcaaaagattattacaaaggtgtgggaaagaaaggctaaggataatccaattctcaatatctctcggcttttagagtcatgtgggaaacacttaaatacttggaacattcagcagaaaaaggaaatgtttgctaaaacaaaagagctcaaaaggaaagattgagagcctcgcaaactcaactagtagggaagattggatcactaaacataagcttgagatggatcttaattgtgtggaggaaaaaagacagatctattggaagcaacggagtcgtgctctttggctaaaacatggagaccgaaacacaaagtattttcattttaaggcttctcatagacgaaagaaaaacaccattatggggctgtttgataatactcaccaatggagaactaatgagaaagaggttgaatccattgccattaaatattttcagcaactctttaccaaagcgaatagaggttcacatctgttgagtaccctccaaagatgtgttcctcgtcgcctaagtaatgctgaaaaatgattttttgctggaaccttttactagtgaggaagtgaagtcagctatattccaaataaatccccttaaagcaccaggaaaagatggtctcccggggctttttttccaaaaaaaactggaatatactgggcaaagaagtcacctcagcctgcctggatgttctaaacaataacgccgactgtagaaggcttaataaaattctgatttgcctaattttgaaggttcaaaagcccactgtgatgtctgaattccgtcctattagtctatgtaatttttgttggaaattattttac

SEQ ID NO: 67034 - DNA, 1103 bp, Cannabis sativa
caaacccacgaaccctcaacagcattgagctgaatcaagcttgaatattaaacgaaaaggtgaaactagttacagctactgtgttgactgttactataattacaatcaatgtaatttctttttcgaacgacaaagcgcgcctcaaaaaaaaaaaaaatcaaaatcaaccaaatgctaagaagccagaaagaaacaagagttaaaaagtgaagcgatttgaaagacctttggagaagggaacgatgtggtcatactcgaaacaaaggcagccattgcagttgcagaaacgcttgcatacaacgttgccggctgcgtctttgcgccacctctccgggtgtctgccgggaattatctcggcgttagcccaacagatgttcttcgcctttttatcgaagaatcgcggtctctcgtcaccgttgctgctagcacttcgagaacgggtgggtgaagaagatgaactcatctctctcattcgctcataaattggttagagggaaacttgtaataggcctctcacagcagcataagcatgagtgagaaaatgtaattacatatttagggggacttgtaattcactcttctcatgttctttaatttaggtggagagttttttttttttttgaaaaagctataatctcataatcacataagaaaacaagggtttcacagattataacttagaggtagaaatgaaccatttcacacttggctacccctagagctctcctgacaaacttaaaagtgggggtacacataaaaatagttgattggtatggtgtttttaaaaactaaatttaaatatgattttgagttttaagcttaaaaatgaaaacaacaattttatgttttctatgttttcaaatcattaaatctaataactcttcaaatactctgttgtcgagcaaaattcgcaacaccaaatatatataatattatttatgacaagaagaaattgcttgaagaacaactgcgagtattcaacctataatggcgagtactcgaactggtaatatgaatacttaacagaaaactggaaataacaagaagacagaggattatagtggttcagtcagatcacagtttgcttagtccactgtagcaag

SEQ ID NO: 67035 - DNA, 697 bp, Cannabis sativa
aaaaaaaaaaaaaaatcaatcaatcaatattaaattacatcttacattttattacaaaattagttatctttcacatattcacatttgacagtgtaacatttaaatataatcataagaatttttgtattatggtatggtaaaatgactattgctatatttaatattttacatataatttgataatgtgcacttagaataaaattattaaaataaaattctcaacaaaaaataataagaagtggaaaaaaaaaagaagtaaaaaaataaaagttctcattttttataaattttatttgaatatataattcaacaaataactttaaaaaaaattaaaagatatatagataaaagcatatacaaattaaaatacatatataaaaaaatgacaaattccatattaacattatcaaaccatattttgttatattttttcttaaatcaacaaattaaccacagtgataatactaataaaaatataataataaaataattaagaaaatattattacttttatgttattaaaataattatattaaaaatttattcttgcttttattaaaaaatatgtacaaccgcgcaacgcgcgattttattgcctagtataatactaatgataatcacttcttaattctataagtcctaaacacataatggactaaatctttaagcccataatcaattagctaagtctaaatta

SEQ ID NO: 67036 - DNA, 901 bp, Cannabis sativa
ggagtggactagcaccctcataaacgggataaacgatgaccacacacatacaagattcaaactagtctaggggatatatactaattcccttacctgaaatgcaatgatctacatggggttaatctaagggtatacccctcaatccctatagggttagtataggggtacacatcgtaaatccctaaagggttagtctaggggtacaccccttaaactcctaaagggttagtctaggaatacaccccttaaaccctaaagggttagtctagagatatacccttatacctctgaagggttagtctaggggtacaccccttaacccctgaagggttagtctagggttacaccccttaaacccctaaagggttagtctaagggtatacccctaccccctacaccctcatggtacaagttatgcattccagctacgtaagacatggttgatatgagtacatcctcatcataccatgactacccacaacgtcaaatgggtctcagagggtcaccccgagatggcaattgacaccctccttatgttgggtctcgggggtctcatccccaagtattagcttctatctccgaaggtagttaacgaccatgtcacacccttaggagaccctcatcgttagtggctaattaaaatatttaaaccctgtaataagctcaaagatagttacaaacctacaaaaataacgagatattatcacaaaaatcaaacttcaaccacctctaaaaaccaaggagacggttgagatagcttcgcattggtcacgtctcctgaagcaagatgctttgatgcaaatacagacattttttgcgtctacagtatacacgtcggttgggggaacggacgaaaaaacttttaatgtcaattaaaaactgacaagaaatgtactttttg

SEQ ID NO: 67037 - DNA, 859 bp, Cannabis sativa
tattttatttatttattttaaattttttagtttttgttgcttagttttataatattaattattattataattttatttatttttgagcagttattttataatattatatcatatcatcacaatttttgtattttgatggaataataatattatctttttctcatttcatgatgaaaactaatatgttgtgcggttgttaccacaaaatgcttataatttgctttaattattagtctctttaaaaaatattagtttaatctttatttgtttaataatattacatgatatattttttcataaattatctaattaaaatatattttgtattgttacaacatgaggtaactattattttattatttttattattaaacaatttaaagttgttattatagttatttaaatggttgaattagtgctatggttcttccgactttaattacgattaacaagataagtctttttatatttttttttttatattttttcatgtaggaaatattttcttaatattgtttatattgttagttttctctataatttctatttattgatatttttttgtttatttattgggaaaataaattataaatttacaataatatttatttatttattattttatttttcatctcactaatgtatattttatttatttgcagtttaaatgctattgtcccttcaagcttttagagaaatgatagcgagttttcaaaacaaattgcttaacgttaatgatgacattggattgcagtctattaccaagatcttacaactgttattgttttactttcagagttttctacgctaatgattttaagatcattgttagagtttttacaagtttgttatctaaatt

SEQ ID NO: 67038 - DNA, 885 bp, Cannabis sativa
tctttagctcctttcattacaaaatacaaaacttgtctgggttttttgttcggtgttatgagtattgagacaacagaatggtgatttgatttatgagaatattgttagtgttctgtctaattttttgaaggcatatttgcattatgtttctcgtgggattaatatggtcgcatatgatttagtatgggatcaatggtctaattgagatggatggttttacatcttttctttaatgtattcaattttaattatttggagtgttactcttaatctcatattttaatatcttaagccaataatttacaatttcgacaacaaaattcttgatagtattcaaaaagtgttaattttatttttgttgttgtaaattatttaatttttttaaaaaaattattctactccctctccttggtggaaaaatctgtggcatctttcccttcctgccaaggtcaaacattttgctttccgagctacaaactccaccctccctacagcaaaaaacctagctcataggaaaatcattccttcctcgaattgtgaccgttgtggaggaatggaagagtcggtctctcatgcattgttttactgtcggagcattagaagagtctggaaaggtacgcaattttatccttacatttttgctaattcttcaaaaatattatttcatgatgtcgctgatatgatttacacttctctgaccaaaaaagatgtagagatttttctttgtactgcttggcttgtctggtttaacaggaacaaagctctaaaagatcaagctcacgacccagatcatgcgattctcagcttggctcaaagctacctagaagactaccattcctcccagcggatccctacatcctcctcccaccctagccagatgtcagc

SEQ ID NO: 67039 - DNA, 679 bp, Cannabis sativa
  modified_base (317)..(324): a, c, t, g, unknown or other
ttctctctctcgattatgcaggtagccagcccaagaccaccatcatctgccggcgccgaggaccaccgagccaggcgtcatcgttttcgaggaccattgaccctggtaatctcgatcccctctctctctctcagccatcttctctttctctcccgataatacccaatctcaagaccacctaggtgctgtcgccgtcgtcgaggaccacagaccattgacccaagtgtcgtcaccgtcgtcgaggaccaccgagccaggcaccattgtcgaggaccaccgagctaggtaaatctcgatcctctctctctctctctctnnnnnnnnctctctctctctctctctcgctgcccgatctcctctctctttctttctctctttttagatatagggatttctataattttttttttttgcaatcatcaagatctgtgtatagatatccctatttgggtattattgtattatttgttttcagatatgagaaaagataattgttgtggggaaaataaatttagggttttcaaatttgagttttgggactgagattttgtgtatatatttgtgtgtgtttatttgtttgttcgatttaaatttgtttaaatttagtttaagtttggttttagtatttaatttttttgtgtgatatggatttgaaaaataagttgtggtggtagtttcg

SEQ ID NO: 67040 - DNA, 1254 bp, Cannabis sativa
aaaacctagaggccatcaaaatctggggaattattcatcaaatttctttactctttggtagattttactcccaagctcaacctagacgctttgaggtaagcgctttactatgttatttgaggatttttcaagctttaagctagtttagggttagggttttaggatttcagggctggggagttaaattgagtttagattatgtttttaggtttgatttagggttcgcttgagtttagtttgagtgatttagtggctgttgtgataaatttggagaattgagttttaaaactcaactttttggttctttgatgggattttgtttaattgatgaagtattgtgaattgatgattggaatacactgtttttatgttattggagtgtactggaaagtttaagcaagttcggaggagctcaggattggtttcaggatgtaaaaccagaattaccccaaaactgccaaaactagtcgatcagttttatatggtattggtaaaccggtcaacccgttggcttgcagggggaattctaggatttttgccttgaatctaattttgtcttggggtgttttccagaacctagtttagggtatcctagtgatgttttagctactttagaattagtggggagttagattgttcgattacaaaattagggtctgtttctgaaattttatataagtttttttatcaagctttgttgtcgtgacataggacccaggatcatccagcatagttccactcaggtcggcccgcacacttaatattggattgaggtaaaaaaaggctttatgcactactgggcatgttagacaagaaacaattataatcgttggtgccttgattatgatcgaggtaatgattgttattgtggtgactcgattatgatcgagggatagatacggtcattaccgttatgagtaattacttaattgaaactacataaaggttttttacttatcgtttgttttatcgggcaacgataatgacatatgttgctcgtggatagcgagttgtaagggtgctttatgaggcatcaagattggtacgtcttataaaatgtatgactgtttatgcaatgcttgattatgctttagattaatgaatttgtgtaatattccatgttgtgattatttgtattgagcgttgtttgaatattaatagcttttcttgctgagtctctgtgactcacgggtgcttcgtggtgcaggtaaagggaagggtaaagaggaccaaccatgagtcagaggttttcta

SEQ ID NO: 67041 - DNA, 580 bp, Cannabis sativa
  modified_base (394)..(410): a, c, t, g, unknown or other
  modified_base (494)..(522): a, c, t, g, unknown or other
gatcccgagattttataaatgtattactttatgtttttaattaaataagcaaattttaattattcacgatttttaataacctcgttgattagcaacgagctgcacaatacgctaaagatcacgctaacacgtctatattagttagggtgttacatctccactgtttggacacaacggaatccaccgattcttaaatttagatactacgctttgtttgtccagagtgaggatttttccaggtaaggaagaacccattagccaatttgggtatagtttcatagtagctaaaaaaggtttactactttactcacaagaaccacatttaccaatttgaaataatgcattcttccttataagcaatggttgtttttatataggctaattagtaattttnnnnnnnnnnnnnnnnnatgtactaaattatgccccctgaaattttttggccgttaaaaatttcccttgaactatcaagattgttaaatttaaggactttnnnnnnnnnnnnnnnnnnnnnnnnnnnnntggatgaaagttcagggggcatgagtaagtacatattaaagtttgagggacatgattt

SEQ ID NO: 67042 - DNA, 696 bp, Cannabis sativa
aaattaaaaatttcaaaatatctacatttgaaataaatatatttcaaaatttacatcgaaaaatcattattaaaatagaataaaatatagaactctccaaatgattttttgtcttttttggcggtgggttgttgttcctgagcatgagattatgtgcagctctgcctttaaaatcagttcggtgaccttgccctgaagcattgattcctttatttttcttaggagcttggctggcaggatttgttctcttttgctgatcattaggagtagctttcttggaagtttctcttacttttctcgtccatttatccttaggaggattatgggtgtcaggatcttttggattcgttttcctcatattattatcctgaggagtagcattatttagtatgttctcgccaggattctggtttcctcctccaaatatggctttcaaaaggggtgttcatggtgcgaatggtgcggtttttgactattttttcaaactaacccgcacatgttgtttttccaattttccaaatcgcacccgcaccgtaaaactaaaacactgcaaaaactgcactgcaaaaaatagtgcggtgtagtgcaatttttgcagtttagactatcaccaataattaaactatcacaaatataacaaagcttgagcaacacttatcaaaaatatcataaggctttaaaataaatatgaaaaaa

SEQ ID NO: 67043 - DNA, 1026 bp, Cannabis sativa
  modified_base (532)..(539): a, c, t, g, unknown or other
gatctaaaagttaagaatcttaggacggacaatgggttagaatttattaaatctaaatttgacatgttgtgtcaagagtatgggatcactagacacagaaccgtagttaagacccggaacaaaatggtattgctgaaaggatgaactgaaccctgttgaatatagttagatgtttattattcaatttcagattagagaaaccattttgggaggaagctctagctactgcaacctaccttataaatagaagtgcaaactgtgttataggcttaaaaccccttatcaatagtggtataatagaactccaaacttattacacttaataacctttgggtgtacagtttatgtacaccaatctattgataagctggaacctagattagttaagggaaccttcctaggttatgccttaggtatcaaggggtatagaatttacatttccaagaagggtagaccaaagattgtgattgctagaaatattgttttcaatgagttggaatatcctcacttgacgtctgggaaaggtagtgtnnnnnnnngtgatgcaggaaaagtaggaaacatgcacgcatggaaatggaatatgaaacaaataatctggaagagagtttacagccggaagtgattatggagctggatcaaagtgcgcagatggaagctaatgctgagacggaagatatcaaagaccaaatagatgttctggaaggattcagataggcttgtctggaaggttatcatttggcgcgtaatagaaccaagagagagatttaccctccggaaaggtttcctgacgcggacccaatacatttgcactggcggtagtacagcaaattgaaattgaagagcccgaaagctacgaagaggaaattttaggagaaaacaagtcaaaatggctctaagccatggatgaagagatggattcactctagaagaacaagacttgggttgttgtaccaaagctggagaattaaaagattgtggagtgcaaatggatctcaaggtaagagagaatcaatgaaaatgaac

SEQ ID NO: 67044 - DNA, 4295 bp, Cannabis sativa
ttttttttttttttgttgagaaaacagttattggaccaatctcaaaagatactacatatttatgcatcaattctcggttttctttttcatatgtaattgagctaaagattttttataacacttaaatagcctttggctggaaactacaaaaattgaaatatgaatatagctataggaataagaatagaaacatgaatataatatagaattaaatttaaaatgtataatacatcaaaatggtatttcttttcattttaaaataaaatattcattccactaaaataataaaaaaaattattttattaaaataaaatttcaatactttaaaatacaaaataaaataaaaattattttctttccattttattttatatcctttagttatatatctttatatatacatgtgacatgttcgccaaaaacaattttcagagaaaaaaaaaactattcaaagtagcagcaagctttgttcaaaaagagaaagggtacccctgattttttttttctttttaatattactttagttatataaacttttaatacccatattatggcctctctaatgcctgctataaactacaacttgattttatttttctctcttttctttctatcataatattttataaatgggatgtgttaggttgtaacttgtagagaacacactgctccttattcagaaaaccttaagaaactagactaaaaaagctacacactggtatttactttggaagatactacatgcaaccaaacttttcctaataagagagaagagctacgcaaaaaccttttattgcaagttaatcaacctgtaaacctctggttagggaacaaactgtcaacctctaaatcaaaatgattagtactacagttaggtgaaaattgacagatctttcagtcccaggttggtagaatgtttgccagagttttaagggaattcttcaagtcaacttctgcttgaatacaaagaaagggaatggacagtagaaaacaatgcagccttgattttagtatgaaaaaaaaaaacatatgatctgcagaatagtgaaagagagtttggtttctttagagagttattaatgtctatcaaaggttgtttattaatccctgattataacaaaaatataagtgtgaaagtgtttgaggaggaatgaaaaagaaataaaggaaaagggtcaaaactcaatagtcaataatggataacaatagaaaacattcagattttcatcctcatttggtccactacttatcattaagcatgagcattatgttgtaaattgagatttcagtttgtttgttacattgtctatgagcatactgcaattttaagtgaatacatattaaggaaagagataactgttcccctctggtcagatccgtcacatttgataggtactctaatgaaaataatggtatgctcatagacaatgtttggtagaccaaaaaccctaccaaatttctaaaggaattcataagaataccttgtgagtggagggtgacccagctcaaacatttcatgaaacattgtacagaggaatttacgaaacaaagacaaataaagctggtaagcccatccacaggtttcatcatgcatgttttgaattgggttggttttgtttggcagaatttcaattccatatctccttatacagttttatgcataacataaagaggaaatacttaactgttaaaaaaacgtcgacagagcttttaaatttatgctagaatgaatatgccatcagcagtgtaaacttattcctatttgaatttaatgtccattgataatcttttttgtataaattaaattgaactctattgtaaatgccagcaaattgttacctcacaggagacaagagtgacaagccaaaatgagaagcgggtcagtatcaaagaaaccattgattaaagtccgaacatctttctctaaatctgtgggagcaattaaaatgcatatacttccagaagagtttttgaagtttctgcggttattacctcttccttcattacccaacataacaatcctagcatatgatacaccttgacagcctttgagtgagcttgatctcttgaaacaaatgtatggacctcaccagcaatctccacccagctaaaaccaggagttttaagatcacaatttctcctcatcattttacgaattttcgctacatcagtccaacgacctttggaagaatacatgttagacatgatagtgtaattcactggatcgtttggttccaatgcaaaaagctttcctgcagcccattctgctaatcttaaatttccatggattttgcatgctccaaggaaggctgccagtgcatctttcccagattcattttgaatgcaattcaaaatattcaaagcctcatcaagaaggccagctcgtccaactaggtcaaccagacaggtataatgttttgaatctggtagtatcccatacttcttagtcatcatctcatagtactgataacctttatctattagccctccatggctgcaggcagaaagaaccccaagaaagacgattctgtcaggaatcaatccacaagtcaacatttcctcaaaacactctatggcttcttcagcaaagccatggaatgcataggcacatataattgacgtccatgtaaagagattacgctcttcagccaaactgaaacactgaaatgcaccaacaatgttgccacacttggagtacgcatttatcagtgcatttacagttgacagaaacgaatgaaatccaaatttaattgaacgtgcatgaatttgcataagctcagtaattacacctgcattgccgcatgagctacaaatactagacagggttagttcatcttgagaaaaaccttcttgaagcatttgttggaagagtttgatagctttcttactgtctccatgctgtccatatccaactatcatggtgttccaagatactctgtttctaaaggccattgtattgaaaaccttgtgagcatcaattatgtttccattctttgaatacatgtcaatgagtgcagttgcaactaaaacatccaaatcaaaagactgtctaataacaatcacgtgaatctgttttcccaattgacatgaccctggaataccacataacttaatcaagctacagaaggtgaactcatcccccttgacattttgtgactgcatacaatgaaagatgtgaatagcctcattgataaaacaatttgaagtatagcaataaaccatcacattccacaaaaccaaatctttgaacaagacagattcaaaagcacgccttgcatcttcaaccaaaccacgttttgcgtaccaatcaacaagagcactaccaacaaaacaattagaaccaaatcctagtttcagaataaaacagtgcaattgtaaaccagtttgaacatgatgcaataatacaatgcatgaacggagcaaaagattgaaggttatatcatctgggcgaaccatttcgagcaacattctcttaaaataaacaaaacccaataaagaactggacttacatttacttatttcatcaactaccccgcttatcactgtattccacgctataacatttctcacagtcatttcaccaagcaccttgtgtgcattatgaagctccttgcatctaacgtaaacattcaatatctgattctgcaaataaagataactatataatcccagttttaccaaatgtccatgtaattgttttccttcgcaaacaaaacccattttggcggagattttgagggcattggaggaaagagaatgagccaagtgagattcatggaagtgggccgagtcgggaactgataataaggctctgagtcgactaagtgggggagatgagtcgactaagtgggggagatgtgagataagatgggtgggtctgttttgaggcatttgtagttgttgttgttgttttaatagaaatgggagaagttggcgcgaaaagtaactgtcgtttgaaactgacggtcgagattgaagatgaacggcatttaaatagcatggaatagctcagatacaaatgctcctctgccgataactgccaaagcctctttcatcgttacgtacgctaccaaaactatatactgtacttctaattattcaaaaaaaaaaaaataataataaataaaaatagacaagtcacattttttgtttaaagaaatttatgatcacatagttaaattatggaaacgaaaaaaaaaaaaaactcgtttcgtaacacttttgttttttaattttttaatcatagagtaaaagtaaaatttttgtttttaaaaattttatttttgaaaaacaaa

SEQ ID NO: 67045 - DNA, 764 bp, Cannabis sativa
  modified_base (556)..(558): a, c, t, g, unknown or other
aattcatccaggtctttctgcaagcccatcttcgctaaggcgtcgtcgttggagttttgtgctctcggaatttgttcgattttaaagtaattgaatctttcttagttcttgcaaactttctctaaatactttgccattttcaagcctttggcctagtattccccgaggacctggttcacgatcagcttggaatcactatgacaaatgagatttttgacgttcaaggcctttgctatctttaagccggcgatcaaggcttgatatttagcctcattatttgatgcgtcaaattggaattttagagcatagtgaaacttaaagccttccaacgatattaatattacccctggacctgaaccctgttcgttgattgcgccatccacatataacttccaggtttctgcatcttgcttatcaggtgggatttcctctagggttataccttctgtcaagaagtcagccaaagcttgacccttgatggatgtttaaggatggtatgttatatcgaactggcccagttcaatcgatcattttatcaatcttccagaaacatctnnntttgataaaacttgtctcaagggcggatcggttaacacttttatggggtgagcctagaaacgtggtcgtatattgcaagacgcatggactaggcagaaatcgagttcttgtagagggggatacctaggttctgcccctagtaaccttttacttacgtcgtaaataggttaccggtgcttaccctcttctcgcactatagttgcact

SEQ ID NO: 67046 - DNA, 501 bp, Cannabis sativa
gcattctcagcatctatcccaacagccaccaataatatccccttgcagtaaccctttaagaaagtaccatccaaacaaattagcggtctacaaccaattctgaatccatcttagcaagctttcaaacaaatatatactctctcaaacactctttttttcaccaaccattttagtcttgatcttagcagtactacctacattattaaacaacaacataagcagtttaacgtaacaaacacaaaaagaaacatagtatcttgagcaatttaaaaaattagtacataaatatataacataaattgaatcatagtaaaggtaaattatctcttctctagtatcgtaacaggtttgattgtattagccaggtgttgggcatttgtcctgggaagcatgcatgcatgtttgtatcattgtttcttttatgtatttacacatacgcatatgggtatggagccttcagtttttttccatttatttttctagtatagaatattgtttgtt

SEQ ID NO: 67047 - DNA, 1245 bp, Cannabis sativa
gggataatggtatttaaacctccatacaaaatgatccttcacttcttttccccctcatttttgtttctctcttcctttttctctgattttcaaaacctcctagcttctttcacattttccaaaaaagaagttagaagcttttgattttcacagaatcgtttgaagaagatcgatattttcaaggttagtggaaaattatttgcaactattcccttttattattttgttttaaaaatcaatctgtattccgtgttttaagaggtagaaaatgcatgagacaataggacatatatatgaaactttatttgctttctaacaaaactattcatttctctgggaaatataggcctgaaacttgaataatcacaagtttcaggaagaacacctcgagtgttcgcacatttcttgttgagtattatgaatactcgcgaggttcgtgatgaacatcttgaatactcgcatacacttccgaataacttagtaaatctataatttagctattttaatccttgttagaatttagggtttattttttagccttcaaattatgtgtgcttttgttgtataaactgcctgagtcttttgaatggtgggtgtgtcgcagtaacttaatactcatgtaaactctcacatgtttcttgggtcactgcgattcgcccagccatttgagacatacgaccagctttttcttttcttgctttttagtcggatgttaggtctaaccaggtttctcgaaatggtgagggtttcccattaactcaatggtcatgcgaggaatgcataccccttgggatactggggaactcttagccatttcttgagatacactattagttgtacatgtgcgacttatactttgcgaggattggctgagttctcgaaatggtgggatctcatcatcttaattttcatgtggcgacatgatcattatgttactaagatacccccagccatttgttgagatgtctggttaatcctttatattttctaaacctttttatgcgagtgagggcacttcttttattctcgcactttcaccacactgaaaagatgttccatctttcagatgagcaacttgacggatagccaaatgcttggctctagaggtggggcttttgcaattgaggtggagaagagcgatagtttcatacccaccttgatctctaaggaggaggtccatactgctagagctgctcgtcaaggttcactatccatggacgagatagataggatggttcaggaact

SEQ ID NO: 67048 - DNA, 949 bp, Cannabis sativa
atgtaaaaacatcacaaaactattatttctaccaaatatagatcaacttttgcatggtctaataacagaaaagaaactactttattgtatttaaatttttaatgtgaaaataaaatgagcaaaaaaaaaaaaaaatacaaaaaggaaagagcacaaaggagagagcatacctaaaaaattgggttctgccttaggagaaggagatgaacaccaaccaatgtcttttgcgtttagggttcctgagtaggccaagtaatttatttgcttattaaagattttttatcctggtttttataaaaaaatcagaataaaatgattgttattaagtctcgtttggtgtagggaagagataaatatttaaaaaatatacttttttaagaccagccaaacaaggcccttgttccaaagtgggataaaaggtcaatacctcacccatcagagttttgtttggttggtcattaaaaaactcatattgaactcatttattattgtgtattttttagagaaaattacattgtacacccattttacttaatttattttaatttttaccttcatttttatattctttgagatatatccacttttatagatgatgttcctatgatagcccttaggttgatgtaaattatgtgctagacttaagtagagagtaaaagtatatggagaaatccactcacaaaagtgggtactttttaatgaaatataatatgagggtattttttattaataaaaataaaaaagaggtatttctcaacttatcacttttttttaagaccgaaccaaacataacctttatccttaaatgcatctattttcatctcttaatgggcatctccaactggacttcaaaacaccaaatatagtacagtttcataccatttttattccaatgggacactaaaactattcttataaataggtttgtctacagtgtcccactaaattt

SEQ ID NO: 67049 - DNA, 2088 bp, Cannabis sativa
  modified_base (665)..(677): a, c, t, g, unknown or other
  modified_base (785)..(798): a, c, t, g, unknown or other
ttgagatggaaccccattcaccttatattcccaaattctaacatggtatcagagcaaaaataaaaaaaataaaataaaatctctagcgactatccaacctaaaagaaaatataaaccgatcgaagtggagccgaaagaaaagagccgccagaaacccaaaaaaattgatccaagagccaaagtcaaaaaaagccacttgtgatttggggatagtgagccaaaaataaaaagagccaccaaaaataccgatccaaaaagtagagcaaaaagagccacttgtgatcagggatagtgagccaaaaaagagccgcttatgatcgagttatccaagatagtgaatatataaaatagccaccatcttgagggggatgttagagagtctcattgctaatatgtggaaagataataaaatacataagaggaaatgggctactcctcccatagccaattgattttgagatggaaccccattcaccttattgcaaattctaacagatacatagtaatatataggtagaattgtacactacaaaaaatcttacttttaatcacaacaaaacttgtgactaaatgtaaaaaagttgtagactaattataaattatgattcctatgttgtggccaaaaggtccgtggttaaaagtattagttacaaaaattacaattnnnnnnnnnnnnntgtatttttagtcacaatacttattgtgactacaactaaattagtgacaacttgtatctaaatgttatattttagtcacaaataattttttgttgtgattaaaagtcnnnnnnnnnnnnnnaaaaattatgttgtgactaaaaagctgtcactaaacataacagttttttatagtagtaggtaaaaattaaatattatttttacttctagcacaagggcgttttctattttctgcacttaaagaattataaaacagaaaattaatataacattgtatatattgtagttataaacaaacatctcaaatctcaactgttttttataaaaatctgaaagtaatttacatgtcagaaataaagtttaacataattaatattaagtgttttttattttcggcaacagtaaataattcaaaatttcaaaaaacaattagaatgcttaatacaaatataatgtacattattgtacaaaaataattaaaatatgatttttttaggtgccaaaaaagtttctacaacagaaacaaaaatgacatacttaattatttttttcttttttttttataattctaattattttttaataatacatatttatatatataaacatgcaatttaaaagattattaagaggttatttgaaggaagctcgatggttaaatgaaggatacatgccaagtttgaaagagcatttaaaagtttctttggttacttttggttatttcatgttgatggcttgctctttagttggaatgaaaagtaacaatattgtaaccaaacaagttttcgagtggctgtctaaagaccctaagattgttagggcaactgctagtgtttgtaggtacatggatgacgtggctggtcacgaggtacgtaataacaatatataaattatgatttcaaataaataatatatgagtgttgttatttggtattattagtgcttactactatcatgaactaacgcctaactacaaatagttaacgatataatatattattaaaattaaatcatgtgggatcaatagtcatagttattaaaataaaattatgtgggactcaatataattaattttactagcgatataatatcttaaaaagtgctagacaatatagataccttttaacatttctcgtaatatattttcctattctagttttggcaattgtccaccctaaaatttaagatctttatatgtatttacaaaaaatttctaaggtgaggcatttaaaaaaatcccatctgtagggcatttaatgtaaacttttagttttaattgtttttgtttttggtaaaaagaaaaaaagactttagttgagattagattgagtctattataatatatactatagtaatattaatttttaaatctgaatatatttttttcttctttgaaatcatcaagattggt

SEQ ID NO: 67050 - DNA, 2012 bp, Cannabis sativa
tcgaggctctttactgttggctactgcaccagtgttgtcataaagtaaaaccagtagtctttccattccaagaacaacaccaagtcatgcgaagaactttctaagctagacaatatctgtagcagccttagcggcagctatgtattcggcctccatgttagagtctgatgttgcagtttgcttagcacttctctaaacaactgctccaccctaagattaaataccatgcaagatgtagactttctatcatcaagaccagcctataaatctgagacggtatagtctatggaatttaaagcaccacccttcactactacaaaaatggttcttctcaacttttttaaacagtcgtttaaagtattcatgtcagtttctataaccgtcgcccatacgaccgtcgtgaaataggcaaaataggcaacagttaaaaactatcgctaatgtagactttctgacagtttaaaattgtcacctataacagggtctaggcgactgttttaaaccatcgtctatagtataggacacggtttaaaatcgtcgcctataccctgttatagtcgacagtttttaaagcggcaggaatgtattaaaaaaagagaaaaaaatatagatttttctaccattaatggcagaaaaatctgtattttctcccattttttttcctgcattagtttaataatgggttggggatgaagcattttgcccatggttatgctgggcgtgctgcggcacagcatttagcatgtcgcagctcgtgtcttgtcttcgagcccattctgggtttagcatgctgcggtccgtgttctccatgccgcggcccgtgtgccttctctacctgctcacttagttatcacatgcaaggctagacaggaaattgttatacctagacactactaaaaattttaaattgactagttttcacgatttctacggttttcatagtttttttttaaaattaaaaaattaaagtttactaggaactaaaactaaaataaaaactattgtaattatgtctaaaaaattagcggtaaaaagtgtaagatgctgggatgcctccctcatagaggcaccaattggatgacgttcttggcttcatcaatggggcctcctaagtaaggtttcaatcgttgaccattgaccttaaaagtctctggtttctctcttataattttcattgcgccatatgggaatacctgaacaactatgaacggtccagacaaccttgatttcaattttccaggaaaaagcttcaaccttgaattgaataataaagcttgttgtccgggttaaaactctttcctgactaagtttctatcatgccatttttttttgttttctccttatagatcctggcattttcacaagtttcgctacgaaattcatccatctcattttgttgtaacaacctcttttctcctgctgctgccaagtccatattcaatgttttcatggcccaaaaggccttatgctctaattcgactggaagatgacaaacctttccatataccaacctatagggtgacatacctatctgtgttttgaacgatgtcctgtaagcccatagtgcatcatccagcttcttagcccaatcttttcgtgagcgttgaacggttttctctagaattaatttaatctgcctgttggacacttctacttggccattactataaggatgataaggtaatgcagtcctatgacgtactcgataccttgcaagtaaagcttcaaattgcttgttggaaaaatggcttccttcatcgctgatgattgctctgggagttccaaaccgggtgaagatatttttctgaagaaaatttagcattgttttactgtcattcaagtgtgttgctgctgcttctacccatttggagacataatccacagctagcaataagtaagaattattgtacgatgacgggaaaggtcccatgaaatcaatgccccacacatcctcgcaggaatttttttcaaaaattcacactttgctcaaatcaattccaaaccacaccaaa

SEQ ID NO: 67051 - DNA, 695 bp, Cannabis sativa
  modified_base (328)..(346): a, c, t, g, unknown or other
ttaattaaaattactaatttagataactctaaatataaattttaatttaatatttataaaattatgctttaggaagatcacagaaataagcataaattattttccatctttagtattaattttccaataaatactatgaaaattacttaatttaagttagtgcaaaattaattcaaaattaattttcaactcaaatttaattttctataaatattcgaaatccaatgtataaagatgcatttttcaaaatttatataaaaataaataaaataaatctggaaaaattattctaatttatattggtctaaaattaaaaaaattaattttnnnnnnnnnnnnnnnnnnnctatttaattaaatctcttaagaacaatatcaaatatttaagggtcttgaacaaatcaacttacatattaatttttttaattaattaaatatacatagaaaaataccaaaaagtcttcctagaaaatatctatctagataattcataaactaattactaatttgctaattaaaataatatattttaatctattaattttaaaataaatcattaataaaaattacttgatttaagttgatctaaaattaattaaaattaatttccaacttaatttgattttcaaaattgaaaaatttcgaaatatctacatttaaaataaagaaacgcaattcgaaattatgtgagaaaa

SEQ ID NO: 67052 - DNA, 2272 bp, Cannabis sativa
ccaaacaaacacattgatacaataaataaaatcgaaagaattacctaatagacaaaaaattttaaaataattacaaaaacacgtcaacacagaaattttttcatttttactctttgaactttttttatatacaaaaatacctcttcagtaaaaacaataaactgttttttttttgttttatagttgtcacgaggttgtttctggctgttttatagttgatttagttgtcgtgaagttgatttctcgttgtattagttgttttttaacattttgctgagcaaagtgtatttttgtaatcttaaaaatttataagaatatttttcgtaattaaaaattaaaaaaaaaaaaagtatttttgaaaattccccaataaaatcttataaacatattcccttcccctcctaattcttccttctagcatatgcgtaccgaatttggggtctatcaatttcacattatgtaggttgattagagtttaaataaataggagacgaatgtatatacatgtgctctgtgctgtagcttaatgttttagcttctccttcctgtcctcatacattacaggtatcggtattagcaggagattttctgctttctcgagcttgtgttgccctcgcagctttaaagaataccgaggtatgtctaccttctgcaagtgatattgaacagtgatacagaagtgcatacatcttttttaaatcatgattatttagacaataatcatgcgatctttgtctttaatctgtaggtagttacactactagccacggttctagaacagctcgtgacaggtgaaaccatgcaaatgacatgtacatctgaacaacgttgtaggtactatgtttcagtgctttcgttaatttagtttttcattctctctgttccatatgctagaacctagaattttttattgatactcatagaatctatttgttcttctccttctcttacttaccaagatttatcgagcaatatgctctaagaatagaattaggaaaatgctcgacattagttggaaacgtaatactactgaaacaaaagtggaataaagtgcttgtgccaaaagctgctcaagaaaattgataacgtaatctggctttgaagggtacgttatgttcagtacttttagctattttggatttggataaatagctcgctcctgggtgagaatcgctgcattattcagattaaatcaagtcaatgccagtgcagtgatgtagaacaaaagaaacaaagagagaaagtagaggaattttggtaggattagagagagagagagagagaagagaatgaggagattcttagcgagaaaaactgatgtttcaatccttttcaagttttttgactgaagaataagaatacgaaaatctagaggggtggttaccggttagtcatatggtttgttcgctcaaggtatgagattcaagtctcgtgcctacatagcaagtgttgtaatttctcggtccccaaatattgtagggttaggtggggagcccagtttacgaaacgatatgtatttttaaattataataattggggctgattgcaataggaaatctgaaaaaccattaaatatattgaaaatgatttagaaaaaacaatcagaatcaattttcttttctttatttcgttttattttacatgtatttaatttcattcttaagctgattttattcctcttgcagtatggaatattatatgcaaaagacatattacaaaactgcatcgttaatttcgaacagttgcaagtcggttgcagtcattgctggacaaactacagaagttgcaatgctagcatttgagtacggcaaaaatttggtaagtgaacccttggaattcttttcgttctaacacgaaacatgcttcgttatatttgtttcattgcacattgtctttgctgatgggtggctggcctatcattgggggtacttaacaagttcattgttcatgtcctttaaatatctaccgagaaattagtgataagaaaacagcttcggaatttattttccagtaactcaacccaaatattctttctactctgcttcagtgatcggttgacttaaaatttgacaaagtaaatcattatggtaatcttaagctatggcgaaagaaaacgcttcttctcatcgttcgatcatatgatggatgatcagtatcaataactcaaatttcttgtaaacttgtctcatcgatatcattattagttgccaatctacttcaaatattcttttatcaattaaattttcgataccacttatttttttagcattat

SEQ ID NO: 67053 - DNA, 866 bp, Cannabis sativa
  modified_base (638)..(647): a, c, t, g, unknown or other
aaaaaaaaaaaaaaaaagtctccaagctcaaaaaactaccataatagccctcaaattcgaaattcttattagtccataagtaccgaatttatgtgttcaatttgttgctcctaaaaatatcacaagttaatatttaaaattataaatataaatatatattttacttagttggttttcagggattgtgggatgagcttttttgaaatttatgccgtaatttttcttaattgaaatctatccaaacaaaaaaaaaaaatattacaaaaaaaaaaaacattggttaatatacatttttaaatatctctataaaggttgttgctcattagagagaataataaaaggttgtttagcgtaataatgtaaaattttacatattttaatttaatagctattataaaaataaaaataaattactaaactaatagtaaaatactatctcataatttttgacactaggcatgtgcttagaactcacctacaaaaaaaaaaaaaaaataatctcccttttaaaattacacattattttttgttgaatttgaaaaatatcacattttacttaaataagagtccaaaaatattttttatggcttactaaattttaggatcgaccttgttcttataattaattagtaattttnnnnnnnnnntattaaaataaaataagtaggacccgatattaaattacaccaatagcgatacatctcacaagaatgttaagcaccataagtttcttatagcgaaggagaatgatccattttatatgcctaagtaactttctttttacttaaaaaaaatatcgatattaaattacaccaatagcaatatttctttataagagcattactagaaaatgatacgaatcatca

SEQ ID NO: 67054 - DNA, 1341 bp, Cannabis sativa
tttatcaattaactaaatctacctctaatttatatttaattgaaacatacctttttttatatgtactgtactcaaaataccctgacatatcctccttctgcaatcagctttgtcgacgtcgttgactcaccaccatgggaggtcgtctttcccgaccatcgatctattagatctctgtgtcgacgtccacagtaggttgtgatttctttttaatgttatttgattatttagggttttttcctccacagattctgagtttgagtttgtgtttaaatgaggatggttgtaattgtgtttgtagaatgttttgatttgttaggtttaattttaatttgttgtagatatatttgagcattttttttctattctaatatacgctatttaaaaaaaaaaaaaaaaaatctcttttcaaaaaaacaaatctcatatatgcttcattagatacagtttctcggatttattttattttaatttaattttatatatttaaatgatttttttaattttaaaatgattttataatttttaaataaatttttatataaaaaaaaaaacaaatgacttgaaccaattaaatgacgtcacgtgtgtatctagttggcatttaacataaaagttaacgttaggtaccctatttgcaacaaaatattaacagaaggtatttttaccgccaaaaaaataaattaagtatttatttgtaactcaaacttaaacttaagtatttacgccgcaaattactcaaaattatttatatttcttagagaatcattgttgtaacaccgttcttttcgcaatgactaaaaaaatattattctattatttattttttaaaaagttagaaacatgtatgatattccaaaaagtaaaaaatatttatatatataaaaatatcaagtttatactaaaattataattaacaataaattttaaattttttatatattaatattacttaaattaaatatttttttaatagaaaataatattgtttattaaataatataaaaaaaattaattatacaattaaaaatttacataaccaaaataaaaattatacgtgcattgcacgtaatattaacctaatatattacagcgtccccaaatttatggctcttatacacaagtacgtcattctggctacttaaactgactctgactcagagaccaacacacgagtatttttagcgtgctttgttctcactcgtacgcttcctgagaaaacttctccatcctgaaattacttatgtgggctaccagaaaacaatttaccttgttgatataatattataattattatcaattaattcatataagttatctttaactgtgtaatcacatacc

SEQ ID NO: 67055 - DNA, 979 bp, Cannabis sativa
tactagcctggctggaaaaattctgcaccgtacactgcttcttacccctgtaaatccatttgcatctcaaagtattttaaatgagataaaggatcttcttttcctgtgtacatcttccatactaacattttaaactttggggtaagtcaagagcattgattcaagtgagaatggtgatcctcttgcccggccgagttctaaatctgtgagttttgggccagccaggccttgtacaaggcttttaagttgatatatttttgcttgcacaagtggatgaacttggccatgttgttgactgacctgtgtcacattaatatctctttaaactggatcttaggcataattatttggctggacggctggtgaaatgttttgcccgtctagtcccctgcgattcaaattatttctgaggtcatgtgtggtacctaatcgatcgaacactaatgtaccaagaggtctttgggtctgactaacttgattgagatgttggtgtgatatctctgtctgagtacctcctcccaaggggtggttcggcaagatctgtccgtctaccatttggcccacagtttaaacctgtggcctttaattggacgattgaccgttataagtttgtgcagcatgatcagctacatactcttatgacctactcgagggaatgctagaatcagtcactggttattgattggtaacttggtaggcccttctgatcagcatggtggcctgcctagaataattgtcaatggctgcttgatgagctctcatgaattttctatgaattgatgtcattgctcatcaaaggcaatattgatagctgttcggagatcctgcttatcattgtgcaacgtgttattgtggccttgcataagtcctagcacagctcgtaggttttgaagctcagtatcatctctaactggcctttgagtgtttgtggtggatggaatttcagtgccgagagtgatttgtgttgggttttgtgccc

SEQ ID NO: 67056 - DNA, 598 bp, Cannabis sativa
ccattagggtctgtacgagccctcgctctatgggtttgggaagaacgtttgtgattccccgcaggtgaccttcttctccaggctgagtcccaagattttcctcattttcatgaggaatttctcgttcattagtttccggttgcctcccattctcattttcgtgagagggttctggctggtcattctgactttggggggtatctcattttccctaagttgttcttccctgacattttcctatctcctggttcgtgagctacgagacctgcctcgtggtcttctcactctaggttcaggttgattctgagcattagttccctgtgctgccttagccacagccgtgtcacgttctaacgcaacgttcgactgctgggcctcttccagacggcgtctaaggcggcgattttccgtttcataaatatcctcttccataggatgggtacctccacgatttggctcttcatccatcatcctagggttctggccattcccacgcgttgtccgcttactaggactaacatcaggttgggttctccgtgaacgtgtggtccgagcgctagggccaccctcaggttgagtcctcctggagtgggtggtc

SEQ ID NO: 67057 - DNA, 906 bp, Cannabis sativa
atatttcaattataaccggtttaagttattagtttttaatcctagaactggttatatttttagttatatctgagacatttacttctggtgacttttctagtgacttttccggcaacggtgacttttccagtaacagtgattttttcggcgaattttccggggacgacaactttttcggtgacttttccggtgccgacgacttttcgagcaaaacttattgttgttttacaaatatgagatttccactttttttttacaaaaatatggcataaaaaaactcatacaaatgtaaaaaaaaaaaaaaaaaaaaaaatccataactttatagtgttattatttatgccataaaaaagtaaactataccctcaattttcatatttataaaaattcccctaataaaaatttattacattatatgtgcaataaaattatttacaacaaattgtatatttttttaattatgagaaatatattctcatttttatattcaaattatataataataactttgtatacactaatttaattcaacaatatttattattaattgattaatcttatcataattataccatatatatatatttaatgatataagtattataattttattatattattaatggattaatcttgatcatcatattaagcctttattatattaatatttgactaatttattatattaagcctttataatattattgtgacaataaaaataaaatatttatttttatttttttattttaaataaaattacatatatattttgtatacattacggatttataatttactttatatatttttaatttattataaatcataataaaatgaataatttaataaaaaaatatttattatgtttatttttgtgaaaaaccataatcaatcgatacaattgaa

SEQ ID NO: 67058 - DNA, 1522 bp, Cannabis sativa
taataaaaatatatcttgagaactagggcttatcttggctaccacgaacatcaattacttggggctcctgctctttagatctaatcgcaaggatgctgatttcaattccatcctcgacaaccttgtttcgaagttacatggttggaaattgaaattattgtctaaagttggtcgtgccacgcttatcaaatctgtggggctgactctgccagtgtacactatacaaactaccaagctctccaagaaacttgcttcgagaattgacagtatgattaaaaacttttggtggggctgtgagcagggtaatcgtggcttgtacttgaaggcctgggaccacctttgtcttcccaaatctagagggggtcttggttttcgtaaatccatagaattgaatcaggctctcctggctaagtgtggatgggcccttcacactgtggagcaaacgctatgctggagggtgttgagagccaaatacctgaaaagtaagcctttttttggaagcaacctataaaaattcagactcttggttctggaaaaatgtggtcaagactaaacctatccttagaaagggcgactgtaattttttctcaaatggtgaagatacgaatgtttggaagactccttaattgggttgttcatggaaaagagttttacccgacacccatttcttcttgtcatgagagggtggttaaggtggcagatctactcatgagtaatggagactaggacatctccatgctcaagtccctgtttgactctgacacgattacaaacatcctgaaagggggaaggccttgcggccaagggagagataggtggatttggactaaggaaggaagcggtaagttcaccactaagtctgcttatttgttacaggcaatggagagagcccctgcttgtgtggtggcgccgaccttgtggaacaaactttggaactccaaaattctagaaagacacaaaatcctttggtggggtatcctctcgaatgctctaccagtccgcggcctcctggctaggagaatcccaattgatgacgagacgtgccctttgtgtggggaggttgcggaatcgatggaacacatgttcctttattacaactttgcttaccatctctggaggtcctccccatggggggtgttcccaatccatggttttggtggtcaggtttgggattgtgttaaatttctttagaacatgaggttgaatggagtggacccagacaagctgttcctttatgcttcaatcgtcgtggacacaatatggaaaccccgtaatgacaaggtacataattgtcgaccgagtaacattgtgactgccattgactttatctctcattgttacacagattatgcctcctgtttattccctccgacgttacctgtggcttctcctgtttggaccccggatgactggatcaaaatcaactatgatgccaaggttggtgtgttagactttttatttgggcttacattaaattttattggttttattaaaacttgggttgattggatagttctttgct

SEQ ID NO: 67059 - DNA, 770 bp, Cannabis sativa
tttctcttagtatttttacttcttaatttcctcaccttactcacaagccaccatagtttttgaagtcttctcagtatatctttctttagaaatttcttaaagttgaattaagaattaagagtgagttttgcatataataaagtgttattaatattcatagatcgtggatatgttatatacaaatatatttgggctaagatctaaaatgatcttaaatttacaaactaaattagcaaacagggccgaggccctaggcataggtgggctaggcccgtgcctagggcccacactttctgggggcccaaaataaaaaaaataaaaaaatttattaggcttttatttaagtaaaatttaagtgtattgtaagcaacaaatattcatagcttagtaggttgaagtggatgacataatttttaaggtcatgggttcaaatcccataatactcttcttttgatattttttttatatatttttgagggtcgtaaaatttaattcgttttaggcccatatattttcagggcgagtcctgttagtaaatgtctattttttttaaaaaataaaaaatagtcaaatataataaattagccaataaaaattagagctgagatgcaaaatgactctaaatttagagactaagtaaatgtctattttttaaaaacattaacaaatggtcaaatataataaattagctaacaaaaattataaaaatatattttactacatattattttgttaaaaaaatatatataataattgttattccgattttt

SEQ ID NO: 67060 - DNA, 1225 bp, Cannabis sativa
aacaattataaagttggaaccactttttggtttataattttttttttttttgagaaaaagatacatgttattataaattaagagtgtatgtcatttacaataacagagtaaaacggtggagataaatcctccaaccaagagcaagtctcatccacctctaaagcaaacttaattaaattatgtgcaaccttgttggctgaacgtttagcatagacaacattcacttgagggaaaaagaataaaagactagaaacatcaataattaaattattgtaggaagtatttgcataagatcccattcgtaaggcatttgctacaagtaaagcatcagtctccactattgcaattgacaattgcaattgtaacacccaattaagactataaaatatagccttagcctccatttcatgataagcaaaattgacgaatatgggtttagcaagtgtagcaagaacttggcttgtagagtcacgaacaacaaccccaattccaataatgttatgattggcatcaagagtggcatccacattcagcttcaaatcccttctagtaggcggtttccatgtaggattagcatctgctggttttggtgtatgagcactgttactggtagcttcatgatacttgttcttggctgctttgaaatttgttaaataattgacagcaaaagaagcaagtgtctgtgctggtttggttgtaaaaccaggaacaatgcgatttctttctgtccaaatggaccaaagtgtacaaatgatttattccatctcgtgatggttgtatatggttgagagatgtaccaagtagtcacccttgtacattgttgatgccttactccaatccaaattcaagttcatattttgccatacaacttttgcatatttgtagccgaatagtgcatgaccaatagattcccaagctgatttacaaaccgaacatgttgaatttgtgatgatctttcgcctaaccaaagaggtagcaaccggtagtgcagtgtggataactcgccaaacaaagatcttatctttttgtggcagttgtaaggaccaaaagaacttccaccaagaagcttgtgaattggaacttgaacagtcattggcatcagcttcagcaatagatgtggcaagatggtaccccatctgcactgcgtaggtacccgatatatggtagtgtcatattagagtatcagtactctaaaaaaacttagaggtaatgttaatattcgatc

SEQ ID NO: 67061 - DNA, 968 bp, Cannabis sativa
catgggcctatatataatcaagctcccaacaagtagttttagaatttaccgagtaaataaactatcttattaattcctcttgactccactatagattcgaaatttaactataacaagtatagatacactataaattatccattgtttcaatctaaataattagtgatcctctatggatgatttacatcgagtagggagaaatttaccgttttaccctttaatgtattttatctttgaaatacttaactatttgtaaatgatattccaataaactaatataattattgaaatgagtactccaccattcaaactcatttagccaagttctaaggaaaccttcgtttcacttctatgtaattatagaagctatagattctatatctataatcagccctcctactcaattgcactaccgtattcttaagatgtaagtgtttggccaatccaattggttagctttaacgagcaggtcaaaaaacacaagtaatacatttaagccaaaacctaaccatctcaaataatacacaagtaatatctcaagattgagatattatggtaagtttatgatatttgttccactgtgaatatcggttcaatctgatgtataaccaatacattcaatacaagtttactttgctaatgtcttggaaaagacattccacttttgcaagtgtaagtaaactacattgctgattatatattagtgtaaatccagtacactgataaattatgtaactaattagtttaatcacctaatcatgactatttttcactgtatacaatacaataatcatgaataataatgtgataggaatttaatagaatttatatttcaaatatatgatcatgaaataaacatgtgaaccaagcattacactaaacatgtatggttttagttagggcactaaaaccaacatagcctatcacattactggagaagttaaaaaaatcctaaacatcactgtcca

SEQ ID NO: 67062 - DNA, 1703 bp, Cannabis sativa
atatcctttaccggagagggctcaacatgtcgtacttaaggtgtgtatcggaccctgaagctagacggatcatgcaggaggtccatgaacttgaagggttctgtggagatcacatcggaggtccaagtctctaaaaaaaaatactaagacaaggatattttttgccaataatgaagaaagattgtgtagactacgtcctaaaatgtgattcgtgccaaatatttgcgaacatacctagagccccacccatcgaaattactctaatgactagcccctggccctttgcggtgtgggaaatagatctcattgcgtccatacccattggaaagggaggggtaaagtatgccataatatccgtagactatttcacaaaatggacggaggcctagcctatgaagaccataactgctaagaaagcattagactttgttatcaaaaacatagtgtgtcgatacggcctgcctcacaaaatagccttagacaatggaaagcagtttgactgcgaagaattcacaaacttctgcaaccaacacggagtcgttaaaagcttctctgcggttgcaaggccacaaacaaatggacaggcagaagccgtcaacaaaatactaaaagtcaccctaaaaaagaagctgctggcctacaagaacaactggcctgaagaattgccaagagtattatgggcctaccggaccaccccaagaactacaaccggacactcaccattctcaatggtatacgagtgtgaagctatggtcccagtggaaaccttgttcccatcccatagaagggcgacatatgatccggcaacgaacaaagccttattacaagaagcgttggatcaaatcgacgagctccaggatgagtctctagtacgaatggcagcttaccaaagaaaggtggctaaatacttcaacgccaatgtcaaagatagaaaattcaccattggcgaactagtcttaaaaagagtcttcccaaccactcaagaactcgaagtgggggtacttaggccaaattgggacggaccacacgaaattgaggataaaatcggctctgggacctataagctaaaaagaatggacggaaccacagtgcctagggcctggaatgctaaccacctccgaaagtactatcaatagttaagaacaatgtatgtattctgtaaaagaatctgtggcggacaagtgtatgcaacctcttatataattttttaagactaagtgacctaaaaatttcttttcatgtcacttaagggggtattaaggcatatcatacgggcaaatataaataggataagcataagaaaactgaaaaaataaatatattcaaagacataggttgttcaaaaaagtaaaagaatcctaaaaagaaaaggcctagggacgggccataaaaagtctctccttaaaagaaagcagaaattgtcttataaatgaggggaaggacaagataaaaaaaagaagtaacaatgagaaatatacaagcaaatcacttagtcagcccgaggcggaagacgagggcccctgcgctcttccaacactgcatccagcctcttctatttatcccggaagcagaacagaacctcttcaggttgggaataaaaaggaagacgaaggttgtagtcgttagttgtccaacacatgaaaaccccatcgccaaagcgcttctgacactgttgacaggtgactgggatggccttgggatgt

SEQ ID NO: 67063 - DNA, 1284 bp, Cannabis sativa
ttttagaagcggttatttttgctgaaaataaaataaaaaaaagacgctaaagagttatttatctattttagttgaaaattaacatttagtgtcggttatttcataataaccgacgtcatagaaactggcttagggttatataaatccttatactattaattattaggaaataactgatttcatatgtgcacgcgatggctgacgcttgtcacttatggcgtcgattattatcaaaagacaatttcaaaaataaaattataaaaaaataagaaattttaagaataaaagtttattttttatcaccttttttcttttaaattattttatctcagtattattataaacttttacgatatttacattactataaatatatttattgtaaaaaaaaaaaaatctgaaaaaatataattggatgaaaatattaaccaaataacgtttaattttcgaaaactacaaaaacatttttattctctccttgttttaaaagcaagactaaaacagtgtgcaatgcacttaatttcgctttcacgtgttttgtaattactattgattgatttccttatattgaaagataagtgttggccgttattttcgtgtttgtataaatcatactttgtacaatttttcaaacttgattatagagcattattgcctattcttcatgatgtgcctgggcttgatataggtaattggtgatactagacttatctcttaccgataatttgatagattatattgtagtcctcaaatgatgcatacatactatatgaggcatcgtaaaattaaagaattatgagtttaaatacttgagcacatctttttagagtaaggagtagaatgtttttccccataccacattaaatgcgtgtatagtaatttatcttggagtagtacgatatgctctgtacatccctctatctcttctcttagttgagttcactccaggagaagagacaaaactactatcctcttgatggatccttctagatgtgactaatcttctaaaactcccaccaagtattaaattccgaatgcaatttaatataacatgtcttgtagtgagggttccatgttatatgacttactcttaaagtgtcacatactttgagagaaattctaagcaagagtaaaattttatataaactataaaatatgatttatattattgttattaattaaaaagagaaacgtttcaacacaaactcccacttcatctcacatctaccattaggtatacaagctgtagatttaccattgtaaaggttaagagtaatgaatttt

SEQ ID NO: 67064 - DNA, 1504 bp, Cannabis sativa
attatgtaatcacagcaatccaataaatcatctgatttcaggtatttacagaatcctttccattttttttacttgaatgatctgtttttttcatctttttgctgcatattttagtgttatactttttatcaatatatgagatacctcagtgggtatattattatcacagatgtaattcttgtgttataacatgtatattagtatttccttttggctaacaactcacttaatcaataatttataatcaatattcttgtgccatttatgacttgattgtattgggtgcatttaaagatgtagggttatgatatttgcttaggtaaaatctatatctgcattgcctttaagtgtttttgcctctttgtgttatggaaatgaacaactgaaagtggtatcagaagaaaccacagccggagtctcggaccgaaagcatagagtttttttttttcttatttagaggaaaaaaaatactaaagaaaatgccaaggaatataggtttcttcttactcggtcaacgtagtttcattttcaacccaagaactcgattactacattcgctaccatcaaattccactgacccaattggagaaacatccattttgattctaaacatcaacaattttcgaaggcaaaagccgacaaatgaaatcgagaaagctcttgaacgatgcggttcgagttgacagaagatttagtttttaatgtactccatagacaccattcagattggcaaccagcttatgtattcttcaattgggtctctaaaagatcttatcttttaatggggtctgagccatacaacaagattcttgacattcttggtaaaatgagacgttttgaggaattacaccaagtgttcaatgaaatgtctgaaagaaaaggtcttgtgaatgaagtcacttatgggattttgcttaatagatatgctgcagcacatatggtggatgaagccattggtgtgttcaagaggaggaaagatttcgggttcgggttcgagcttgatttgttagcatttcaagcacttttgatgtggttgtgtaggtataaacatgttgaagtagcagagaatttgttttactcttttggtaaacaacatgagcttgtttattcagatattaagacatggaatattgttcttaatggatggtgtgtaagagggaatgttcatgaagctaagaggttttggagtgatttacttgcttctgggtgtcaccctgatcttttcacttgtgggattttcattaatgctttgaccaagaaagggaagctaggtacagcattgaagttgttcagagcaatgtggggttataagagatgtaatccagatgttacaatatgtaattctatcattaatgcactttgtttcaagaaaaggattcctgaggctttacaggttttcgaagaaatgaaggagcgaggttgtgaaccgaatgctgcaacatacaacactttgattaagtatctatgtaatattcggcgaatggagaaggtttatgagtttgtc

SEQ ID NO: 67065 - DNA, 810 bp, Cannabis sativa
atgtgaatatattacaatagactacgtggtcagactacgtaattctacgggacaatatgattctatgtgggtaataatcgataggtatacaaagtcaactcactttctgcctgctagaaaaaatttctatattgatcagtatgctgagttgtatgtttgagaaatagtttgtcttcatggtgctccaaagtctatagtgtctgatagagattcaaatttcacatcaaaattttgggacagtctacatcgagctatgggtacacaattaaagttcattacatcattgtattccattcttaaacagatggccagtctgaaaggactattcaaattttagaagacatattacaagcttgtatattggattttgaaggatcttggataaagtcccttcccttgattaagatttcttataataactattaccagtcaactatcgagatggctccttatgaactactttatggcaaaagtgtagatcacctattcactaggatgagttaggtgaaacaaagttcttggatcctgaagctgttcaaaaatgagcgaggcaattgataaaattagggctcgagtgcttattgctcaaagtagatagaagagttatgctgatccaaagtggtagaatgttgatttttaggttggagatatggtattccttcatacccatgaaagaagtaaaatgtttaggtaaaagaggaaaatgcagcttgaggttcattagaccttttaaaatcctagagaggatagggctgttgggttttgtgccttaaataaaacccattatagtataatcaaatttactaatta

SEQ ID NO: 67066 - DNA, 1087 bp, Cannabis sativa
ctacttgacaagattctatatctaaaaattaatatctagattaatctatgctcttataaatggctcaatgttcttacatggaaaatataatctaatgcaacttgtgttattaataatgattaaaatacaatcatcacaaaaaaaagaggtattttatcagcgtaattttgcgatggcaaaagtttactaaaagcatcgacaaacttttgccgatgagtaatttttccagcaaaagttgccaacgataattggtcggaaaaatcctttttgtcgacgaacaatgatatttcgcttgtgaaagtcacatgaatttgccagtaaaacactggttgccgacattgacttgacgactaagcctcaacaagaaagttttgttggcaagaaaagtcagcggcaaaaccctttcccgcatattatcttattcacaagaaagttttgtcggcatatgtaatttcgcatgtaaaacattttttttcataaattatttaaaataattttaccgacgctatataatgtgccagcaacataatttttttatattttcttttattaaatttatttaattaaatgaaatataaatgtaatgtgaatttaaatttaaattaaaaataaaaataaaatttcataaataataatacactaacataatctcgaccgcatattataattatactaaattcaagtaaacattatataaataattaaaaaatggttgtcatagtttatagaatatactaaaatttacacaaaaatactaaaataacactacaaatcaactacaacatcatcatcatcgtcgttttagatgcaaggggagacctatgatgaacatccagtgagaataggacgtattggtggactcggaggcatcttgtgcatgttgaaggcaagaacgatgttagacaaatacttgaactgctcttggaacgtatttaggtactgattttgagtctgtatcatttgttgatgataatattacgttcttcctgctcttccacccttcacttcaatgcctcatatttcttgacactaacgctaacactaacctgcccagagggacctgctctgggagtctccccattaacac

SEQ ID NO: 67067 - DNA, 631 bp, Cannabis sativa
aatttactcagtaaatttcaagatttgcttattacgagcttggttacataggcccacagtctctacattttctgtaataatatcatcttgtagactcaactaattgatttattaagtcaattagaattcaaaaataaactctcttatttaagaattttcaccatgtttgggtaattttgagaagaaaagaaaaacaagagtttgtttgttaattaaaactctttgcgagtctaattaataattacattcaaattatatttttttataattatttataattattacaataacattgctatttaaataattagataagaagagtgctaaaaattagaaaagacactttagtttcattagttgaaataaagtgacaaaaatctaactccaaagtctatcattaattcatcccttgcgatagagttcggctcaaatctttattttaagctcatctcatataaacctaactctaattgaatgcctatataaagaaagagaaaagaattagaaaacctattgtcagataacccttttctcttctcttcttttttatatttcgaaattcattagtaaaattctctctctaaattgttcaaaagtaatttgagtctcaacccacactatttaactttat

SEQ ID NO: 67068 - DNA, 1334 bp, Cannabis sativa
aaaagtatggtgaaaactgttcttgcaagtcttgtgtattacctatggaaggctaggaatgaagtactatggaatcaacaagtgaggctcattaatactatggtgaaaaaatctcagcaaatgagcaagctgagaattaaggggctgctgcccaagaaggccaaggaagaagataaaacatggattctgatggtgtgattttgtaaaaatgctaagttgtaagtataaatttgttagcgaaatgtaaagattagcgatgtaaaaggtttgtttggagcaataaaaattcttattcataaaaaaaaacaaaaataattaataaattacctgcaacctaatactaacttgattttatttatttttttataaataaaaaaaatatttaaaaatattagttgtaaaaaatatcttattaaatattttaattaaaaaattaatttattttaaatatataattaattataattattttgagtctacaaggaatttttacttgttagtaacctcttatagcaggtcacaaaaaatataactatcatatttacatttttaatataatcattgaatagtcccccaagaatatatatatatatataatagatactataattgttaacgtagatttttgttaaccaaaataaatagcctttttgcaataaatgtatatactacagaattatatgcgtatttattgaacaccagatatttttacgtggttttgtagttaagatctacatactccacgagtccttattattagggatatttttgaatgcagaatacaataataatttttgaataagtaatcttttgttaacgcagattttcattaacaaaaaataaatagccttttagtaataaattatctacaaaaattaataagtaagtattgatagaataactccagatattttaacgtggttttgtagttaaaatctacatactccataagtccttattattagggatatttttaagtacaaaatacaatatctgattttgaatgctctcaaattttgccatccgttttctcatggaatctgccccaatttataggattataaattgattgttatcctttttggggattgatttaaatataaatattcatgaaatgtggacaatccccacatttcatttaaatcacacgtgggataatatttaataactatccaaccgctctttagctttatcctttagatggttattgctgacatggacggttatttcttctctgattcgagttatcttctttgtccatcttgaaaagaaaaaatactaagtgttgggaagtagtctgtctcgttatatttgctaggttttatgccctaaat

SEQ ID NO: 67069 - DNA, 701 bp, Cannabis sativa
atatatatatatataaggttataaacaaacctagataatatttaatttaattcaaattcaaatataaatatcatataactaattaataaaaattagttatatcattttattttaatattatcttttaattaaatagattatccaacaatatatttaatgcaataattaaaatataattaattaatttaatttgacttattttaataataaaataatcaaataaaattaccatgggcctttatatgtaacccgacacatgtaagataggccctacacgtgtgggccatattttaaggtccaaatttaatttctcaaatattttaccacaaataatatttattatttattttggcaacaaataataattgtttaattctcattaatcttttatttcactatggacacgaggaacgtctaaagaacgtaagaacagacataataattaggcctttgtcgttgattcctatggataggtaccttcagctaattggcttgatggtcctgtggcacttgctggttattggcatcaatatctattccttgagtattttgtaggacatagctgcatagtaggtaactgagtttaatgattcataaaatgttaatttttcattcaaaaaaaaaaaataatgaaagtattttgttaaagatacagaataaaaattgttaaataaagaatatgacaatatgttagacagttt

SEQ ID NO: 67070 - DNA, 911 bp, Cannabis sativa
atgttttaaagataaatttattaaggtaatatatatgagttactattcaatagttatatttttttaatgtaattatgatagactaataagtaaatctttttataaaattaaattaattataattaaaaaaattaattaattaatatatttaatagactttttaaataatttatatttataaatgattttatttgatgtttaagtgcctattataattttgttaatatttaaaccatttgattataatatttgtaataatatgttttaaagaaaatagatttatactccttctataataaatttgttaagcagtaaataactatttggtatattgtattttttcaaaatacaaacttagtaccttatgttcttaataatgatcacttggtaccctttatttacaaatcctacacatttagtaccatctctttgaatttagtagaccaacatttctaactagattactcctcatttaaatattttatatgattttaaatatttttaaaatattatatgatttaataaatgaaaaaataaaattgtggtatagtttctccaaatggaaagatcttcaaaagttctggttatgaaaagttagatgacatccagatgggagttctcagaaatctaacttgttcatccagaagaagtctcgtggaataatagatattttcggaagggcgttctcggatgtctatcatgtccacctggatgaagtcttcaggaaagctagcctccctccagaaaggagttccaaatggccaattgttccctcttggaagggagtccaggatagtcgactccaattgttgcctttcttatccaggaagtcccatcagcttacgttttggtctgtcttccaagaagcgtacgtctcatccggaagcacttcacttatgctgatgtgagat

SEQ ID NO: 67071 - DNA, 1325 bp, Cannabis sativa
aagtttgtttgtgattcacaggtgaaagaaagattggtatgtttgaataataacattgaaaaggaagattttgattcagataattctaaaatctgtgagagtatctagctgaattgttaacgcagattttcgttaaccaaatttgagcctcaaagtagtgatttcacacagaaaaaataaaagctgtagaaataaaaatatgaacacagggttttttatgtggttttgcagttaaaattctgcatagtctatgagtcaatctatttatatttctgattgttttgcagggcctctcctgcatgagttttttttgtccatttttggatcttgtttgccactatttataataatacagtgtacagtaaattacaaagttgattgtaatctttacagcaattattccctcaaatcatgggatttgattacaaatcacgctaagtaaatgttgtttatatttagaatttacacagttttgaatatcccgcttttattgggtagaaatgaactcatgttaaagacatacggtaagcctcatctcatggggatgcctcgctaggaatggagccaagttagctttgatggcgagctgggggctcgtcatataacttctcaaggttgataattctttaattctgataactacagtttctggtgtcaagatgatctttctcgcaagcatgccatcttacagcgagatagacgcctcgctatctatcaccttgatcgacccctctatttatacttagtttgtataccatgtcatatacgctaagtatttttattgttattatatttcctccatgcgacgaggttaatgcttcgtcatgcacacttgtatttacatggtttttcgccgagacacaaatcaacaactagtacatttttatctcgcataagactgtccagtcagccgagttataaacatactctgctaattatgttcctaacgagttattccacgttaagtgtacttacgattgtgtgtctaagttcctcattcttcctagctagacacgtgttttcttctgatgtgctcgccgaatttcaggtataataattgccccttaaaaagttcttttttaataataagagctttttaatgattacatagggtacttccatcatgatcctctttttgaaaagatgcatgtcctctgattttggtggttgtgcggtttcgaggtacatcaaaaataaatgatcatcttttctacttccactttaaattatgtatgctcgatcaaacctttctctgatctgatgaagccaatatcataggtataaagtaagaaaaaggaaccacttgttgggctttgtgccctaaa

SEQ ID NO: 67072 - DNA, 869 bp, Cannabis sativa
gttcttctctagctgtacaattcttacaaggccttggccttatgcatgtgaaccaatttttattcatattcggcctgaaggctttcatgttcttgcttttggcccataggaactttgttttcgaacactactattatttagccttaaatccttttactatggacgtatgatcatcctggctatcttcttaagtatccggatttaatgttctttatgccaagctgaagtatgcctgcacttgacttagaggcaggtttagtagcttattctaagcgttaaattatatttctctacataagtttttcgtgctagttcgatgcattgtacgacataggtgcccccaagtgagcatgcacacttacagtctcttggtcacttgcaattcaccaagtttcatagaccttccttgggatatttcttggggtgctaccaggtgtatgcatgtggaactgcaaagaataacattaagaagttatctttgttagcaagtggtttagacatagttggtcttacatgtaacaaaagcttataacttagttttcgcttttgaaatcacgttatggctacccctacgcagcttaccgcacaatggccatcactgaagagtaatgggaagccatgcttaaatgcaatgggtactgactcttttatatttgcctacctctgcagggcttagcgtgcaaaggccatcactaaagagtgatgggatgccatcattgaagagcgacgagtactagctcttttttggatgcctgcattgcaaaatgttagaggaactaatatacaagttggctaatgaaaacacttaccaagatgttctctattctaatattttggtagaagagccaactccaagttcttgttgtact

SEQ ID NO: 67073 - DNA, 507 bp, Cannabis sativa
gcacaacacctcaaatgaaaaaaaatcaccattacatggaagtaagcatttcaaattcatctgagattgcaatgcatcaacagagacatcatttgaagattcattgtctaaagtaactaaaaaaattttcccctcaattcccctttcactcaataaggaaaaaatttactcaaacaatgcaataccagtatgtggtggcatagagcaaaaatttaaaattcttttttgcaatttccaatccttatctataaaatgggctatgagagacatatattcatcagtggtcaaagaactccacaaatcagaagttaaacttattctaccaggagtttcacctaacatgcttgtaattttagccttttccctttggtacatcttaagagtgtcacttttcacagtatttctagtaatcaaatccacatcaggatataagtatttcagcatagccctaacccctttatactgaacaaattgaaatggtaaatcatgcataacaacacaagaaac

SEQ ID NO: 67074 - DNA, 649 bp, Cannabis sativa
atatggattgatttgtgaaggggcttaatgagattattatagtcaaacagctagcttttaaatataatgaaatataatattttagattgaaaattaaagaaagggacattgggagtactacttaggtcaaaataagacaagtataagaaatttcgtaccatataaattgtgagaacaaaggatgaaaagccccacaaatagtgacatatatctagctcttcataacacaagtgatatgattcatttcatattgaatccaaatgaattatgcgctctttttttgttcacaagtaatgaacaaactaattcatctgttttaattgatatgcatgtaccagaacaaattaatttgatcatgcaaatggaaaataagaccaaatggagtatagtgattttcttttgacaaaaaacaaaaatccaaataaaataaaataaaaaagcttgtgcttagttacctcaatgtgatcatgaaagtgaagtgaagtgtaccagaggcgaagataaaaataaaatttaagtgggttgatatttattttaatagtgaaatgttaagagcatctatggtgtttatcatcttttataaagcgtcataaactattaatgtaatttaatattgaagcacacctactttaaataataatttatgaag

SEQ ID NO: 67075 - DNA, 943 bp, Cannabis sativa
gataatatattgagttatataagaaatataaacatatactatgaatgaatatgttaattacttgttacaattaataaatataaaaaaattcactgtttatattttggcttcttgtacatgagaattaagatcataacatatgtgaataaaataagttagtaatgtattgtaataagatttttttttaatgtagtattactattatggtttactaagcaccacttagtggtgcatgtaatttttgttcggatcactaatgtggatagaaatattagtaaagtgtataatattgtaaatcctaactttattaacttttttttttcgtttattaggttttttgattcatttgaagtttaatatatacgaataagcttacaacttttattttgaaaacttaataacatgaatagatagacatatgctatatacaataaatgaactccaagctttctgtaaaaagatcaaatattaattcacttaagagttaattctaggagttaatttagttattgagctcaagtatataattagattataaattcactattcattattaattaattattatgaattaattgtactaaaagaattaaaagataattagaaaggtaaaatagtaattttgactaattttacttgtgaactaataaattagaggagaaactatttatattgattaaattaatggattattaggtagaattcattaaatataatattattctatatttttatatgaaaatttcatatttatagtaaaataataatagaattaataaataagattattttattaataagattaatagtaatcttattttttaaaggttagaattattagaccgtagtcctaaggtcacccatacactgtttgcagtgacggacacactcacaatagtgtgggcgatatagcccccaataaattaattactttaaaaaaaaa

SEQ ID NO: 67076 - DNA, 715 bp, Cannabis sativa
ccctctttcaatggttatagatataacatccattttgttgatgtgtttactctagattcacttggttatatttgctgaaaaacaaatttgatgccttcaaggcattccaaaactttaaatccgaagctgaacttcaaattggaaaaccccttaaagtcttgcaaactgattgggggtgaatttagatcattttcaaattatcttgctgagaatggcatacatcataggcatcattgtcctactacacatcaataaaatggtcttgctgaacgcaaacatagacacaatgttgaaaatggtcttgctttgcttgctcaagcatccttacccctcaagttttgggatgaagcttttagaaccactgtgtatatatataataggttgcccacacctgtatcaggaaacaaatctccacttgaaacattgttcaacatctaacctgattacaaatcctttaaaacatttggttgtaaatgctttcctaatataaggccactgtgtatatgctttcctctccatgcactttccttggttatagtctaaatcatataaatgccttgataaaaatggaagactatacatctctagaggtgttgtttttcaggagtttgtttttccttatgaagagtctgctgtcaaaaatagcagtaccatgtctcaatcacacacaaattcagtagtgtctgctaatatacctgtctgttctcatcccaaa

SEQ ID NO: 67077 - DNA, 1273 bp, Cannabis sativa
gccgggttaggcccgactctttttttttaattagttttttatatatagctcctgtaaatgtgtaaaccctctaactatatataacataaaaagaggctgctgctgatacctcatttttgagaataaaaagagacttaaaagtaattatatcaaacaactaaaaggggtcattttcttggctttctatggtttcacaaatcaccagtctgttctgttgcaatagcatgtcccatagctatatgattatataaaataagaagaaaaaaagagaacataaaataaataaataaataagtaaaagaaaaaactaagcaaacaacttgatctttaaaaaccccaccaacaaaggagtatgactttaaatgaatgataccttacactgttacacagagggccaatcgcctcttgtacaaaaaacattacgaagtgaagaaaataatattaatataggctatatagccaataataagcaaaagaatgataaaatcctacaagaaaattttgtgcatgttctgtgtcttttcttattttcaatttatttaatatgacacgatctcaactcactcattagtattttgcgtacaataaagtgaagtgatagtaaacaggccccaactcacttattttcagtttatcatctgggaatttttttaggaattttgtttttttttttaaaaatttgaaactgggccgggctgggcccgtcccaaaataatatgtaccgggccgggccagaagcctgataagatcccgaataattcgggccacagtcggcccgtcgggccgggggcccgacccggcacgagaaaatggcccaaattaacattcctaagtttcagtcttctaatatcatattaggaatgaaaagtctaatttctttattatatggagctttgtatttatagaccgaaaggtcacatataaaattagttgggaagctaaaatctaattaatttgactaacttattcccatttggcagctgagaacggagactatggaacacgttattcttgaatgtagccctgctaaagaagcttggaaacagtctatgtttttcagttattataacacacataaggatagtgatattagtatgtttattgttggtgcttttgacctgtatgacaagcatagtttggctctactgttttgttttatttgggctatatagaatcagcataataatctttttcataacaaaagggggttttctcccacacaattttttgactatgctgtcaattatctgtatgattatgttaatgcacattg

SEQ ID NO: 67078 - DNA, 915 bp, Cannabis sativa
  modified_base (30)..(32): a, c, t, g, unknown or other
taattatttttaaaattaaattttttaatnnntttttaaatttttaaatatttaaaattattttttaataattaatattatgtaaactattaaaaatttgccacatatatacttgtgtatactgtgttatgttcaccgtgacatttaacatatatagtcttttgaacgaaagagataaataactaacagaagaaaattttaatagttttactactaaaaatcgattcaagtgattaattttttaaaaatataaaatataataattttacctctcaaatttttaaattaaactaatactgcacacattaagaggaatgcatttttatttatttttcaataattaataagagaaaaggaagtaaattaaacattataataatgaaaaacgttgtaaataatttggtatatataataatactaatggtgattattaggaccttgttcaatgaatccaatcaatgtagccaggagcagacttataatcgatcaagaaactggaaaaaatggaagtaaaacatcttttatttaattaattttgttatttatatattattaatttgaccaatttgtaaatgggccacttcattcattaatatatagacttaagaaagtacattgttcccaatcaagacatgacagtgtccttagattttagtggaacaacattatctctatctctatctctagtggttattaggataagagaaatgctaaaaggtatttttggtaccaaataccttcttacttgtcaatatcgttacgggtgtaatttagtatcaagtcacatatagtttaatataataacttttagggagaatcgctagctaatcgtaaggcgacacgtcttaagggtgttaggcaccactagtgcctaataacaatgctcgtagaataaggcatctaaactacaaaatt

SEQ ID NO: 67079 - DNA, 1188 bp, Cannabis sativa
aagtcctgtcccaatccagacaatactgaagatatttacgaaaaatgtcattgccgtacaaattaagcatcaacatgccaccagcatgcacaacaaaatgcgccacaacttgaccaccagttggccaacttgtgggcatcacctagcttgtaacgtgccctcttggcacgcacgttacacctagcaccctccttgtatcaatatcgctattagtctaactaagtatctagtcacatatagtttaatgtaataacttttagggagtatagctaaccaatcacaaggcagcacgtctagaaggtactaagcactactattacaaaataacaatgctccaaaataaatattgttttcccactatctttatcactgtaaaaattaaacttcaaactaatagttttaaaaatattgtaaatattggctaggccttttggtacgtcacgaaatcggtacgagctcaaaaggcacgagcacacctcaatacaaaaaatatatatatacttaggcacaacacgacatgacacgaaaaaagtataggcttaagcacaacacgacacgataaatatgggcttaaacatgacacggcacgacacgtaaacacaaatagattagatcgaaagtacgacataataaaaagtccaacaatttatcaataataataatgataatatttacttatcgattaaaatgatagtaatattcaaattctaataactttaattattttttatataactgtgtataactattgttgaaaaaaggcataaaagtaattaaaacagtatttaacttatcaattgtaataaaaaaaaatacaaaaatatagagcacgaattttagcccatataagaaaataggttgatctattaagaaaatgagtcaacctgaataaaacatgacatgaatccaaccacgacacgaaattactaaacttgtgggttatgttgggcctaccctatataattgttgaacggcacaacacgacccattttttatggttcagcatggcacgactcgtattttaagaagctcaaaaaatatgacctaggttagcacgtatttacagctaagattttaataaatataatatacttttactataattatttatttattttttttttttgaaaaatgaaatatcaacttcattaaaatgagcattccaattacaaaatagcttgaagatca

SEQ ID NO: 67080 - DNA, 900 bp, Cannabis sativa
ccaaaccagaccaaaaaatttctcaaaccaaaccaaaccaaacccttaagaacggtttggtttggttcgaaactacagtttatgtagaattgataatgattcatattttttttagtaattgtactatttttactaagtttttaattttatttttcaaaatacatatttaaagtatacacggtgtatacatatacaccatattcaaagtctttatatattcagggttggtgtggtcatttatattttgggttttttttgtttcttttttctttttctgctttgcatcagttttatactgatgcaagagtttgcatactttaaaaattgatggaaatgagtgtgtttgtaaaaaaaagtgacgcaaaatcctggcggttaaaattgacacaaaattttaagtgtataattgcgacacctttgaaagttaactgatgcaaaaagaccattttagagtaacgagatacggcctcagtttctgaaaggacctgcaattatttttatttatttatctttttttcattatagttgtatacaagtagcatagaatacttattcatataaatcatacattcaagtaaatgaatgtatctcttttttaaacacaatctagtgaaactaaatcacaaaactgaatatactttttagttcctacctatcatagtggagactctccctaatcagcttgtcaaaattattataagaatcacctttaatatcagtagtttcaaacgctttcttcttccaatataaacttttttccttcattttctttcctttctctccttccatcatctccttcacaagcattgagacttcttctcttttgacatcagggctaatttccacccctacacccaatgtgttacaagcaaaatagcagttggtttgttgatcagcaaa

SEQ ID NO: 67081 - DNA, 1047 bp, Cannabis sativa
  modified_base (86)..(89): a, c, t, g, unknown or other
gggagatggatttctggggtggctatgccaaataggcacgcgcacacacacacacacacacacacgcacgcacgcacgcacgcacnnnngcacgcacgcacgcacgcacgcacttggagtaatcaatggatcaaaattgaaatgaaacttgttcttgaattttccacaatcattgaaaaatctttatatttttctgtaagctatgttcactaatcaatatttaagggaaatttggagatcaccaactttagtatcatattgccccttgttcttgttttattttgtttatttttcttttttcttgaggacaagcaaagttttaagtttgtagtgtgataactctatgaaaatagagttatttatatctttttgggcattaaattagttttgttctcaagtatttttagtttattttagtgacttttaattagttttgtttacttttaaataaatattaattttagtatttttaaattacttttagttaaattttacaatattttatcaatttaatttagtttcctattttataagtgttaattatgtatttttgtaaaaaaaattaaatgtatattttgaacttattgtcaaaattgagagaaataatattacagtccagggatttacaaaagcccatttgatttattaagaattattatcatggctttaattgagctattgtaaaaaagaaaggagaattgggctcactaaaagaaataaaagaacaaagaatgaatgagaacaaatgggccacgtaactttgcaaacaagggctaggcatatatcatatatgcacatatgtgatgaaaaaaaaaaaaaagaagtggcatagaaaacaaaagaaaatggtggctgggtttaggtgctgctccagggacgctacagagaagaaaatgaagtaaaacaagaagaaaaaggaaaaaaaaaaaaggagtttatttcagtattatttaaggttttagtttagcatttttaatttgagattggcacaaatcaagaggaagaagaagagaaatttggagaagaaacttagtgcatgtttgacat

SEQ ID NO: 67082 - DNA, 686 bp, Cannabis sativa
tatcttacatctatttaaaatttcatgattatagttatcttattttaaatttaaataaggtcaataattctatattgtcaaagagtgtaattttctctgatttttagcccttgcagtcgaatgactggtgccatggctaaaacaaggtccaaaaattatggaaaactgaaatctgctacttaaaaaatcaaagcgaggtatttcgaaagttgtttctgacgatgagcggactgagttcctggagcgaattgatgaaattgagcctcttgaggtctcggatgaggagatatatcaggaagaagggcgattctgtgagggtatcgattcaggtatgatatcccccaaatccatagctgaggtgcgcactgtttttgctcaattcctcacggctaatgtgcaatgtaacagtaacctaagacaaggtatgagttctatcccccctattttgcgatctaatactgtgataagaaatctggaaaattcctttaaagaaacagagcagggcagtgggaaagttaagattacgcttgatgatactgaagaggaggttctgttttggaagccctcaatggtatgctacgtgcttggtgttaatcctccactacatgttcttgagggttttgcaaaaagagtgtggcaggataaggttgatagagtgaaacttttgtcctatggtatcttcatca

SEQ ID NO: 67083 - DNA, 1107 bp, Cannabis sativa
aagacccgatgggtccgatggggctgggctgggtccgatggggctgggtccgatggttacaaaaggtggtctgatggtatttgtggggtccgatgcgattttttggggtccgatgggttacaaaaggcagggggtccgatgggttacaaatggcaggggttcgatagtgtttgagaaatggggtccgatggaattttgtggggttcgatgggttacaaaaggcaggcccgatagtgtctcgggtatggggtacgatgggtgctggtggtcggtaccggtgctggtaggggtcgataccggtgctggtggttgtgcggtgctatcggtggttgtgggtcggtggtcgtcggaggtgaaggctgtggcgtcgtgggatgtactgtaggctgtggcgtcgttcagcgagagggagagagagaagttttgagttttttattttagtttttgaaatgggaggggtatttgtgggatattagtaatgtggtcatatatgaccaattttttaataactatgcatttaggaaattttttttagggtattgtaagcatggaatttcaaatttcccaatacaaaatcaacattctattatggtcctaattgcataacatcataccatgcatatagttattcagatatgttaatattgacattgtgtaagcaacacttaattatggaagtccatatcaagtattttaataatatagtttaaaataatatttatctttttaaaaaataaaggatccgacttctacaaaacacacgatagtccgatcatatatttatttaaataaatatataaatatgagattttttttaaagaaaaatatatcaggtggtgtaaatatttgagtgtatatccaattcaggtgcccatattatctaacgaaattttgtttttggttttcatcacattttttttttgagagaaattcatcacatatttatgattgggcgtcaagtatttatatatggagatatataaaaacatcgattggctgaaaataattcaaagaaatgtttaatgaatctatccacatcctagctaccatactctttttttttttttttttgatagaaagttaccatcctctttttttttttttttt

SEQ ID NO: 67084 - DNA, 971 bp, Cannabis sativa
  modified_base (158)..(173): a, c, t, g, unknown or other
agagagagaagagacgagagagaggtcgccggagttggtcgacgtcacacaagggggtcgggggtagtagttggggttggtcgacgtcgcacaaggggcacaagaggatcggagagggctgggaattttgtaggaaaagaagaagaaagaagaagaannnnnnnnnnnnnnnnaagaaaaagaaaaagaaaaagaaggtaaaaaaaatatttttatttttttttctgattatttaatttttttttatatttataattattttttaaaattaatattacgtgaaccactaaaaatttccacgagtacaagtgtgtacacatggacacagtccaccgtggcacttaattgtaatttttggacggaggtgtggagagcataacagaaccaaggtttatgtagtttagtcgtcaaaatttcggtttttgtggttaagtgttacaaaccgtaaagttcaggtagtttagccgcctatatccctattttttttttaccttaaaaagtactttttatatttttaaataataattttatataaaatatatgaaaatttaagctgttaataaaattattaaaatcttatgaactaatcaatgttcaccactaattaatatattttttatattataattgatataacaacaaacaaaagagtcatatggtttaagaactgtttatattgtatccgtaagctgtaaataatatttttaatttatcactttaatttgtcttaattattatttattcgagtgattgattaatatcttaattaataatttttttaaatcaaaataaaaaatcaattcatatatatgtaacaaaagaaacataagagagtctacgtggaattgtaatatttttttttcattctaactatttttattttttttatcaagaaggaacaaacttcattaatcacaagcaattacaaatctatacaagccaaaactaaaggttgcacaaaagaattacat

SEQ ID NO: 67085 - DNA, 892 bp, Cannabis sativa
  modified_base (750)..(762): a, c, t, g, unknown or other
aggccttttgaaagatatttaatatttctatcatgttaatagcactatcgtcagaggctttacagaacacataacattatatattttacaaaataccaaaaattttaattatgattaatacaacaaaaaataataaaaaaataaatataaaatgtttgaaaaaaagtaataaataataatttttttttgcttaaaacaataatagaattgaaaatggattttaaaaattaggatggaagcgacaaataataaattattagccccttaaaaaattaggttcattaaaaaaaaactaaaagacattaaaaagatatgttgggccctttattttttgggaggcctgtgcagtagctcaacttgcacaccataagggctggccctgagtaattagtattgtattgtattaaattatattatattgtattagtattaagggtgttcgcggtgcgggtggtgcgacttttgactattttttcaaatcaacccgcacatgcagttttttcaatttcccaaaccgcacatgcactgcgaaactaaaaaaccgcataaactgcacaacaaaaaatggtgcggtgcggtgcgatttttacggtttgaactatcaccaataattaaactatcacaaatacaacaaagcttgagcaacactaatcaaaaataccctaaagcctgaaaataaatatgaaaaaaataagtttcaataatacaataatttgtggactttaggttggacattcacatattggaccnnnnnnnnnnnnnaaattagtatttttataatgtgcagtgcggtgcggtttgaacggcatattaataattcaaaatcgcaaaccgcaccgcgcagtttaggaaatttttaaactgcgaccacaccgcaaagaatttcaaactg

SEQ ID NO: 67086 - DNA, 3038 bp, Cannabis sativa
cttccacacaagattgatcggccctccccaattttccaacgcaaaccagatttcagaagctcacggccccaaagaataccttgccaagtcaaggaaggagaatggccatggtgagcatccaaaaaagaattgtgagggtgataccggcttttgaaaagttggctcagtagagagttaggattttgaaggattcgccacgcttgcttcgctaatagagcttgattaaaatgaatgaaagagcgaaaccccaaaccaccattggacttggtcttacacatataattccagttacgccaatgaattttagagccattttcattagaaccccaccaaaagttggacatcatagattcaagctgattacagaaagtaactggtaaccgaaagcaactcattgcatatgtagggatagattgaacgacagctttcagaagaacttctttacccccagctgaaaagagttgttctctccacttttgcataagacgccaaatcttttccttaaccccactgaatagctcttttttgtttctccccgagaaggctgggagaccaagataggtctcatggcattcacaaatggccatatttagttgcctgcgaaaaaataattgcatacccaaagtggtgttcggtgagaaagacatcactgacttatccggattgagcaattgtcccgaagctcgatggtaagtgtcaaggactcgtttgatagccaaacatgaattttcattcgcttgacaaaataggagactatcgtcggcgaaaaataaatgggaaattggtggagcccgacgtgtgatagcaaaaccattgagattacccaactgttcttcatactgcaagagacgtgagaagccttctgaaactaacaaaaacagatagggagaaagtgggcagcagataatttcacactttgattattaatatttgatactatttcctttttaaattctcatgattataactaattaatttacaaagcctactaaatttaattaatgtacttggttttgatgagaaatattaaactgaatagttctatacttaccataatttattttgtacttgagttaaataactccccaaaaaacaactataactaaatattaaataagatttctaaacatatatttaattagctttagttaacaaacaattgtatgttagaaagatagctataatgttacgtcaagtgagttaaatcattttttttttattttagctcaaacactattcatgctttacatgtagagataattttttaaattttgaatttcttcaaatattttttattgattttatttttcttatttttatttcaacattaattatttgtttattactttctctttcttatttttttattaatttaattaataaaaaaatatttaagatataatattataatattgtaaagaaaattataaaaaaaatagtgtatagtgtaatgtaaatatgcgaattaaaataaaaaaaaaattgaattttaataaaatattttgaagaataaaataaaaaggctaatatgattacttttaagttttgataaatttagaaaactcatagattttatgctctagtaacttggactaaatcaaatacaattccttttgatatttacaatatgccaaatgccaataaatcaacagtgtacaaaagcaaagttatgctagtaagaaaaatcatacaatgcaactttcgagtctcaatctagagaaatttcaaaaaggaaatatcaatatatgccaaaaccaaatcaacacaacaaaagaatttcaccatgcattatccatgattggaattctaataccatcataatgcgcaattagctcctcctatacctatgaaataataattgttacataaataatgtttatgaaatagaagccaatgtatagaatttgggcaaatcaactcactcaacaaatctaaaccacctcttcaagattattgcaacaaaaataaacctaacttatgatatatgaaaattgacaaaatgatcaacacaatggaacaaagagaaactaaaatctacaacaatcgaaccaagccaaccaaaccaacaatctatttgtgtccctataatcaagcacactagaagatcattcctctcctacaagccccgagccttaccaagagcaggaaattaacccacacccggaaccacatcaatccttgcataatacagattttgtttgatggtaacatcacttctcttctcaattagggcactcgtgtttagcattgttgacacaagctagcctagtagacaaaggataaggaaaaaaattaggaaaaagaactctgaagttggttgggcaaaaggaggggtgttcattatactaaattcaatgtttgtatacgtaggtctatccaaatgtatgttgaattttaccaaccgatccgattcaattaatttcaatcatctgaaccaatccaatccaatagaatgtatgaattcagatcaattttatccattgaatgtatttcatgtatatctattggattggctcagatttattaaatttttttatattcaatattttttggttgagatcggatccatctaggtccagtatttattcaattgaatcaaattggatctgttatccgtatttttagaagggagacacgtggcattctcaatttaaaattagttatctaaggcctagtcaaaatccctaacaagataacaggcccagtccgaggcccaagatatttacattcaagaccggatctctccgattctggaagggcttcccactcgaataagaaagagcagcagagaccctccggatgagcatctaggatacatccggaagggaattccaagaggcacccaaaaacctagtccaagatgatgtggcggctctctaataccgaatcagaggattttcctttgtgtcaaaccctaagagtgcactcaccaccaaaattttgtctgatgaccactattctaacactacagtacacaaagatggcgcatgcatgactttcctaatggatcaaatgttagttccctttaagtgttaatt

SEQ ID NO: 67087 - DNA, 913 bp, Cannabis sativa
aggtatttttttcttctttttctaaccttctttctatgtgtcttatagcgcagtcactatcgtctttagcaccgccgatgcctcaacctcgaagaacttaccgttgccaccctagaatcgtttttttttcttcttctctctctattattttttatgatctcaccattatttatattcttgtttgcatgtggttttcttatttttttttaaagaaaaataattttttgtgctaatatcattaaggattgttaacttattctggagtgtttgtgtcaaaccgggctctatttctctgtagtaatcattcaacatcagactgaaaattaagtgaaaataaataaaaatatataaataaataaaaaaatacttatggcaacagttatttggctaataatcaaagccataagggtcgaaaaactacatatatgaccccttatgggagcactgccgccatagggttccttttggttgcggtgctttttgacccctttagcgatcccagcaacgctaacaattgcaaatttcttcaacgtctttaaagagttgaaaaaatctcttctaaaggccctttttgtagtagtgtctattgaccgtctgtttaccgacgcaaataagcactaaatttcgattattaatcgacgcaaacattcacctcttttgcgtccgccgaatatacgttagctataggaactgaagctaaaagtttatatgtcggttctaaactgatgtaaaaatgattttttttgtagtgttagagtataaagatttaaatttatttattgaaaatagaattggaattgcaaaaaagaaaaaaaaaaaaaaaaaaaaaagccctatgatttggttttaatgagtataattaattagtttgttttgagaaaaaaaggccaaaatgacaactaaaaaaaaggac

SEQ ID NO: 67088 - DNA, 2195 bp, Cannabis sativa
cccaaataaaaaagtatggaaacagaagtcttccattgtgaacgaggttcttgtatcaacaactacaacttttgatctttaaagaagctcgagataaatctttcttatcatctttgtttcttggaaacatagatgatcaaactgagttttggactaaaccggccatggataatatcaagatcaatgtcaatgccgccttgttcgagaagaaaaactcttatggctttggggttgtggctcgtgacactctcggtagacctatacacattaaggatgagtactatggaagtctttacctagttgaagttgttgaagccacgagtatcaaataaactctaagttggattaaaaacaaacaatggaaaggtgtagagatggagactgatagtatgctcgttgttcaagctattcattgtagtcaacaaatatcttatatctttggtttgattattaatgagtttcccactatgtcgctaggcatgctcggtatttatctcgtcgtagtatttttgggcataatatgttagtgaagtccaattaataggcccaatacaacttaacttagaggcagctcatgaacaaaggaaaagcttggcccagcaggaggagaacttagcagctgctgaagggctacttgcagaaaagtgcaagtcaaaaactggagaagaagcttcactcaaaaaaacaagggaaggagcggctcgaaatcggcgtggacgtacgaaacccggctagctgaaggagtatgtgttgaagcttggtcactaagagagagtgagatacttgtaactaatttctattagagtgaatcaaaattaggagaatatataaagaaataattataattactgggaattatcataaatgaaattggcatttgaattgctttgggagattggccttgtctcgaagaaggctcttagctaacataatattatctcatgaactttagactctttagtattgagaatgctaatttaataaagttgctatttcatttaatatatatatattatttaataccgttttaaagaaatatatattgtttgatacaaaaataatttactttcaatatgatgagtgccttaaataaataaatacttaatggagttgtgtctcctataaaaaaaaattaatggagatgtcacaattttcacatggacctgtccacacctaagttctatttagctcatctcacgcgtgcaacgaataaatgtagacgaacaacacaaactattaaaataatacagataaatatatttttttagaaaaaaaaaaatgtactccatcaataataataaaaaaaatcaattattattatttgacaactttcatatgtaccaaaatcgtctgtctgaatttaagaatttttgtttagttttagtaaaaagattctaacatgatgaaagtttaagggatgatttagatttgatagatattaaagtcgagtatgatttattgaatgaaattaaacaaaaaattttaaatataataatctcaataatttaaagagaatttttaaaaaattttaattttggcaaaaatattcttaattagccttattattttaacaaaactaatttacttcgttgaaaaaaataatagaaatttaactttaaataaattaataaaggtcatgaacaagtcggtctgcaatttcttaattggttacatattaatcagagagagagaggagggaggaaataggagaaaggaactggtttgaaaagactaaattgaccttcttcgtttgagagagggcttcttccccatcgagttcccctctctctctcccctaatcttactggttcggtcaccatgaacgagaaggccaacgtcaccaaggagcttaacgccaggcacagaaaggttctgtttttttttttcatttcccttttgtcctattctgctgctaataatgctgaatttttcgatctttattggtttggatcctcgatcgtcgcatgttagatttgatgaatttttttctcttttaattgtttgaacggaattgggctcttttgatttgtgcaattagatggagcattgatttgtttgatttggtgggttttgatctaagttgtgtttgcttgtagattttttttcccaatatttatggatatgtttatatatggtattattatatgctgcctgcttggtgattattccatgaacttgaattagtcctttatttg

SEQ ID NO: 67089 - DNA, 1965 bp, Cannabis sativa
cagacccgaacctggaccggccccagccccagacccggccctggcccccggcctggccacggactgaaaatgagaagagagaaagtgatgagagagaaaatgatgagggagaaaataatgtgaaaaaatgaagagagagaaaacaatgtgagaaagtgatgagagagagaataatgtttgaaaatgatgagagagaaagcgatgagagagaaaataatgagtgagaaagcgatgagagagaaaataatatgaaaaattgatgagtataatgatgtgagataaagtggaaaaaaatattaaccaaaaataaattgtttttaaaataaaaaacaatattttgttgttttcaaaattcttattttttgtaactttgttttctgaaaattgttttaaaaaaataaagccaaacacgcttaatagtttttaaaaaataactttttatttttaaaaataaaaaataattttttagttatgatgctaaacatgcactaattctttgtgacatttttactttcggttaatagtcatttacttatgattgtgtgttgtaacatgcacgttttatattgaacttgaatcactacttgtcttttggcatttcttaattaattataataaacccgttttccactcagcaaaattagtaaccttaattaggaagatgaaaaagttacttaaatagaaagtgtcttggctcattgggtatgtatatgaaagtatctacttctatgtctaaaacgaaaagaaaaaaaacaataattgttataatgcaattttttatattcaagaagagaaataaaagatcaaaatgactcaaataatatgatcaaaactaaaataatactaagaactcaatgataaaaatcaattacactaggagaaagcaatatataaatattatatgtattttcagattgaagatacgtgacataaaaatagaagtgcgactttaaacagtcacaagccaagtccccccaattcaattaaatcatggataaactttacagatttaggaacaaattaatactagaagatacatgaagatttatcttgtcttatatatcatgccatccaagacacggaaggcttactatccctccgggatctagagatgaccaagttcaaagtgtgcccaaacaatacctagaaggttactcgaagagcctgtcacggacgttgaccactcaaaaaaaaacacggacgtctaccttaaagaaggacccagttcgctcaccgacatttttgctttttctgacacaggatcagaacttgtcccatgtgtcagactacggtaatacacacaccccacacacattttttctagacgattgttatagccatttagtttgcaaggtgaaatcttttagtgacacacgttctatacagttgtaatagagtcttggctcctctctatccttcatggatgagtatttcctataaattaacagctctgactcatagttgaaatgagcttaattagcattactaaataccttttctctataatttctattgtgttgcgtcaccgatcatggacttgctttctccttttgtggccgaggccatgactattctagtgggtctccaaatgtgttttcggcttaagtatgtcaatatcaaagttgacacaaactgctaactgttaaattgttggtaagctcataagtgaaaaagacttttgcttggcggagtattgctcggtattgcaagacgtgtaatttatttataatgatcttaatgtgtcttaagtttttgttttataatcgacgaatttcattattcataatcttctcaaacttggctctcactttgatgaggcgataatttagtgattataattagcttgagtttgtgtaagtctacgaattgttttagttatggcgtaatgaaattttcattcattaaaagaatacactaacaataaaaatcaatttattaggtaacgttacgtgcaaatattacgta

SEQ ID NO: 67090 - DNA, 1567 bp, Cannabis sativa
atatattaatataattaataatataaataatcgctaaccactcacaacttcatatcaatgtggcgaattaccttaaaaattaaagtaacaatgctcagataattttgtgtccaagtgtattatttcttgaagttcctttagtatatatatttgttaatctcactatcaaggtacgtatacgtagaaagtttttggaaaaggagagatattttttattaattaactggaagaagaatattctcttccacccttacaagtactatataaattcatttctagtgttatagtatgtatacttcttatatatatatattatagtgctcatatcatacattaattattattttgcttcatgtcatggatggtgtttaaatcaagttatagtatatacatattagtcacatttgaaaagctatatatatatatagtaatataatgtgtgtgtgtatatttttcgtgcgttctaaagtgggctcaatatagcatatacagtgtgtactccacctatatatatatgtgtatataaatgaatgcctcctattccaatacgtttcagctaaaattaagaagctctaatggcttcatatttgttttccactaaacaaatcatatttggttagtcataaggtataattgcttaaaagggttataaaacaacaaaatagaaaaggatcaattatcagtccatttaacattgacaagtatagattgtcaatacttaataatttaaaagtgtgtaatggattctatagagagaaactagtcatccaataacttttgtttttgcttatcaccatgcaataccaatattaagtgtatatattatatatgcctatgtgtgtctacactacacttactctagttttatataaggtgcccgtggcacgtaaaccatgctcaattagataaataatagtaaagtataggtgaaccccctaaaaatagtgtatccatgcactctctttggtgttttataggtatccatacacttttattttaattctttttatataaatcaaaagtcatcagaaagtcacttttactatcacatttttgtgttggtaaaagtttggtattgcactggtaaaatgaaatttatttctgatgtgttggcaaaaggggttggcaaatcaaagttgatcttaaaacttttacaagcacaaaataaaaagcgctggcaaaaatgacttttcccagcacataaatgtattggtaaaagttagattttagccactgccaatgtgcactggtaaaactttaacttttttgttagtgcagtttgcgaaatgcgctattaaaagtaactttaccagcgaactatgctggtaaaaatcacatttcttaaagtgatcattctcgtcaaaacgacatagtatcatcgttgatcaagtgaattgatatatatttagacgcaaaagtaaaatattttgcgtcgattctcaaaggtcgcatatgaacaacaccatcgattataaatcgacacaaaacataatttttttttttaattattgaaacttacgcaactaaaaaaaatcaaatctgaaatccaaaactcaaatattgcaaa

SEQ ID NO: 67091 - DNA, 863 bp, Cannabis sativa
agagcacccgtgagccaagtccaacaagacagtataaatatcaataatcacaatatacatttcacatatgtaataataatgccattacacttattgcctatttgagataaacctgcgtcttacgctcacacacctaattacatctatgtagcatagacccacgtgttacgctcacacgtctatttataataaggccttagatcggttcatttcggttctaattaccgagtccaaccaaattatgccttgaacgcataattctttaaatcaatttataaagcatggcatagcatttaaaaatctataatcactaaggtaataaccctagaccatataaccactcactttagggtaataaccctaaccccgaatcttaattaatcacatttataatattcaacatgagctcctccgcgcttaactctacgtgctaactactgtcttacctgatttcccaagtacgtggagattctaaatcctagggtgctcttgaacaagtttcgataatcctagtcacaattctcgagattcacaaataggattaatcccaaaattcaattttaataatcacatatttagcattccatttatagattaacgtatagatctcataacaagctttccaacgatataaataacatccaaaacggtgtctcaagtcaaaagttatggccagaacaaaatcgagaaaaacaggcattcccactgccaaaccgtcgcgatgactgggtttagaatacccaaaaatcccatttttaaggcctaaaaatgcccaaacacaactctaatttcacctaagacatacataagcaaaaaccatgccaaactaaggtattttgaggcattagaaccacaaaatataa

SEQ ID NO: 67092 - DNA, 562 bp, Cannabis sativa
aaacgcttaaataaaaaaaaaacccaaaatatcttccatttcagcaagaaaatatcaaaactagtcccatgactacccgagaacaatcctataaggtcagaaccttcacaatacttctatttcataaaacccatatacaaaactaatcgtttctcacttaaaacgaaattaaaccttaccttaatttttcccactccgagaatttgctatcccgctactatcggagcttagatcactaagtttcagattagaaatcgaagaaatagatataaggaaaagagggtttcgttgaaaaagaaggagagttcgttctatttaggtttactgtttataaacttataatatatataataaatttatcagtatgataaattttcataaaaaaaataatataataataatattaataaaactttattattaataattatcttattattttttagtcactaagaaatatctattcttaaggtgccaagtcaaattccacagattcctaattatctcaatacctacattactaacttatcacaatattcccattaattctattgattaaatc

SEQ ID NO: 67093 - DNA, 571 bp, Cannabis sativa
agatggtttgtctttttttgatcaatttgaattagatttgcgagtccaattgagtaggaagaagttgaaaaataccttcaaattaaatttaattcataaatacttttttttatgagtattatattcaaattatcctcacacaatcacatgattaagatataatttcagacacaatagatttgtattatttgaagatggatgtgtaggtttctgggaaaattaaagtaaaattttgattagagatgaatgaaaattatcgtaaagtgataagggtaaaactagtacaataattaaaaaaaaaggtaaatataatagattttaaggagagagtaaaaattagagacactgaattaaaagaggtatatagtgtaattttttcaattgagtttgggtttctcagatagttggacacacttctccgacaatagggctggctctagcctaaggggggttaggctcgcgcctagagtctactcattttaggggtccaattttaactctgccgatcctgtttgataagttagtagcatttgaagtttactagaccttgaagtgattaaaaaaaactaaa

SEQ ID NO: 67094 - DNA, 3315 bp, Cannabis sativa
atgctcaagatagacaatttgatccttcttttaggttgatgaatcctgaagatggcaatgagcattggcaagcacctaaggaaaacaagattaagataaacacggacgctgcaatcttcgaatcaactcctcgctacagctactcgtgtgtagctcgagatcatgctggccgactggtggaggctcaggcatcttgctgacagggtgctttacagcctgaaattgtagaagcctttggtattcttgaagccttgagttggataaagcagcagggctggtgtgatgttgaagtcgagtccgactgccttgttgccatacaatccattcgtagctcttctaccatgagttcctattttggtagagttgtttctaagtgcaaggagttgttatttgagttaaatcataagtctatttctttaaagtttgttaaactgtctgtaaacaatggagctcactttctagcgagatctacttgttttatagctgatcgtattttacatgtgagcaacgctcccgcggagttcatttctgtattgatgaacgatttgaattaatgaaattttccattttttgtcaaaaaaaaaaaaaacattaattaaataaattaaaatataaattgcaaaatatttaaatttgtcaaaatataaatatatgaaaataaattaaactagataaattcaaattgataaatataaatattaattttataaaatgaaaaattttatgtcttcagttattttatactaaccgaagacataagtatgcctacttcttcaattatttcgtaataactgaagacataggtatacctatatattcaattattttgtaatatatgaaaacataactatacctacgtcttcaattattttgtaatagctgaagacataggtctgcttacgccttcaattattttgtaataactgaagacataaatacgcctacgtcttcaattattattacataggtgcatctatgtctgaggttacttcaacacctatatcttctccttaatagtcttcggttttgtgtttttttcaactgaagacaaatgaacgtaaaactaaaaatataagtatttttttcagttttattttttcactcctccaaccttctatgaactctcatggtcttaatgtaaagatctcttttactctactacaacttgttgtgaagtaatattcttaacataacaataaaagatgtaatgaaggttttaataaggtaaatcatggcatccaacaattaaatagataataaggcaatctgtcagaaagatcacaattgaataaatctaagagcttaaagacaatatatttttgctgcaaaggttggaatgataaaggttagagatgaacagaaggtgaaaactaatcacgatcatccaaaccaaaagaaaacccttgagtcctatcctggatgtcttcataagtaatatcttttggaaagcgctcatcacaacaaagaatgttgtcccatataaccttcaagtcattcttaagcatttccctaatgagattggtatcagcatcttgtttctgaatatggaaaataatgaattataagttaccatgttctatcgtctttaaactacaatgtatcacaacaaaaaagttgaataaaataaaatgtagtaccattaattctgaaactacttcttttaacattataacaacttcccttgtagcttcgttgttgcccgaagatcgatcaacatctttgatcttaagcgttagcgtttgatttttgtatcgtttacgcctaattcgccatacaccacccacacaaaatttttcacccaaaaatgccttgcccttaggccatgttagtccacccttaacttttgtatttacaacggcagaattaatcaaacttttgaggctttcaaagtcatcatcctgtaataacataaaaaaaattagcaataatttgcatcattatgatgagttatatttctaaacaagttttatctattttgttcttttgataaatccaaatattttcttacaagaaaattagtttgagttcttttgacgcatagatcgagcctcatatccaaattcttttcaaggcaagatatgtctctgagcatgtgacgactataaaggcgttcaatctaaaataaaagatctttcacagtaagtttcagaatttaataatgaaaatttaatataatcaaactgtttttttttatcactaattcaactatcatgaatgaaatcaacaactaatatcaaatttgaagcaaaaaattacaacaaagaaaagactttccttgtatggattcaactttccaccttctagtactctacatttgcaccacatgtttacatctggttgtgttacatcaacaaactaaagagaaagggttagaaatttgatattttctctcttaaagcataaaactggaaaaaagacaaaaataaatagactaaatcccataaatgatgtaaatatcaaataagtaatataaagctaaaatttaggacacctaggaaaaagtatgtttcaattgtgtgccaaaaagtgatacaaatttcttacataataaatgttgtatcgaatttggcacaacatatgccatgatgtaaaatttgaatcaccataaatgtactactttcttcatttacttttatgttatttttattattttatatttagtcataacattaaatgatagactattatatatatttttaaggttgtttctacaatgtaccctttaaaagggatatatcgatgcaccatctacttgttttggcagcaagaagaattttttagtctaattttatatcatatttgtgtatgttatagttattgaagatatcttacacaattttagaaaattcaaaataatttacaatataaaaaatagtatttaaagaatctatttcacacgtgtataaaataaaatagatacgagtgcaatacattgtttgaaccttgttttcaataagttaaattttttgaattttttacaattttgcatgatgtcttaaataagtataacttacatgaccatgacaaaaaaattgacttaaaagtgtaatctgataccgaaaaagataaaagtgcattggtgcctcttttttaaatggtgcattgtacaattttcttatcgtttattgttttacataataaaattaataggaagcttctacactacaccccactaaaatgggtgcactagtgcaatctctaactattttggcatttaaaagaattttttagtctaatttttttcatagttgtgtactgttgaccgaggttttcggcaaccagtaaaatatgattgtaatgatgagctgtaagaaa

SEQ ID NO: 67095 - DNA, 1777 bp, Cannabis sativa
  modified_base (38)..(50): a, c, t, g, unknown or other
aaaaaaataccatataaattgaccaaacttaaatgtgnnnnnnnnnnnnnaagaacttttaaaatcccatactaggtgtaatttcttttttaacatatatgaacttgtctttatccaaattatgtattttttctattttttttgaaaaattgataatgtgatctcattaaattctggcttggaagtattgtatttcttttatataatattgaagtttgaaatgaatcaattaatttatgtgaaaagaattttgtgactactactgcagttctctcttcaaacacaacatttgaacttacacaaaaatatacacaattttcacattataggattacactcctaaaattgtgtagacaaataaaaatatactatgtgtatattttatagtaactggttacctttggtaagagtacctaattacccttacataatttttttttttcatattttttaactttttctttaattttctcataaaataactttttaaaagaaaaagaattatatttttacataaaaatataaaaattcataaaatttgtcattctcttcttctaaaaaataaattcggggtccctgaattaggtgggccaacccattttagcccgagatggtcataattgtaaatttggaaacataacaaaaatttagaggattttacaaaaatatatatgtatatcattaagtatattattaagtaaaatttaagtagttttaccataaatatttctaaaaaactcattcttccataaaaaaaaaaaggaaaaaaataccataattataatgataaatatccttacgttgttgtcaattagaaattctaagattgttgtccatagagtaaactagtaaagtatataacaataaaaaattcctaattttgtccaaatagaagttattttatttatttattattattttgaaatgttacaacatagttatttatttgttacattttgtatattattcaaaacaaccaaagaaaaataagaactacacacttgtaactagtaaccactattgcaaagagggagaaccaagaaccaaagagggagaaccaagaccaaagaaaaataagaactacacacttgtaactagtaactagtaaccactattgcaaagagggagaaccaagaaccaaagaaccaccacaaaacaaaatgagactaaatattatttttgaaccttatattttacaaatattaatgttcagactatctattttattaaataataatttaaattttataattttcaaaataatacataataatatcctctcacttttagtcaatttatttttattataatcaacttgcagataatttctaatacaaagaagtacaaaaaaaatataactaaaatagtcataacatttttaactcaaaatattgttatgttccattacaaacttaggttactattacattctattttgataaatacaaaaaaaatttacccagttatatttacaaatgggtttagttagtgggtttgagtattgctattagacaccagcagtgtttaacacattttgtaagtgacactacatgattggctagcgatattccttaaaagttaatgtataagagatttaatacttaattactctaataacaatatgatactgaagagagtactaagcacaaatagtgctctaatttaaaccttaaaccttcacttaaatgccaaaatttccaccattctacccaaaggcctaattccttgttataagtcttgactcttgacttctaattccttattatataagtcttga

SEQ ID NO: 67096 - DNA, 1060 bp, Cannabis sativa
ctcaaatcaaacttagaaaacaaatataaaacatcctaaccctaacagccatgaaaacacaacaaacataaactcaaacttatttaaagcttcaagaacatttaaataaaggttctagggttttacctttgcttgattccctctaaaaccttgctgaaaaaacaaaattcagcaacaatctccttggtccaaggctggttcgaagagagagagaaagggagaagagagcttccttgagttttggtttttctctttagtttttttatttcttttctaactaaaaacaagttaactaaataaaccttggctgaatattacttactaggtgtcaatacctaaggttgccaccaactcattctccttggcaatttactaaaatgacattttcacttaaaactagggtaattttaaatctaggggtaaaatggtcaaattccataaccccacttaatcccgatattttattttctccaatatattttccactaagaaataaggttctaaacttaccaatgtgatcaaactagccatccatcgcatttttcattgtcgccgagcaaaaattacaaaaataacatatttcacacataagtcaaataatacccctagagtttaataaaatctctggcattgacaaattataactctaatttcatttctaaatattggggtccacaaataattaatttcacaaataatcattaaaaaataacagaaattagtgctaattgcctttactaattccaattactaaagcggtcattacatccattatgtagtagatccctagcccttagcacaaaaataaccgggatccgagacccctgaactgatccaacataaagaaatggatcttcaccttctggctgaaaagtcaccattttccgcttacaatctatactggtcgaatacttggacagaaaatccatcccatgtataatgtgaaactccattaattccagttctataaggccaacactcaactccctatcctcgatcctaactggcatagacttaatacacctattggagatatccaactcttcgttaggcattaggg

SEQ ID NO: 67097 - DNA, 927 bp, Cannabis sativa
  modified_base (37)..(41): a, c, t, g, unknown or other
  modified_base (185)..(185): a, c, t, g, unknown or other
attaaacataatcatgaaataattcatgtgaaccatnnnnnataaaatgatttctgatctttattaattagtgaatctgattatatggaaatgggttttatttttggcacaaaacccaacactagttcccgaggaactgggttgatcaacatatcgacaaaccctccctgatctatcaacaagtnttccttgaagtggatctctaatgagatactcgcctcttctatgtgttctccggttgaacaaccatattagatcgttggcctctctgcttccacgatctaactctgcctggtgagatcaaaggatgtgctcttggtcatccatccatctcaggaatttgtgtctctgataagcgagtaaatcgcaattaggagcacgtggttgttcaagggattcacatctctgttgaacaaatttatctcagtcagtagcacatgtttctttaattaggcctgcacggcctacaacttccttatgtcagaggcgccaatggtaggtctactctttgaggcacgggcctgccacttggatccaccgggatgcttgtatcagtctggccactatagagtcttgctaggtaatcctggccgcccatagacctacaggggaggtctggccggccaaggtgtataggacatgactggacaaggtgtgcagggtctggccggacaaggtgtgcaaggtctggtaggtcaatggttgcaggacctggtaggtcaagggttgcaagacctgggaggtcactatagctctgtctagcggaggccagactcgtggcaccagtcatggtgacaggattctccacatttgcagtgttcatcgagattccagttgtgactagaacctgagtatctagacctatagtgtaataccctggatttaagaaatggattagcaaaaccctaattagataattatgaataa

SEQ ID NO: 67098 - DNA, 625 bp, Cannabis sativa
  modified_base (238)..(242): a, c, t, g, unknown or other
agttagaagaacttcacttggactacgtggatctttcttcaaccctacctaaatccattgcaaatctatcctccttgatatctctatcacttactggctgcaatctgcatggtcaatttctccaaaatatttttcatctaccaaatattcaagtcattgatgtttcatccaatcctaacctcaatggttttcttcccattaattttagttcttatagtaaactaaagtcattgaatcnnnnntccagtagtttctctggaagactaccatattccattggcaatcgtaagttcttaagtaatttagatctctctggctgtgctttttcagggactattccatcaactttgttcgaaatccctagtttacaatttctaaatcttggagataatcagtttgtgggtcatttgaccatcccaaatatctcgttgtcatcccaattgacgattctaaggttgggtgggaacaagctaacagaacaaattccaagctcaattctcgaaatgaaaaaactggaacatctcaaccttgaggaaaattactttagtggcacaatagagatgcacatgttctcaaagttgagccgtcttcaatatcttcatctttcacataacaatctatctgt

SEQ ID NO: 67099 - DNA, 960 bp, Cannabis sativa
tcaaattaaactaagcgggctttacaatcctagtctcgggtcttgggtcccggtctgggttcagggacaggttgggtccgagtttgggtcctggtcctagtcttgggtcccgagtctcggtctcgattttgtccaggtctgggtccaggtcccaggtcccggtccggtctcgggtcccaggtcttggggtctgggtccgggtccggggtcggggtcccttaccaggtcttggtctcgagtcccggtcccgatcccgatcccagttcgggtctgggtccgggtccagggattgatcccagtctgggtcccatttcgggtccaggtcccggtctcgattccggtctgggtcctcggtctgggtctgggtctgggtctcgggtcaagattcgagtcccagtctcggatccctggtctgagtccggggtctcgggtcccagtctgggttcgggtccaggtcccaagggatccgagtttggggttcgagtcttgaattaagtttttttttaataaattataatcgggtcggatcagatcagattcgatttagaaaaaaaattaggcggggcagagcgaatctaatccaagatccaataagtatccgaatgtttcggatcggaggtgatccgtcgcatcagtgctccaacctgctccaacaaaatagatttttttgacatgccatgtaatatcgatgcaagtcttggtaatccacttctctaattagactttttcaaatgtcactatgttgaactcccttcaagcagcaacaaatactctcttccttccgatgagagattttagacaagacttgtatcgaaacttgtatcacatgctcaatgaagaacacaacttataaacaattaaacataaagaaaacaaagtgtaaaattaatacaaagaacgcgaagactatgttggacactttaatctcctcacaaagtactcttcaaaacaaaaaataat

SEQ ID NO: 67100 - DNA, 1229 bp, Cannabis sativa
aaaggagaaataattttgtgaagcaccaatttcagcctattcgctaaaactttggaaataactttatagaaggttgaacaaaggctaattggtctaaaatccctaagcgttctagcccttttttttttttaggaataagtacaattaaagtggagttaacttcagaaaaatcagccccattattcaaacaatccagtactgcattaacaaggtccacacctacagtgtcccaatttcctttgataaaaataggcattaagaccatcaagaccaggggccttatcacccgaaagctgaaacacagctttttgaacttcatcaaacgtaaaaggttgattcaagaaatcaatctccaaatcctcaagagggggaccaaggcaatcaaggatgtgattcacagcttccgtatcacacccatcacaatgaaaaagatcctcaaaatacgagagaacaaaattactcatatcctccacactgttagcaatattaccattgtcatccctaaggagtgaaatggtattgttacatttcctcttagaggcataacgatggaagaacgttgtattcctatccccagccctaagtcaattaaccctagccctttgatgccaataaacctcctccctatacaaaagagcatcaagctgtgactgaatatgtttaatgtgagaaagtgtatcactatccctaggatgaatggattggagcctctcaatttctttttgaagataagccatcctaggcttaaaggaattcccaacagacctaccccaagaagtaagggaagtgataaaagctttttgggaatgaaggaacctagagtaagctcctacagtggacacattatgagaactggaaccccaggcattattgagagtggtatagaaatcagggttctcaagccatacattttcaaaatgaaatcgtttaatactgtgaggatgatgattagggacattctgagtgaccatcactttcaaagcacgatgatcagagccataatagggtaagtgatgaagggcagcagaagggaataaattacaccaagagtctaaaacaatggcccaatcaagtctctcaaaaatagtattattagtccaagtatatttatttcctgtaaaaggaagaggaaatatgtaacgcccgtattttataataataaactcgaaaattatttttaataatttatatatattaataaacatatggatcgggatcccgagtatcaa

SEQ ID NO: 67101 - DNA, 726 bp, Cannabis sativa
tccgatcacaattggatatccaatgtttggcggtcggttgtaattggatcggtcggttctcattggattggatcaatttatgcacacccctagctgctggtgtcactgaacagaaccattccactgcttctcctctcctatccaatgtcgaagcatccaatccagcacctcctgcaattaataagcatcctatgaaaacaagagggaaatcgggcattcgaaaaccaaaggttcttatggcatctcttacccctgcctctctataaagtgctctcaaagatgccaaatggtttgctgcaatgtcagaagaacacaatgcactcaagaaaaaccacacctactctcttgtcaatttacctccaaaccgagagccaattggatgtaaatgggtgctcagagttaaagaaaacaaagatgggtctgtaaaaaggttaaaagctcgccttgttgcgaaaggttttcaccaacaagttggttttgacttccatgaaacctttagtccagtggttaagccagtcacaattcgggttgttctcacaattgccttgtctaagggttgggatgtaagacaattggatgtcaataatgcattcctcaatggtgatcttcaagaagaaatttacatggtgcaacctcccagatttgttgatcctgaacatcccaacaaagtatgcaagctacacaaggccatttatggactcaaacaagctcctcgagcttggtttg

SEQ ID NO: 67102 - DNA, 892 bp, Cannabis sativa
gtttgtctaaaagtgataattaaaggtaccattggttagatactttaataagtgtggtacgagagaaatattagaaacctgttcactggagtaacacatgtgagaaaggaatacaatggaccaaaaatatccaaggaacttataaaaccataaagtgaatttgagttttatgctcgcttcattaagtacacaaaaaagctacgctgatttaaagcataggaatatcgagtttcaaatgggagattttgtttttctctgagtattgcctataaaagagatacgtacagagggaagttaaaccctatactcattagaccttttgataccatagtaagtaggctaggtaacctatcagctagccttgtcttctgcattgttcggagtgtataatgtgtttcatatagccatgctaagatatatgtatcagactcgacctatattttgagatgtgacgattttaagctttagacaaatttattatttgggaaaaatatcttgttcaggttttgaattggaaaaagaaagtaatatggaatgaggcaattctactagttaagaaagtgttgtagagaaacaacaaggtggaagaagcaacttgagagttagaatcgtgaatacaggagtaatatcccgaattgttcatgttaattttgaggaaaaaatttctataaggaggggatggttgtaatatcccagaaacctaattatgaataattaggatttattatatagtatgggttaattaggtagtaatgagtaggattatgatcctgctaatctaatttagcataaattataaattttactattagtggaaaataagtgtaatttattaattatggaggtttatttggaatatgtggatatagtgtaagttatttgtgaaataaaa

SEQ ID NO: 67103 - DNA, 590 bp, Cannabis sativa
gctatgtgtgaatccttttctttcaaaagatccttgtacatggtgttttcatcaaatacaacatctttactgaaattccttttatgatttccttcctctatgctccacatcttatacccttttactccgtcagggtatcctacaaaaatgcatttcctagctctaagatcaagttttccctgtttgatgtgagcataagccacacatccaaagatcttcaaatggtcatagttggtaacatggccaaaccacatttcagttggagttttgcaatttattgcagctgaaaggcatctattgattagacaacatgttttgacagcagcctttgtccaaaaactcttaggcaaattagagtatatcaacatgcaccttaccctttcaagaatggttcaattcattctttcagcaaggccattttgttgagggttccttggaactattaggtgccttccaatacctacctttttgcaataatcattaaaaaaatttgcataaaattccaggccattatcagttcttaatttcttatttttctttccagtttaagtttcaagcatggctcttagctccttgaacttgttaaaggc

SEQ ID NO: 67104 - DNA, 2307 bp, Cannabis sativa
  modified_base (32)..(32): a, c, t, g, unknown or other
ttgggttttgtatgaagaatcttctgtagatnaagaagattcttgggtaagagtgtgagagttgaaacactttgagagaactcatcggggaatcaatctcgactatattgtgcctgttcttgcttaatcaataaagaggatttggtggtgttctaaaactagagtagagccatagatcacattgatctatcggacttgaactagtatatatcttggtattgatttcttagttttactactttaattgtttctggttattcatactctgttcaatcctatttttcctctgattactacttgtgtttgttaatcttgccattgctaatcggtgattgtttaaaatttagttgatttgattttgcaccattagttataattttcctacaaatataatttcttgaagtatgaaaattagaaacgctcatacggtagaagcaaaagtgatgcccacttaaactcccttcaatttgttattcaaacaattaactgttagaataattgtatgtaaacacaaagcatatatgatcatgtatgaagtgcgaaattaatcaaacatacatggattatgaacaaagaatcaaaatatctctagtcattgattctttgagctttagtcctacactagttttggttctgcaaaagaaaagaatgattagtgtgggtaatcgggcttccaagctctctctactctctttagatggatttactgtgttcacataatcagtagtgagctcggggaccttgaccctatatttatataagtgagaccttccatcaaagtctctgccacaattacactataaagaatcttactcttagtcataacaaaatttgtgactaaaagcaaagaaattgtgagtaattataaattatcatttttatgttgtgactaaaaagtccgtggctaaaagtattagtcacaaatattacaatttgttgtgactaaatgtacttttttagtcacagcttgttgtgactaaaagtaaattagtgacaatttctatctaaaaattatattttagtcacaagtaacattttattgtgactaaaagttacatttaatcacaaaaaatttatgttgtgactaaaagtttgtcactaaaagtaactattttttgtagtattaattgtcagaatattttgacaatcaattaggaaataaattaattagtaaatcataatctgattatatttagaatattcactcttatcacattttgatttgtaataatatacagtcaacaagcagtcagtaagataaaacaaaatcgatttaaatgattttgtactaataataaaaatattctaatattaaatagaaatattttaatattaactttaacaaaaaaataattcatagtagggttgttcatataaatcggaaaatcgcgatttaaattcggaccacgacaaattgaaccactgtaaaccgtaaccggagaaaccgtttttggtggtttggtcaatccggaccgtttacggcgtaatagttcggttgcggttcgtaataaataattaatggttaaaccggaccggaccgtttataataaataatgaatttatttatatttttttatatatgactatgtctaattttgaacttttttgtgtgttaagttttttattgcatgaattttgaatttttatggttaaactggaccggaccgtttataataaataatgaatttatatatatctatattttttatatatgactatatgtctaattttgaactttttagtgtgtcaagttttttattgcatgaattttgaatttttatgttatgtttgacttttgagaatgtttttatatcgttatttatatgttatagatttattacttatcatgttaaatatatattttgaaaaataaaattaaaaacttagtaaaaatagtacaattacttaaaaaatataaataattataaattccacttaaactgtagtttcgaaccaaaccaaatcgttcttaatggtttggtttgaaaaatttattggtctggttcgttttctaatattcgaaaaaccgttatactggtttggttcaaaaactatgaaaattcgatccaaactaatccgtgaacactcttaatttatagtaggagtggaagaatcgtaacaatgatttttattctattcatttgttaagtgatatttcttattttggtagttgatactttatcttacttgctgtcgggttaaatttgatgtgcatagaaattcaaatagattaattatatctacaaaatctaatacatgacaatttttatggccaaacctctcataatcattttctaactgcatgta

SEQ ID NO: 67105 - DNA, 666 bp, Cannabis sativa
ggttatgcattgtgtaatgtataaacgcttaaataaataaataaaaaacaactttgactaaatgtatgtgtgcttcgatatgccagtctattggcctcattgctgtttgctctcctttatcaggaataatttatttttacttagagaaacattaaagggtactagtgttgcctagcaccctcttatgtgtcaatatcgctattgattcaactaaatatcaggttccatataatttatcatagtagcttttaaggaatatcactagccaattacaatacaatatgtcgagaaagtgctagatactattggtatctaataaaaatgctcatttacttatccacggcgttggaatgaattttttttcttagatttatccattaaatgaagttttgaactttttctaattgatcttattagtgctttgagggtgtatccttgttaataactttgactacatgtgtgtgcgtatgttagtctattgacttcattgacttttgcttgctcttatataaataatttatttttacttatccatgagtgttgtattgaaactttgttcttagaatgaaattttgaacttttcctatttttttttcctgttttatttcccacttaaatcccactttgaaacatagactaaatatttatatattttaataaaaaata

SEQ ID NO: 67106 - DNA, 1571 bp, Cannabis sativa
  modified_base (1484)..(1485): a, c, t, g, unknown or other
atcattgagctttgtgttgttcattctttcctgatttgattttcatcctgttagtttatatttggtgctggtcgttttcaaatcatgattttcatcttatttgtttactaggggaacaacacgtgctacgcacgtataatcttttttaaaagtaaatatagaacttttattaatttgctaaatcagtcaaaagacaagactgtacctcaacaggaacatcactcttgttgaacactcgaaaagagcaagatgctctaacaagactatgagcaaccatgttagcagatcgtttgataaaaaataaaaaaaatattgtttgaagatggaagaaatttacgataattttctataataacccaaaagaaaaaaaagcataggcaatgaatttcaaatagcgtgtactgctaccgagaaatttgacttcaactccacttttcaccattcttgagttttaatccagcatagcatgtgtcatgtaatgtgcttaattgtaaaataaacatcacttaacatattcaaaacaaaatataattattatatggtcattagtgtggtactcacatgataatgatacatcatctattaaaaagttgcataagtgtatctctaatgacgatgcattaaataggttatgcgtatagtttatcttgcaaaaaaacttgctccaacagtattttaaaagttgtgccaaaattgatacattttaaaaattatactcaatttaacacataatatagcacaatccaaaatttatattgttataaatacactattttttttatgttttttttaatattttattaatatacatagctatagaccattacgttatattataaactatttacattctcctttattatttcagataataagatgataatagaattagtgataaatatgttttcttttgtattttaatagaagtattaattgaacataaatttgtatgaatcgaattttataattgtgtattaaagtacatgttaaaaattaatgcaaatatatcacaaagtaaatgtttgtatacaatatagcacaatttttaattttcccattgaagaggatatgagcattttgttaactatatgtgataaaatctaacataattcatttatatttaacaatggaaatccttaaaaaaagaaaaggtaaaaaatactatttaatagtggtcctaaagaatctttaatacaaacttatcccctcttcttaaagagacaaaaaaaaaaaaaatagaagaatgtataatataaaaagtaaaaaattaaaaatattaatattatttttttatgtgaaattatgaaaataaactataatttataattcttagtaaattatgtaggtaataaattttaaggctaagtctcctaaaaaactctaagttttcatttttgcacaccattattctttcatacaaatatatatatgtatacatcctattgagaaaaaaccaatcattttatatatatatctttatatannaaaagtgtctatctaacgacatttcttggtttaacagaatatacttaaaagtaaaagaatattctgttaaatttaacgattagttt

SEQ ID NO: 67107 - DNA, 717 bp, Cannabis sativa
aaatactgaatacaatatatgaatgtttaagaaattttgataatctaactgcaatttgttcttaagttaatctaaaaataaaccaaaaatcaatgttcaaaaataaagggtacacaatttaaatttaagttaaataaaaaagatattaaaatttaatctctaaattgttgataggtaaagataacaaatgtctaaaagttacgtgcaatgcacgtatacttagttgtatagttaattctttttaaataatattttataattttgaatatttatttttgatgacaacattatatataatttatttaaaaatatactatttagaaaaatgtttattatatgaaaagaaatatataatttaaaaaagaataaaagaaaacagattaaaattttataaaaaagaaaacataatagtaatttttttcaaaaaaaataatattagtataattatttaactactttttcaatatgaactcagtgacaagaaagtacaaaactgaccctaggcaaatagagattccattcactcaatacattgagtactctccaattctctttagtatcctatgtatatactattgtattgtattcctttccaaaactgacccttaatagttgtgaaaccacataatatttaaagttttggtgactccaaatattaaattgatatgagtacaaataaaactctctcaagaaaagagcagcacgaatgccaaattc

SEQ ID NO: 67108 - DNA, 768 bp, Cannabis sativa
acataattttgtaattttgatttataatctctgttgatttcagccattcttttgttcttgaagagtatatttcgaatgtgaagcacttttcttcttcttctccaatctcaaatgcctcaactgtcactaacttgaattttgtagaaatgtgtataggattctgagatggataaaaaactaaagatataatgctatcatttccaattgaatcccaactcagtttggtcatttccttgtttaatggattgcaaatgtagatttttaggtcttgagtagggaagcaactcctgcaacaaatatgaccctgacacgatgaaaataccgcaacatccttagggagaaaatcaaagattgtctgtttgaattgaaaaccttcttcatcaatagaaatgtatgtcacagtcatattgagccatgagaacttgtcttggaagtagaattctgagatagagagttttgtcctttgtaatttagattggataaaagaacgatcagatatcaagttgttccaagttttagatacacatttcaattgaaacaatgtttctgtaggtaataggtataacacttcgaagaattcatcattattagagcaccttatctttctcatttcctgaaacacaaaatcaaatttcatcattagttatatgtataacatgtgtccctatactaaacaagtaaaagaccataattgaaactctttaacgacaaaaattgctatgcaccataaagtcaactattaccctaccacaaaaactgctcttcacc

SEQ ID NO: 67109 - DNA, 938 bp, Cannabis sativa
aagaaaagagaatatagaaattatggattttacgggcgttaatgagccttagttcacgagttagagatagagaagatgaaattttctcttgaaaatttagcagtattttggcttaacaccaaattggtcgggtcgggttgggtcccataaaaaaaaaattctatggctgcccataaatatgaagtcttctatcaataggtcgggttggatttgatccggctatgataagataagagcccctttacatgtgacctcatatttatgggcagtcatagaatttattttttttattcgtctaaatgcttcattgatagaagaaaatacattgatagacataaataaaatattaattgctggtatgcgggcttgtcttgtcttgtctcttcaactttattggaaagacttcctaacatattacatcaacattttggggagttttgatagctagtgggtgcaccatcatttatctttgtttgacaaaagtagagacaacaacaatgatgctctatttttttaaaatgaaatataataataccttgagccgaaatttggtcatatttttatttaatatagttgaagtcatttttagtataaatacgtgcaaaaaaaaaaaaaaaaagcctctaccttaaggtatttttatatttttgattaaaattgagccgagaatattataatcttttattttgaaaacatatagttctaattgttatttaaaaatatccaattgataatttttataaaacacagggttaaaaattttgaaaataaataaattactttgaaaatttatttaaacaatttttttaatcataatctattttgtactcttttttttaatcaaaattcacttcatttcttcacttaaaaaaagtataacgtaaaaataaaagttataaacacatttttatttgaaaaatttatacaatatacttaag

SEQ ID NO: 67110 - DNA, 571 bp, Cannabis sativa
ttaggtgcacggcctgacatctttgccatctccatcccactaatcgatgaatcaagaactccccttcaataatttttgcctcttcgacgataataagtagggaataggagaactccccaaatccttgaactgtgaagctccgacccactaatcaatgaatcaagaactcccctaatcactgcatcgaccatttcgataaaaaaatttcctttcgcacggcaatgagagactaaatgtcgtggctttggttagggacgttaatggtgatagatggacaaaagagagagatgttgtcattgctgcagtcaagaaccccataacacattgagattttattcattactttgtagatagaaagcagatgaagagaagaaaaattgcagcagaggtaggtttcaatcgtataccaataatacagttctaaccaaacaaatcgatcaaatatttgaattaacaaaatagaaattgcagaataaggaatggctcagaaaggaagaatcatacatgcgaaaccccccaaaaataaattaaaaatcaaaattttaccatcataaacacaagctttttgaac

SEQ ID NO: 67111 - DNA, 697 bp, Cannabis sativa
tgcagagagattgacaaatcgtcggggtaagctactgtgctgatacgaaaagcctatcaatgtgtcggaaagcaacccccgaatgtcattcccctgggtgaaacagacgaagatccagcgatgaatgcctctcagactataaatggtcagccgccaaatctccggtcacatgttttgcctatgggccaaggagtaggtgggcagaccttgtctagtaattcattgggagaagtcatacccggtacttccaactaggttaatggtgctagtcagcacattaaacaaactaaccaatcactgagagagccaggcgtttatgtattcaaaaggttggggacaactcatgatttgagaagcgatctgaataggaggagaggagtagacaatcagctttacacgccaatcgtgcagccagaaacccgtgctcaaattccttctcagaaagataatgacgtgactcagatcgatcaaaataccgaacaggttagtccagctgtacaggcacagcttgatgaactaaagaatatgttccaagggatggccggacagcgaaacaatgatctcgagttggatcgagcacgtggaacccctttttgccctgagatcaatctcctggcattgccccacaagtttaaaatgccaacctggaagatgtatactagaagagaagatcatctttcccacctcaagtatttcg

SEQ ID NO: 67112 - DNA, 2452 bp, Cannabis sativa
  modified_base (844)..(854): a, c, t, g, unknown or other
ccaaggccaacctagccatcctatcaaactgagttgtatattcagtaacgaacatattttctttctaagttagttgagtaaattctttcctctttgcacttcggactatttcgttgtaatacttcacattaaataactcctgaaactcttcccaagtaatggtggtgacatcccgagtcaaagccaccatatcccaccaaaccagtgcatccgtctgaaattggaatgtggcacaagccactctatcgttatcagtgacacccataaagttcaaaatctgtgtaataactgccagccactattcagctttcttcacatctagacctcccagaaatactggaggtgcccgcttgcagaaccttttgtacatgggttccatctggttcataacagtaactggcgctgccggcagagcagggccaggagccacctgcattttaggagcaggcattgcaggagcaccctgctacctcagacgtctgatctctttgtcttgttcattgattcttgcattactgcaaacctattttcctaatattaggtagcctgtagtgggtaaacatttccccgaccacgtgccctgcctcttaggcctctacctcggccacgtatatttaggggaaactgaactccctaactcccactggatccgaccgagttaccctagcttgtcgtgttacacttggtgtccattctaatagaacatcttgagaaaccaaaagctgacctggtcatatcacgatcaacaataatttactaattattgcttatgttagaaattaaaatgtgtgcttattcagctatcaggcttttcttatgacatactaataaaataaactactannnnnnnnnnngcttactgaaccgtgagtcaagcttatctctgatgatgattgtacatgttatgatgatctttggaagagaacctagcagctctgatacaaaattgcaacaccctactagtttaggcgtgttatcgtaattttatattaattgtgcaatccgttgttaatcaacaagtttattgaaaattgtaatttattaaaactttatttaattactaataaattgacactaagtaacttctacatcactgggatcccgaatttaaaatgtttacaattgtgatacgaaatacttgatgcaaaagttgttgcctagtgacaatacaaaatgcagcctcctgtccaaaagataataagctccaggcctaattgccctgacatgtacaatcttcatctgctcgagctcattgttgttcagccttagcttttcccatacctacacatgcaaaaaataattatgagtcgatagactcagtaagaaaagcataatcataatcacaaatgcaactcgcattacaattaggcgcccatacacccaaccgtaaacctatccccgcgtcctatgcagtactgagtctagaacattggtgttagtactattgaccagaatatcagcctatactcggcactctagtcgtaccgatgtgagagcatcaatcagtacttaagctaaacatacatttatcggtatccaatataactttacgtatattaatactgctatcaatgtaatctaacaggctttataaacatgcacgctaaatgtgtaatcatatatgcatattattatactaatcttaccttgtttttgaattcaggtgtgccgatcaaccagagtggaactactgctcaacgatttatgggcccctaagtcacaatattcgttaaactggtgagtgacacactaaatcactttttggggacttaaaaacaaagcaaaaagttttcctatcaatggataacatggcaataccctaaagatcgtaaaaacatgaaaatctaaggtgccctaagatgccccaatcggtagaccagttcccaaccaaaaaaatggttctgtggggtctacttggggacgaactgatagaccagttcctactagtgcaaactgaaccggtagaccggttcaatacaagaaccataaaaactcttttaaacaacccaatttaaccccaaatcaatccgaaccttcaagagtagcgattcaagcctcaaagaacataaaccaagcaaaataactgaacaaaaaccccataaggaagaatcaccatgagagagaaaagtttgagcactaaagtccaaaccttctttaaacacaataacaacactcaaatcagttcaaaactagctcaaataaactcaaaacatcctctaaatacaaattaaacatctcaaaaacctacagaaccctaactccaaaatcaaggatagaactctaacttaaaactcaagaaaacgaagagaagagaacttggaatttttacctttgattggattcactaagatgttgcaagaacaccaaaaatggagctcaaaaaccctaattccctgctggtttttcaaagaggtcaagaggaagagagggttgaagagagagagagagagag

SEQ ID NO: 67113 - DNA, 893 bp, Cannabis sativa
atttcagaagcagaaggaatacggatgagattagtgttgcattcctgcgatatcaaaggctggattaggtgttgtaacaggggagaagggggagaggtgcttgatagcaccgagataaacttgtcacggaagtaattccccacagcgtttctaccagaaatccactccagcccatccggagttatagtttctataaaatttcgcttccttttgatgactgtcgcagcatggaaaaaccgagtatttcgatcaccatctttgtaccataactcgcgagatttctgcttccaaatttcagcttgacgagtctctacttcctccatctccaaaataatatcggcttcaagcttaagattaacatccgagggagtacggtgttggacttcaagaaggagacgattcagagctttgagcttctccttgcacattccaaaatgtgttctattccatttagataggcttcttcgggtattctccagttttgaaacaagttggaagctcttgatcccatgaacagcaatatcccacgcctccttgattatgactttgcaacttgcatctctcgaccacgcatccagatatctaaacggggctttgaccctctcacgatcaaatagcaggtccagcataacaggggcgtgatccgattctttgataaccaaagatttgaccccagccttaggatactggataatccattccgggtcacatatagcccgatccaaacgctctttgacgaggtttgggagactacgaccattagaccatgtgaagaaattcccagtgcaaccgagatccactccacccgtaacattcatcaactccgaaagatgatggccctctcccgcttcaaccgaacgaccaccaaatttatcaatttgaccagagatgat

SEQ ID NO: 67114 - DNA, 964 bp, Cannabis sativa
  modified_base (696)..(699): a, c, t, g, unknown or other
tcactagccaaagaggagcacactaaccaaagaggagctcagtggccaaggaggagcactttggccgaagaggagcattttgggcgcattaagctcccgactccgtcaggtgctaaggcgcaaagagctcctcagctgccaaattatctcaaggacctgatgggcacgaactgacccaattggctcccctcatgtacccatgaccatccgcgtccgctaaatgcgagagacgtgtgcttttagagctgttccgaaaatatagtcaaaaaataataagtgaagatatatttattttttaaataattatattattattattattttgtatcttgaacctaacccaatataattacgggaaaggtatgcctatttttaagggattttaaatcctatatgaatatctatataaggtggggtgaaatcacttgtaaagggaccctgaaattgatactcaggagatcatactctttagctcccactctcaaattctaaaaactcacttgaggagtgaactcttggagaacataactctggagaactctcctcaagcattgagatcaataacactccaagtggactagcctattacccttgaaagggggtgaaccactataaaattcttgtgtttgtttttggtgaatttctttttgtaaaccggtttactttgattaactattgcttgtgtttatcttgctnnnnttacgatcttcttagatccgttggcgaaaaaccgcgtcaactctcacaactataatccaaaatacaattataatcttaaaatttatttacaatttataaaaaaaaaagaatgttgagtctctttataataaatgaggacaaaaatagaatcattatgttattaataatatatatatctcacattatttataatatatataattattagagtaattaaataccgaatctcattatcattagtgtggcttatatcaatgatcttact

SEQ ID NO: 67115 - DNA, 508 bp, Cannabis sativa
gatacttattggatctaggatcaaatttgttttgccctgcataattttttttcggattgaatttgacctgatctattttaatatattaaaaaatatatataagatatatattattttaaaaataatataaacaaaatttcctatttgagactctaagtcgaagaagcaaagaagaatggaatctgaaaatggaatccctcagtcacaattgctcgcttcaaccctaatcttcaccatcgtaatcgcattccaattcgtctccacactctaggtaacgaaacaatatctcaatccactctcctcttcccgttcaattatcaaaattttctacctcttcttatttttcttttctaggcttttcgtttctagtaattggatgttaatggaggattttctaggtgagattcggattcctcttgctccattttgtatatttatttttttttttttgggttaattagggtttttgaataggttggctcttttgtcttttttgttcactcttcaa

SEQ ID NO: 67116 - DNA, 1227 bp, Cannabis sativa
  modified_base (1168)..(1174): a, c, t, g, unknown or other
tatatatatatataaagctgtgaaattgtggctcattattatgaaatttgtccgggtaaaaataaatgtgatgggtaatgattccaaactccactttcttaccctttatttgttctgatttcttaatcttattattggtataattagtattattattttgaaggggacatataaaccaaaaggcaatcatgttatattttgttgccaccattaatttattgtatattatttcattcctaacttagcaatcaacatttctataagtataaaagagccatagacatattcaatgacatctcaaattgtaattataattagtcatgaccaacaaacaaaccctaatgcataaaattctgtgccatatataacagttgacatttcaagtcaacatccaagtaataataataataataaagccttttatttttcctgaataaaatatttaaaggtcaggtgggtttttgtttattctatccgaataaatcattatttctagaaacatagacatgaataaataaatattgagatattgggggtgatgtgtgtaggaccttatacaatggggagtctatatatatgtatccataaatacaaaacttttaattattgctaattttttgcttgcaaaattaatgggcgcaagcttggtttaattcgagtactatacctaatttcttatcatacttatttatcctattaatattgtaattaacttgaaccttagggttaatcatggtcactaaatgccatacagtttgatgattattcaaactaacatttaccaccattaaataatacactatttttcaattatattttcccagtcactaataattatgatctcacattgaggtcatcgatccaatatttatttttaatttttatttttgcgtccatttaaccacatttctaatgttgatgtcataaaatgttaattataatgaatattaatccggttttgcacgttacaatattaattaacccacagaaactaatagtattaaattattaatattttacatatgtttatacattaaaatataattacatcaaattaattaagtatagggctgatcaatttggatggtcatgatcttggaatgaaaaccctagtccccccctaaacgatcttttttctgtctctttttctatttatatatatatatannnnnnnatatatatatttatataaaaagtagtctacaattaatttagaagaagacaaat

SEQ ID NO: 67117 - DNA, 4839 bp, Cannabis sativa
  modified_base (1973)..(1988): a, c, t, g, unknown or other
  modified_base (4795)..(4803): a, c, t, g, unknown or other
aagactttacaattacatgactccgtttgtgtccaaaaatcctagatcagcttatatcaattatagagaccttgatattggaaggaatagcaacaagggtaccgcaacttatgctcaagccagcatttggggggtcaaatatttcggccaaaacaactttaatagattggtacatgttaagactatggttgatccaacaaatttctttagaaatgagcaaagtattcctccactgtcgtaaaacactggctttcctagttatctgtttctataaataaagtccatatatatacatatatataaataaatactatctacgaacgtggacatttttattatttactatatgtatattaccaataatttatgttatctatttcaaagtgtgtatctttggtagtataaaaatgggttctgttatactcatgcatgtcttcaattaatgtacaccacacaataaattatttcttgtctaattaacgtcatcaattacacaagaaaatattttttattttctcagtaagtgattattttgattaaatattttaagattctagttttactccacattttgatttgattgtggctagcaggttaccaaagggtttgttttttatttgtatttgccgtatagttccttaaaaaaaaggttctccaaaagtcatttttgtaaagttgtttgtctcccagaaagaagcttgttctcagacaactttcttgctctctgggtgtagacttcaggaaagcactacaagaaaagataatagtaggggcgacaaaagttgcccctaaaaacctttataatcgaccttaaaatgtattagggacgacaaatcgccactagcatataacttttactactttgtccctaatgctcatttttaggggcgacaaaaaaaatcgcccctaaaagtgattattaggggaaattttttgtagcccctaaaagtattcaaatcgcccctattttatgcaaattaggagcaaaacaaatcattcctaaaaatgtaatgtcgcccctatttgcatgcaagtgtgccaacatttagtatcattaatcaaccctatattatttaacatcaacaattaaatgtaatatatcaaatgaatttcaatttggtaaacagttttgaatttcaattacaaagaaaaagttgtatatcaaatgaattagtgtaattcatttttaaatgttatagtttctggataccatatgtatcaagcaatgtacatagtatgataatccaacaaaaagcaataataatgaccgacatcgaaatccaacttctagtctagtagcatagacaattcagggagcagaagtaacttcctatcagcacctacatcgaaatcagtaaatataagcagagtcatcgggtgagatacccaagtcaaagaaatttaaaacaaaaataagtgtttatttagagaatagattgaagacacctacaagctaaagtttcagtttaagatgaaaaaattatgcaacttattgtcacaatttcaagtgaaacaaatatatctagacataaagatgatgtactattaaacaatttatacaagaagtactattattcactagtactagtatctcttatatttataattgtgtccaatccacattattattattctcttttttctccaaaaagagccataacccagttcacagttcccatatcttaattttggttctcaacacaagaaaaaaagaccatgtttagtactaaacaagtagtacttaataagggtctgttcattatgattttgttgatgagtactattattattgctctacagtacaaccatggagtttatggagctagattattatcaagtatggagaagatggaagatcttaacttaaggttcaagtttggagaagtactcaaagttctagtacttctaacaaatatatctagacacaaagatggaagcttacaataactatatatgtaataataataataatnnnnnnnnnnnnnnnnataataataataataatcaatatataataaaaattacctggttacatctgcctcatcatcctccctatcctcgctctcatcgtgttgattttgtgatttttgtagtggcatcgacgacataggcgtcataggtcatgcatacggtggcatctgctgagaaaattaaagatgaagatccaagcatgtctctgtgttcgggatagacataaggcggcataggctgctgcgactgaggttgttgcggttgagggccatacatatgtaaggatagtgatatggcggtggaggatgctgtgatgggggccatacatgtagggaagataggatgtaggagtatgttgatgtgatggtcgtggtcgtggcatctgccactgacatgaaaaagttgagttcatgttcgagtggcttcccgaagttcgaaaagacgaaccagaaccatctccagacatttgaggttcaggcctcctagttgagtgcttctgaatcaagtcatctatctcattgtttggcggcagatgctccttttgacttatatgctggaccaatttaactattactcgctccaatctttgtatttcctctgaatattcttgagtaggcattgcctgtgttttggaagtactgagtgtgactagttgtggattgacccttcactttgcgtcccactcctcggttgtaatcgctcctctcgtcaagcacttgttgaagtatttgtatctaatcaactgagaaataagcatgagaactagagtcatcattttgctgttcagattgtgcttcatatgcttctttcaatcgttcatatattgaaagaacaagacagatttcacaaatgtcatctattaagtataaacaaaaaaaactattaaaaagagagagtttggcattgaaaagagagatgagtgggagaaccaagacatatttaattaactcatcaaaagaaatagattggcaccaccaactgagacttataaaacataagatcaacctattgaaaagaaagcatgtactacatattgaacattcacaaactaactagcttgtttaaaaccttgcatatgtgatacaaagcatattgaataagggttatccttcatttctattatcatttctattatttgtaatccaattgtttctcccttatttgtacagaagagctctaaaatctcataggcagcccatatattttgtttcagcattatataagttgagaaactagtaaataaagatgactcatttcataacacttgttctcttttctatcttttccttacttcaaagctaattgctaccctttatttgaaaagaatttaaaatcaacaaatgctgcaaaaataaaggcattgatactttctttgatagtgctaaactttcatttcactgatgattaacttgcatactaattcaagtatacaaatataactaaattagttggaaaattctgtttttcaatcataactacaaattagaagggtttatctcaactctcaaggaaaaggactacaaaatgtgttttctaagccaaatgatctgagtgaaacaataacttctcccttctctgctctagctttaaaccaagactagaaccatgacctttcttcttcgtgggagctattaaataggccaagtgaataaccaaaataaacacattaacatacacattttttattttttttgttaatttaattatattaaaaaaataattaaattacctgatgactcacaaaaagttgggatagtagtggaattcggcgggtcctcaccgccaccatctctaccatggtaattgctagcaatatctgcagacatttatactaagaatacaattttctcattaagtatgtaatatattttgtcattaacagtatacatacaatgcagcccaaactagtattagtattaacaatctttcaatttaatcaattaataaaatatgcatcaaactactttcgagaactatctacaaattatcaaaatataatgaactgatgtctaaatcaagaggatgagaattagtttatagaacttatgaaagagagattactacataccaaattagaaacgtttttttttttcttttttcttttttttttcaacctaattaattattagaatgaatgacctataaaatttcaaaaactaaattttattctgatttatcatagaagtaattaaatatatagctaccttttttcttcagtcggtatgctcttgcttattaagcttggacaaccggttctttcccctccagctaatatagctgtagcagctcccaaactaaaaaaaagcttgaaactagttttttctttttttcttatatgtaggttggtcatgtatatgtatatatatatatataatatacatcagaaacttactcaaaaacttttgttaaagttagaaaaatactacattacattaccgtatgcattccacacatctatttttttttaaaaaaaatacaattttgtacatgaacataaaccaacaaaactttagatttcaaattaattcactcataaatttttagtttcttgtatttgcatgaaaatacatgagatttttattgctaagaaaaataccacacaacttaacataacaaaagaattgcaaaccatgttgtatggtaggaaagtttgagacataaaactagatagtagagaccccacattgctcaatgctctcacaaagaaaaacataataataagaaccactttgttccatccatactgctaaattctttcatatatatataatgtctctatagtgttgagttttgtgccctatataaaactcattttaatataatnnnnnnnnntaattaataaagatcagaattcattttatgttgcat

SEQ ID NO: 67118 - DNA, 586 bp, Cannabis sativa
aaaaaaaaataaataaacataattctattccaaaaataataacaaagaaaaaaaataactattaaaaatgacccaaaatttaggctaaaaatagcctaacaccaaggaaattcagaagaaagactacaagttttctcaatacttaagtgtaccaataacaatacccttttggtagtactagacaccacaaatattttttagcatttctctaatatcatagcaaacacgagacttaattgtatcagtagcgatatgactcactaggtagtacttgacaccactaatactttttatcatttctctaatatcatcgtaagctcgatatttaactgtaccaatagtaatgtaactcattagatggtactagacattactaatactttttagcatttttctattctatcgcaagcaaaagtaatgtgtatatatatatatataaattcatataataatatttatcttttagtcaaatttaataatctcaataaattatttttttttatcaagaaaaaaaaacttcattaatcaatagagacaaatacaaacaaatttacacaaacaggccaaccttgaacaactggccaac

SEQ ID NO: 67119 - DNA, 540 bp, Cannabis sativa
taacgttttgaccatttggtgagccttgtacttaggcttaggagagcttaagtacaagtcaatattgcattgtatatatatatatatatattttatggatgtcttactgagtctgttgactcatcaatttgctaccttgtgtaggtaagggtaaggctaaagtagaggaacaatgagtgaagagttcgacattgattgtgcatatcatggtagcgcaacttggagggttccggtcatatcgtattttgtattttgtttttatagtcacatcgggcatatgtgtaaaaaatgttaccataagtgtattttgtatttttcaaacatggattttaaatcttgggatcccgacttataattttatatgcatatatatatatatatataaagttttaattagttttatatcggtaaatcaaaatcaaaataataaggtttatcaggttagagcattacaatttggtatcagagccactaggttgtttactgaaggttgttaagatatgtacaatcaaggtcagagatgagctcaactcacagttc

SEQ ID NO: 67120 - DNA, 823 bp, Cannabis sativa
ttcagacactcagagtgcgtttgtcccagggaggtatatgacagacaacattttgatttctcacgaagtcatgcactacctaaagcgaaaaagaagaggtaaagaaggcttcatggccttgaagcttgatttcagcaaggcttacgacagagtagaatggtcttttcttgaagcggtttcatttaaaatggggttcgaccccaaatggatttttctggttcttcaatgtattacttcagtggagtacttggttattcatggtgggtggaacattggaccaatctttcctacaagaggcattcgacaaggtgacccgttgtcctcttacttgtttttaatttgtgctgaagctttttcatcactaataaaacattatgaggttacacatcagatttaaggcattagagttgctaatggtgctcctttcatctcacatatgttgtttgcggatgatagttatgttttttgtcgagccaatgagaatgattctaccaaggtgttgacattgctcaaagactttgaaagagcttatggacagatggtaaatttctcaaaatcttcagtgttctttagtgccaacactcatactattgatcgaatgcaaatatgtcaaagaatgggcattgttgaagcagatgattctagtctctacttgggattaccgtgcattatcagtaggaataagaaggcagtattcggatttctcaaagacataatgtgtaagcgaattcagagctgggaaggcaagtttttgtcaaaagctggtaaagaactcctactgaaaaccgtggctcaagccctacctaatcatgctatgtcagtg

SEQ ID NO: 67121 - DNA, 1754 bp, Cannabis sativa
aaaggttattagattattaccttatcaattttttttagttcccatcaataggtattacccattaagaagtgttccatttatatatatattgatttgtttgtttatttaagctagataagagtagttgttgtgggtgtttaaccagaaacccatacatggggataccaaaagtaaagttaaaactttagtgcattaattaaaattaaaggatatcgcttcatctaggctattctttttattttatttttaattttccatgttgtaacattttaagttagaggagagagagtaattttctgcctaacaatctatatatcccctttacttttggaagtgagttattctgtttagatgagtgacattgttgttgtggtaacaaggttgtagttaagaggtaatatcattaaataaagaaggtgataaatagaagcaataaggagtggggcttttaggttgaacttgtcataaatgcttgccttgtatttgtgtatataaaagagttgtattccaaaattttcgagtttggtttattattaatattatttaggctatgttagctcaactaaacttttgtggttgaagagaattggtttatagggttgtaacattattgaagcttgcacatgcatcttgtgtggttcctacttcctagacgtactaagtacaataactactaactaggattcagatgttttggaaaagaccttaagatgtaataatatgtcacatggtgttgtgtttaacaccttatcttaaaatgtataggcatttgattggttagaatagatttgaatagagagacttagtcacatagacacgaacacgtcatgaattttatgggtttaaggttgggagaattaggcgtcaaatacaagtcgacacgacacacacaaaataaaaatgagtcaaatacaacacgacccgcacttaatacgaacttaacatgttttttttaaataaaataaaaaaatattgatattaatataactatgtaaaatatatatttagtgatttaatgttgagttgagaaattttaaatttaaagaaatacaaaatattttaaaattttagtttttattgtatatataataataataaataaataaactatatatgcttaagaactatgatatcaaaatggttactctctatttataggatttatattacacttgtatctatcaaaccataattttatgatagacttttggtaattagataaatgttatgagtgtcattgaaatttatcaaaaaataaaaaactatacatatatatatatatatatatatataagttttctaatagaaccttaaatctataattttattcataactacagcttcagtaatagcaaaacgagttaaagtgcgttaacacgaaaacgacatgattttgttaaccttcaaaattactaagtgtaaattttaggatcactagattaatcagaggaaaaatctcaagatacacttgaaaagtgcaaagaagacaagaaaagaggtccatccagcatgatgaaaccccatgcgagaagtcaccccagcaaagggagagaacctgacacgagggggcaagcgtgagttgagccccccgcgtgagaagctccccatgcccaactccccacaaccagccacccgcgcgtgggtgtcctcctcgttccctctctccctcactctccccgcccctctctccctcactctccccgctctcaccctcctctttcatttctcatcttatctttccacacatcactctc

SEQ ID NO: 67122 - DNA, 587 bp, Cannabis sativa
aaatgccttttcttgtagtgagagggcattcatcttcggcctgactctggttttagtctctgtgcttactctaatgccgactgggcatcttgcatagatgatcgtcgttccataggtggatatctggtttttttaggggacaacttgattagctggtatgccaagaaacagcaagttgtggctcgttctagcactgaaagcgagtttcgagcattagctaatgctactgctgagttgaagtggattcgctccttacttgctgaacttcaaattcagctatctcaacctcctgtaatttgggttgataactagagtgccacagccttggctgctaatcctatgtttcatgcacggtctaaacatattaaaatagaccttcacttcgtacgtgatcaaatccttgacaagcaactctatgttcgatatgtgcctgcaatagatcaagctgctgatttattaactaaatccctaactacagacagatttttgtacctcaaagccaaactgaaaatggtgtctacaccatttagtttgaggggggatgttagtactgttagttaaaagatgtacaagctgtagttagttaa

SEQ ID NO: 67123 - DNA, 620 bp, Cannabis sativa
cccataaatttctcataaatcaagaattttagttatatagacacactttatatagaatagatatttttagactaattgtaataaaattttatattaacaattaataatttttagagcttaaaatcttgtcaaaataatttactctaaacatataaaattatatatataattaatgatttggtgtagtattaaaataattaaattatttaataatattgtctgtaggattatttattttaatattataaattttttacattatatattttttacaattattttgaataattaatttaatatatttgtgtaatttatttgagacgataatagttggttttgataaactcaaacaaaatgttttttaagtttattggtttggatttatttcatgtgtaagagattattttttacgcgtgaaatgatagttagactcttaaaattatttttatttttatataagtaattgatttaagaaaagaaataaataaattaacaattaagaaaataaataaataaataaatagaataatagtattttagttttttagtgattgatatatatttacttgctaagaagttcaatatatctacatatacataactgctcaatgattcaattt

SEQ ID NO: 67124 - DNA, 749 bp, Cannabis sativa
aattgttgagttgaagctcaagtttgagagcttaaagtttgtgaatttaagcatgtgttgggctgattatgcaatctggttttcggggtttaatattaaaatttgatgcatgagttatgtttatttgagcatctagtaagtgttagcaactctatttgataatttgaaagtttgcttgagttttgggttgagttggtgttgaattggagcagaaaattcgtgtttgctgctggttttttttgggtttggaacccagatgccacgccatgctctcggcatgccgcggcccgccccttaatggtggaacctgggttttgtcccaggtgcagtggcatggcttgggcaagccgcagcccgccctcaatttcttgggcagtttgagtgcaaactttagaaattcataacttgtgatttcgaactccgatttttgagttctttatatcgttggaaagctcgttccgagctctgtatgattatctgaattttaaatgccatgattaaattttatgagtatggactcaggggttaacccttgttgtaaatcccaaatttgtgtgactaggattaccggcacctgatcaggacccggggattcagaatctctatcaattgcgggacaacagttaagacaatggttagcacatagagtatgcgcagtagtatttatattgaaagtgatatgtatgattatctaataaccgggattagggttattaccctaataagagcggtgtaatagcctagggtta

SEQ ID NO: 67125 - DNA, 713 bp, Cannabis sativa
tgatcaatggaaaaatgctcatcagtcgggcttagatacgtcttggtctgcttatcaagcaggggacggtaatgagcattggtgtccaccacaagttaatagcattaagattaatgtagacggagcgttgttcgaggaaagtagatcctatggccttggttgtgtggctagagactcaaacagcttgcttattgaggggagtacacggttgatacatggtgtggttgaaccaattttggtggatgtcttgggtatcaaagaggtgctcagttgggttaaagaattgaagtggcgacatattatgttagaatttgattgtctttgcgcggtcccagccatttgaagctctttaaatatgaattctgtctttggtttgattgtaaaagattgtaaaagtttgcttgcttctcttacgaatgattctatttcttttgtcaaacgatctgttaatttagtagctcataattttgctaagattgttatcttatttcttgatcgtcgttttaatttagaacatgttccaattgatttgctaccctgtttagtagcgaaagtttcttattaataaaatttctttcattgaaaaaaaaaatgacaaataggctcaattaagtgacagtgttctataaattttcttgtttttctgttcgcacctcttttcagtcaactatttatttctagtttttgttataaatttttgactgaggtatttt

SEQ ID NO: 67126 - DNA, 1175 bp, Cannabis sativa
ccacgatatagagcacaaaattatcaagatgtaatggccatttgtaaatgggcaggatatcccaatttgttcttaactttcatttgcaacccaaaatggccataaataaatgatatgctcaatttaattggacagaaagatgatgagaattgggttgatatcatatgtaaagtctttcagataaagttatttcagcttatgcaagacctcaaacaagaacaaccgtttaaaaaaataattgcatgttagttttcttagttatcatatccacctaaaataaatttattatacacaatatttatttacaactttcaacaaaatcactaaaaatttatttttcttttttacaaattgtcacaggtgtctacacaattgagttccaaaaaagaggtttacctcatgcacacatactacttttcttggatcgaacaacaaaaaatccttcagcagcccatattgacaaaatagtaagtgcagaaatcccagacatcaatgtcgaccctgatgactataatgtagtaaaaaagtttatgattcatagaccatgtggaaagctcaatgcaaattctccatgtatgatgaatgacaagtgcacgaaacatttccccaaaaaattcaatgatcaaactacaatcgacatagatgacttttcaatctacaaaaagagaaatacaggtactcaaaaattgtaattacaaaatttagaattcacatttagttaattatataccattttaacaattgtgattttaaaaattcgtgagatacgctataatattattattctttagaaatactatacttattttcatcaattcatttaaaaaattcaaattcttttatagaggtattcatgttgaaaagaaacatatcttattagataatcgttacgtggtcccttatcgtagaaacttaatagtcaaattcgatgcacatattaatgtcgagctttggaattactcaagatccatcaaatatcttttcaagtatgtccataaagggtctgacataataactacaacaatggaatctatcgacaccactgaagagatagacaagattaaaatatatcttgactacagatacatatcaacaattgaagcttgctggagaatcttccaattcgacatacattatcgaaagccatcagctgaaagattgtcgttccatttacc

SEQ ID NO: 67127 - DNA, 1524 bp, Cannabis sativa
aacatatagttattcacaattgtaatgatgtcatcatagtggaaataattgttattatatgcttcaaattatttagtctcacgatttatcagtgcactcaatttacactgacgtgatattagtgataaagtttacttaaacttatctgagtgaaatatctttcccaaggcattagtaaactaaaccaggatttgatgtgtcggctatacatcaaactagaccgatattaataagggaaaatatattataaacttgctattacatcttttctcagtccatatcaattatttgatcatagatcatttgatctcaatcctgagatggttacgagtaggatttgcctaatacttacatcttgggaatacggtagttcaattcagtgggagtgttaatcatagttgcggaatctatagcttctataactatttagaagtgaaacgatgatttccttaaagcttggcttaacgcaataaatgatagagtgctcagtttgataattatattagtttcccaaaatatcatttacaagagtagctaagtgttttaaggatgaaatacattgaagggtaaaatagtaattttgtctctactcaatgtaaatcatatatagaggatcaataattgttatgattgaatcatggataatttttagtgtatctatgtttggcatatagagcgttctatgtaatcaagagtgtaattctgaatctatagcagaattacgaggaattaataagataagaaatttactcgataaattttagatctacttagtaggagcttgactacataggcccatgatctccatattttttgggataatatcatcttttagactcaactaattgatttaataagtcaattagaattcgaaaatagactatgtcatatttgagaattttcaccaagcttggataatattgagaagaaaaaagaaatagggattaatttgttaattagtatactttgtgggtctaattgataaatatatttaaattctattttatttactaattattaaaataaagttagtatttaaataattaaatgagataaatggtgaaatagaaaaatacactttagattcattaatttaaataaagtagtaaaaatataactctaaagcccataatatattcagtgttgtgagttagatatcagctcaagtttttattttagtccatctcatcaaaacctagccctatgtgaatgcctatataaagaaagagaagagaattgaagaaacttaatgtcatttcttcttcttctctttatttttttaaaattataagcaataactctctaaaatatttattccaatggtgcttgagtataaactcacactattcaaggtgaaactcaaaattttgtggaagattgtaatgaatacattcgaaggaagagaagattatagttaaattcttggcaatatttcacgatagaaaagatcaagggttagagaactgaacagaaggagacaacatattccactgaaaccactgtaatgatttcttaatcccttta

SEQ ID NO: 67128 - DNA, 534 bp, Cannabis sativa
cttcagccaaaaacgggtcgggctcaccataagttttaaccgccaaagcatcaatgaataaaccattatgatctcgagcaatccaacccaaaccgatactattgtcatcctcaaagatagcaacatcacaattaacctttatcgcaccaaaacgaggtttagcccattgctcacacccagttgtattctgaccagaaactggcgaaacaactctattttccagctgagcattcttccaagaattaagataagtaattacagcattcaccaccctctctatcgacaaagtcttattactccaaaccaagtcattacgagctccccaaactccccaaagaagcatagcaagcctctcaatacgttccatacgttgaaccttacaaacattatcaaaccagctaccaaaaacagcagcttcaccccctccaattgtccctcccaaccccctgtcaagacaactcttagtaaaagagcagctaaccattatataaaaaattgtctcatcctcccggttacacatcggacacaatccgc

SEQ ID NO: 67129 - DNA, 718 bp, Cannabis sativa
atggttaatagtttttcatccaatgttaacagtttttttggggtttttacaccacatataatgaaatttcttactttttttttctttttattgcgaagcagaatttttttcaaaaatattgtgtactttgttatatttttattgttgttccacggttgttttttagttgttctacttttagttttaattgttctattttgttgttttatggttgttttacaaaaatatagtatttttgtaaaacaatttgtgtgatagtaaaattataattttttacctaaaattcagtatttttgtaaaaccttatattttttgctcaaaaaaccaactatgggctcttatcaaaatgattcacttcttggctattcagttgagcaaattcttagtttatcaatttataaacataatttcctttgatagttctggaaattatcaaatatacctaaatttcagaaaaggaaaatactaaaataccgaatttggaaagatataaaaatatggagggggtgaaatagtacgaggaaattacactatatttaatttttacctgtattttaatttatttttatttttacacagttttatagatcatatcttagagattctaatttcgataagttataccagattatatttagtactttgattataaaaaatggtatttatcaattaaaattactttaaaattatatttcgttaatgtataataagaagaata

SEQ ID NO: 67130 - DNA, 1149 bp, Cannabis sativa
tcttaaaattttgtaggatatcttaaataactataagagaccatgagaaaaaatttgactaaaaaattatttcgggtgctaaaacagatgagagtgcatcaatgtaactattttaaggaggtgcattgtagaattttcctatattatattctcctaacataatttgaaaaatctaataaatcaattttacaccattatatattttccaactagatagttataaactctggattattaaaaaaaaacgcacaccacagtacgtaagtaatgaacatttcgactccaatttaactaaataattatatatatgatatgtatacatttacatactatacatacatcaatcgatataattattattatattttctcttcatttaaaaaatcaatatgtacacttctgcaatatataaatatatatatatatttatttacttatataagttttgagcaacctgtacgtagtggcgtccttctcggccttttttgttttttttttttttaatctaacttttcatttttcaaaaaggtaattggcatttcagttagcaaatatagcgattataatttatatataaaggtaatatatattaaatgaatgatgattaaaaataaccttttaataaaattaataaataataaaggttaattttaagaggatttttttttaaatttgaatggtacgtaaaaataggctgtagagttttgaatcagtttaagtttaaaaatatctatgaacaaacattttcaaaaaataataaactaatttttaaatttataggaatacgaatacaactctctataaaaactgtgttatcactttcacttttcatagttagtaaaaaacaaaaacaaaagcaaaatgaagatattatcaatgtttgtagcttttttgctatgtttatcatgggtaaatcccattctaggaattagatggcctaattttcctgggattggttctccaggaggatcatcaccaagtccaccatcattcccatcatggccacatcccttttttccaagtccaagtcctccttctggaggctcttctccaagcccacctactttccaatggccaccacactttccaagcccaccatctggaggatcatcaccaagtccacctgctttccaatggccgccacacttt

SEQ ID NO: 67131 - DNA, 907 bp, Cannabis sativa
  modified_base (862)..(867): a, c, t, g, unknown or other
ctttaagcattgccccctgccatacgcagcatagtatatggtccctctaagggaccacttagagtatcaaagcttgtaaaaaaattccattaggataaatacattcaatataaaagggggttttagaaaccatgtatatcgggaggttatcattttaatacaaagcttactaagcacttcagactttctctctaaattcaattaatctcactccatagtccatacttcataattttctcaattcataactcaaggtttcagagcataatatcattgacaagtttttatggttaatagtttggtaccgtctatgagaaagacgaagtcctagctatgtttttctcttagaatcctccattatcactccaacatggcaaggcattcaaggcatctccaagacattaaattccacttggaaggaaaccaattagttgtctatggccccaaccgttggagaaaaccaaggcgaggtcaatctgggtggaggacaccatattatagatggaggcaatcacgagggaaacaaccctgataataacaaccaaggtcaaggagacccacctacaaggaggacactcatatctctggtccacagaatataaccaagtccatacaatggaagaacacatagacatgcaaggtgaggctacaccgtccctaacgtatcccatcacaaaagacctaaggtcaccaaggcatccatcttcgatacaataccctttgttgcatgtcccataagacctgagtactttgtttcaccagcccaagaaggagaaataggtttacttagtgagttctatctcacaaattcatcctcatgtggaagaaatgaatgacctatgtgttaggttttatgccctannnnnnactccatttcaatgtaatctattcaacatcaataaagaaa

SEQ ID NO: 67132 - DNA, 908 bp, Cannabis sativa
atatttattgtattttaaatttgaattattttttatcacactattaaatatttgtttttattaggttatgttttagttttgtataataaaaatgtgtatataattcaaacaacatataacataaaagtaaatgaataaacttagcaagtagatagtacatacatactcaataagactaaataattgacttcaaatgacagtgattagtgtttggtaattggtttattttaatttttatttatatatatagtgtaagtggcatagtactttagagacattaagctactaagttttcaatataaaatgaaaataaacatcatggtggcaagacttttagagtccttttgtgaccatttaataaggtttgaaagtagaaaaggagtataataattgtaaattagagtagagttgggaatcgtgattggaagaaacctcgatggattagaataaaactgattctccacgagtttatgtctcccaaagcaatcatacatcataatgtgaagttgtgaaacgctccctttctaatttctatcataataaatacaataattaatattttttatcataaatttttgaaagtacttaattttttcatttaaaatatacggcttgttaaaaattttttataaattataaaaattacataattgagtaaatggcggtaaaaccccaaaacttttattttagtttcacttaatcccaaaacctaaatttgggcggtaaaacccccaatactcgtgttctgttagcaatttaacacttctgtctaaatttagctgttaagtgccatgttagattgtccatgtggacataatatacacgtgacacaattttataggcccacgtaaataattatattaaaaaaaataaaaaaaaaaaagatatttttttttctttaaaatcat

SEQ ID NO: 67133 - DNA, 875 bp, Cannabis sativa
taggatgttagattatagattaaactcaaacatacatgactagtaaatctagatcatggtaaaataagtcccaacaatgttaacctaggtgatgggcttagggttttcccctcctgggcatggtttgcaaaactcatctcatagcgtcgttccttgttggatttgaggaatcgcgatgcaaagaaattttcaaaaagccaagctctgggtgccctagcaccctagattggaagtgttccaacattggttctgggcttgtaactttcttgtggcatgtctctcatgtgtttgagtgcaaatgttgggcagctttcacagagataatggcttcggagaccaaaattgatgcattatagagcacataattgtcaacttgggcgttgggcaaggccccagacaccaaattgatctccaagatgtcaaggtgaaatccttagcttctaggtccattatttgttgtcttcttgacttgttagcttagaattttgaaagatggaacttttaaaaacgacttcgtaggatccaagtacctacttggatgcctccttatgtcaacatgggccctgggctaaggctcagctctcacgttgactgccctatcttgggatgcaaagctccaggattatttttcttcttaccatgtgtcgaaaatgatgtctacattattagaactagtttccaggtaaatgttagccatttgttgctttaggtgctatttatagagataaatgagaccaaaaaattagctttttaagtttcgagcacaatcaaaaagaatctcacccatgtggctattttacagctaatgaaattatgatatttcattacttttatttaggtgtgaagcatagaattataagtgattttgtttcatg

SEQ ID NO: 67134 - DNA, 1205 bp, Cannabis sativa
ttttgttcgtcgttaaaagtaaaaatgtgaccaaaaccttcttattctcccggcctttgccataacttttttacttttagtcacaaattttattgtgggaatgctgggagcaacattagtgacagcaggagctgctgcagcagtagaagagataagattggtgtacaggatgtgccataggcagttctggtgtgagaacggtgacttgaagttgcagatgatgaggcctggtttgcatcattaggtgaagttccttaatttgtagggccagatcatgagaagtggcactgctttctggttcctaaaaagtgtgatctccaactctctcaaccatattgttattagttgaaacaagtatagttgagtgaggagggaacacattgttatcattagtaggaaataagcatgcaacagtataatggacaatgtatggtaggtattttatttgttatgctagactcagtttgtgtggatgggaatgatgtaggattttgctgctgatattaaggaaaagtgaattcatcaaatataacatctcgagagatgtataacctgccagattgatcaaggcaagttatcgcctatgaatgtgcatggagatgatctaaactctagcttgtgcttgttatatggtcaaatatttggaaaacaagtacaacctaacactttgagagtagaataacctggtgtgatattgaacatcccttcaataggggattttagagagagaacaagtataggaagcctactatgttgagtaggagtatgtgaaattttttaaggggaagcaacctttgctttctttttaggaggagcacgatcacgtttgacagctgagagcaaaattctcgtcatcgtcattaacaacaggacgtttctccttattcctattagctatagattttaaacttatttttgaatttttctttggcacaggggaacgggtggatgaagaacgagtaataactatatttatatatagattaagagcaataaaaagagagaaaaaatagatatgtaaatcggttaatgtgagttaaaaaaaatggaagaaaagaaagaaaatgaaaaacgggttgaattaatgaacaatctaatatctgaacgggttggattatacatataagcacacgtcgattaattgattggcaatcataatagtaatctaatatctaagcattttcaacaatcttcgtgtctcttat

SEQ ID NO: 67135 - DNA, 1432 bp, Cannabis sativa
ctatttctagatttatgtataattgggtagcacttgttgaagaaaaacttttttcacctatttatagtaattgtgaaatcatgtaaattatatttgaaagacagtaaaaatttttttgatgtaatatttagacgaacatatagtaatgaccttgaaattgtttaatttttgtagaagttactatcacaataaaagggccctcatcttttttctacacattcgtatcaaacatctccgccaacttactgcataaagtattttttgaagtgattgagctgtaaaaacaggtaaaaatacaaaaatatgttaatactaaaacaaattatgaaacacttttaaaaaatttataataacaaaaaatgatatagactatgaaagtttaattaaacttactaatctgttataacttttaggtctctttttttccaacctccactaataatttcaaggtctctcacaccacataaacatccaacaatatctaacaacaacaaccaaaaatgacataaagatatctgaatatgaagacttaaaaaattaaatcacacaccacatagaaaagttaaacttcatataaatacctgagaggattgtgtggtcattaacacgtgaatcaatcaaattttgagctatgaattgaaatccatgagttggaatcttaatgcttccttcttctaacttcatcactaaagtataacgatgaaaaataatttttcacgcagttgaaacaggtctatactctcctgtacttgcagtaaccttgaaatccttcacactatataaaaaaccctcactcaaaagattcttaaatttggagacaaaaatctttcgaattgtagcatgcataacatttttcagtaacgaataaacttattacattaagaataaaataatataaaataaaataaacaaataatttgaccaaactatttatatataccttttcatcaataaaaatcatgtcaatactaattaattcatcattcttcttagtgttagtagactcccacattgtaaaaattgtaatttttctccataatacaaattgtacattatacttcacaaataatagtggaagaatggatatgggtaaaaaagaaacaaacaaaacactttttaaatagaagaccatctagtagaaataaattattaattatgtatcaaattataaaactgttatgattctttttctaaagtaaatattacataattcataattacacacaataaaactataataattattactaatcataaattaaattaaaatattgatagaattcctcttgcccctatagttagtaagaaaattttaatgaacaaaaaaaataaataagtgaaggaaaaatagttgaaataataattataaattatattataataataataataacaaatgaaaaagacactattaatatgtatttaataatag

SEQ ID NO: 67136 - DNA, 826 bp, Cannabis sativa
gtttatgttttgtaattaattgtagtttctcaatgtgtctcttcatgtgaagattatatcacacataaagtgtattgatgattaattcaaaatcagttataatatataatgtatagttttttttacctacaattgcacatatctaacacattctttccaccatcactctttgcaatctcaattttatttttagcatttaaagcaaaactcaaatcaattttttctctttatctctttcactcctcaatctctctctcaaccaagtcatgcatagtcaccacaagcacaaggaaaggaagatgactctttgtttcttattctctctctcacacccagcatataattactaaaaaggtaactatgttaatcataaatttgcttattaatcaatacatttttgttatggtctacttagtttagttctatttagtttatatatcagttgagtcattatatattcatattacaataattagtcaattcattttttattggtaaattttattttagtgggagattttaggagctggggggcgtcatagctatgcccatggcctcaagtttaggggtcaagtcctcttctatgattcactctcttatttgtggtgctaattttcttaattgtcatattagcatattgtatttcattttattcttcctccttgttatagaatcatgataattcagtttatagtaattagatctgtttgtgtattttgtatttgatcgctagttgttaaataaatatttgacaaaagtaattttcttttcacctctaatgttgttacatggtcatttatgatttttttaaatcacaactcttaaa

SEQ ID NO: 67137 - DNA, 3007 bp, Cannabis sativa
accaataaaattgtgtcacgtgttccaccatggcagttaacagccaaaaagggatggaaagggctaaatgctaacagaattttagaggttttaccaccaaaattttagaatttgggattagttgcaaaaatctaaccacttaaggaggttatgccgcaaataactcttatattaactgagaagattgtaataaaaaattgtaattatcactacattatttatattaaggttaaaggaatggaaagttattcgagggagaaccaaaaatgttgtccacagaaagacacattcttcttccacaaccttgtcaccatgttaaagtgggtaccattttaattttcgatgagaatataataataatatgttttaaattattttaaatgagtaacttgcggcttaaatacttaagtttaacccccatttatttaagtttaatttttgacgataataatacctaagttatatttctaaaaatctgtaggtacctgaacgtaaaatttcaagttattatcacgtatcatttttttattagtacatataaattattttttaaaaaaaaattaaaaatttataacttgaaccaattagtaattgccatgtgataatttacttaatatttaacaactaggtacctacaaaattccaaaaatataacttaagtattattgccgctaaaaattaaacttaagtatttatttgcaactgggagttaaacttaagtatttatgtcgcaaattaccctattttaaatttaaatcataaatacatataaaactgatattttaaaaagaacatctaatccttcatgtattactaactatactaacaaagagattcacactgttacaagatagtagcatatctactaaaacaaaattctcaagtacaaaaggcacaaacattaacactattccaaatccactacaaatgttgacttaatcaatgtaaaatcccttaaatcaccatctctcctgcaaccaaacataaaaataaacgtgaagatccaatcaatagggagaattagtagacatattggtgtttcgatttaaatgcaaccaaacaaaagaaataagacaaacgccaccttaatttccatggcaatcgtattagattaacaaccatattgaagcttaccgaatcactgttgttgctgttgattttgctgattttgagggtttggaggaggaggcattcccgggcggggcggtccaaacacaggaacgccaccaccaggaggaggcggcatcccaggacgaggaggcggtgcctgcattccgggcctgggtggagcaggtggtcctctcatcatctgaccaggaggaggaggtcccatgggccgttgcccaaactgaggtggtgggcctggaaactgcggtggcccaccaggcctaccaccaaactgtggcggcccacctgggggagggccacgtgccattggaggcggaccctgaccgggatagccaggcatctgaccaggcggccgaataacaggagcaggatacgacattggcggagcagcaaggttcgggacaggaggacgagatatctgtggctgcatcatgcctggagcagggccaccaacgccacgcactggaccagaaagtccaggctgggcttgagcaaggggtgcagtgggtacaccacggcctgcagcacgaccaattccaggcccagccaatgctgcagcattagcagctttagctcgggactcttcctgcggaggtgggccttctacagtcatggaaatgacctcttccccacggaggagaaccaaacctagggtgcggcgatcttcgcgttcctcgttggtcttctttcccttggccggaggaagcttgcgaaactcctcacagtcaccgaggacaaggttcatgtggcggtcgaaagccatgaacttgccaacaagctggcgaccatcctggatgctcaccctcatgcggtagttgatgtactggagcatcttagagctcttagacatcgacattgttgccgagtctgagtgagaatcaacaacgttttcgaaatcctgagaattgaactgagagtggacattaacattataacatttcaaactaaaattataaataaaacccattcacaaaaaccttacagcatattaccataaaaatccaataaagaaatttcatagatagaaacattatttcaacaactatactcactactcaaagaaacaaaatcagattatcatatccagcacttagtagaaactaacaacaattgttcacaaattctctaaacaggttattagttggtagctattcaatcaagtattgtcaattttggttgaaaacttcactaaacaggttattaataggtaaccattcaatgaagtattgttccacttacttgtttctataacacaaacacaataaccacaaaatgtgattcatatgagagaagcagaatttttgtaatcacattaaaccaaaatcataaaattatgaatgtttcttaggtttgaaatggaaaaaaattgagaacaaaatctccgaaccaaccagattagaacaaaatctcgtatatatacgaatcttagaactaaggatgccattgccaatgatgaattatattctaaatattgagaaaagtcgaacaaaccaacaaagtttcgatagtacatgcaacaatactgagaattctataaggatatcacagaaatctaagaggtgaaaatatgaattaccttggcgatggagagtggagaagagagagagaagagagagagaggttctctggtgtgagaagtaggttttcagtcttctgccactgccagtgatgaaaccctaattcagttgggcccatatattgggcttatcatattagacagatgatatttttgaaaattaattgggctgggcccttgagcgggactgataattacatagaacactattatgaaatgggaaattttatttacactccaaaactttttaaaggcacctcattttaataattttaatttaatataaaatttatatctttaatt

SEQ ID NO: 67138 - DNA, 731 bp, Cannabis sativa
gcagttagcgtggccttagtacgggaagaagaaaaaactcagcatcccgtgtactatttcagcaagcgcatgatagggcggagacacgatacctggtgatcgagaaactagttttttttgcctcctaatggcctcgagaaagttgagaccttacttccaggttcacccaatcaaagtattaaccaaccacccgctccgacaagtcctacgaaaattggaggcttccgggagacttctcaaatgggctatggagctaagccaatttgatctacactacattcctcgcacctccataaaaggacaagcgttagcggacttcattactgagtgtcacgaggcagaagctaacgagagcatacctacaacgcaagccccggcatggaaggtatttgtggatgacgcctccaacgagaatggatccggagcaggggtagcgatgatatcccagaacggacttcgactccaggcagccctacagtttgaattcacagcttctaacaatgagactgaatacgaagccctaatagcaggactgagattagcaaaagtcgtgggggccaaaagagtggaagtctacagccattcacaactggtagtaaaccaggtgtcggcagaatatatatcagactcgcagagaaaagatggatgtatacgtagcgatagtcagggagctgctccacgagttcgcagactacaaaatagaaaggatccctagagaaaagaacgctcac

SEQ ID NO: 67139 - DNA, 1647 bp, Cannabis sativa
gcatttttaacaattgaaaggatggaaaagatataaattagcagtgatcaacaaaatgatgtgatgattggtctgccaactgtaaagatctccttttctgttggcttcatgctcttttcttttcgtttcttaatccagatatacgaaagaaataaatttggttgttcaagttttgttgattagacaagatatatatgagtgtgacatcgattgtgaaagcaaatggatgttggtaaagttcttaaattgttacatctggagagataaatatcaaagattcaagcaggtcaattacaattacgtctcctagctataattgttatttattttgcaaagaatataacctagttgaggaaagtgaagagaaagtggagatcatttttttattgtttttggtataagcggaaagaaaaaaaatatcactcgtctttttgatacaaaagtaatagatggaagtagctaatgttccgtgttattcataataatatgttatattgcttagaatctttatatatgtgttctttctctgcctgctgtaatttgtccaatcttagaaggatacatattgtggattgattggtgacatcaaatctgtacttctattctgattatcctctgccataatccctccctatgatacaaccataaataaatatcaaaatccacctactaatttctcagtccatctccttcacttttcctgccaaacatagcctaatacattatacagtatattttgcatgagaattctcaattattagtgcatgtatatatgtaagttataaaacaatatgctattaacatgcctagcttcttcccttttttgaatacgttctgttactgtgaaattcttgcagggatggaaatggcacaactaatttgtggaggctgcaggacgttgttaatgtatacacgtggagcaacaagtgttagatgctcatgctgccatactgtgaatcttgcaccaggtgcggtatatagtatagtgcttaagtagtgaaatttgtttctttgtagcatgacatggcaaaaagatattcttattgcctgaatgatatgaacttcacacagtgtttaaatagaattgaaactttgtatcaatcgatgagataaaatacaaattaaaaggaacatgtgaaacacatggtgataagtgataaatgaacctgaaaaccgctaaaaacacacaataatcagagaaagaaagacagcaaaattacaagatattagtccattatttgttaaagtctaagatagagagtccctcaaatcttttggatttataatcccaagtttttatttttgcaagaattataatcgcaagttgctacccagaatttatcttttcccagagtttttcttttgattcatctctgttgtcaatattctgctgcttctgtccagccgcacagcccaaaaaatggtcagtactgctgctgtccacaaagatgaggcccgtctatctcctttaagcttacaacacttcattcagttttctgtaccggaaattctgatcatacatttttggactcattggacatgttctttaaagtagcagttatcctggaagcataacatcatttacaacttaaaattgttatttttttgcaaaaaaatattatcagatgataataggcagaagaacat

SEQ ID NO: 67140 - DNA, 543 bp, Cannabis sativa
tagatttactactgcttagttaggtaaagtaaaagagttaagagttaattattgagcgcttcaccttgattacatgtaatatggatattaggataattgattgcttcaactttatctgtgggattaatagtttgattagaaattgaaattacattcatgaataggaattaggaacgattgttgagggtggggaataacctttaattagtttctcatgtcagagtcccaattttaatttgtcttttttttatttatgatatttttcttctaaatataaaaacctctttttctaacttctgtcactaatttttgagtaattaaataaacatagtactcgtgggatcgacccttacatacaattatactaaaataattagaggcattagaaataaatattagtaaatttgttgtggcttacgatacgcatcaaatttttggcatcgttgccggggactattgttttattttattatttatatttaatttttgttactaagttgttcttctagttgtggtttaaatttttagatctttctttagaaa

SEQ ID NO: 67141 - DNA, 1315 bp, Cannabis sativa
aattactagttagtaactaactatagtatactaaatataatttgtaactaaccagtaactaattttactctaaattactaactatataataatcggtgctcctcacacattcataatttatttataacaaaaattaacaaaagatcctaccaaccatgtttaagagaaacttatatcaaataattttatcctataactactgatatttcgacaacataagggttataattgaacattcccaaaaaatttaaagttattaataacaacaaaaaataatctaaaataagataaaacaagtgatgatgacttagataatttctaattatcattgcattttccattaatactttaattcaagttttatgagtcaagtgttttctaggataatggaatttagggttctagttctagaagcataatatctttactttagtttaagttttatgatacatcaaatgatatgtttaaattttatgtgacattttattcatccttaggtattctaaaatattattcaatataatttgtgagacttacacgtcaaacgcctgaagacttacgaaattaataactagtaactaagtatattatactaaattactaactagtaactagtcctaattttaccgaaatttcagtagcataacgactataattgaacgtttcccaaaaatttaaagctattaataacaacaaaacacaatttaaaataatataaaacaatcacaaaacttttaacaatacaaaaatttaccacccatccgaccacaatatatgtatccgtagaacctacttcactacagatgaatatgtaagatattcaaactcatctaacatgcatattatcgcacccatttgaccgcaatacaatatatcgcagaacctacttcactacggataaatacttaagatattcaaactctactacatactacaccctctatctacaaacaccatccaaaaacactttttagagaattttctatgaataaaaataaaaaataatgtttctcatgaccataacgttcttggtgttcttcataaaagtaagaacacctaatgtcacaataccaaaagtggggtattactagtccaaatttcatgaaatcaaagccaaaattgggttacccaaagcctacactacacatcacaagcatcaaaaaataagattttttcgagagttaacattttacttacccattacaaaaattacaacccgagaacacaggaaataccgccaagaggctcacatgcaccatcacagcttggaattttcttctcaaatttttagtttccacaagggagctaattatct

SEQ ID NO: 67142 - DNA, 4344 bp, Cannabis sativa
aaaaacgacatgtcgtacaagcctgtaaagtcaagtcaaaataccgtggtccctcaaacgacataccgtttagggagctcaattccgggtcgggtcccgtattgtcttcggatcatctataaaacgaggacgagataaagagaaagccaacagagacttctggaacttcgataaaaagtcaatagagaactagttttctctcttccctgagctttgaccctaaggccgacccaccatcatcatcgctcttttctctcaggttcgttttcatgcctgctttagggtttagggtgtttttccctttttttctaatggtgaaagtatgatcttttgattcaatttggttgttttggtattctttttgggctttcttgaatttcatatctgtaaacaatttcttttaccagcttagtagccctcttttctttctagggtttgtattttagatttcttttctagtggaagatagtaaggaaaactggcaaattatgaatttaggtttagggtttgcaggattataaagcttggaagttgattgttgataattttctgatatgtctgtgcttttagggtttgttttcccttttttttctaatggggtaaaagtatgatcttttgattcaatttcgtagtttttgatttctattttggctttcttgaatttcatttatgcaaacaatttctttactttattttctagggtttatggtttagatttcttgcccaagactagggttaaagcttaattacttttctagtggaagatagtaaagaaaactagcaaattatgagtttttatttgtaattggtttaggtttagagtttgcaggattaaaaagcttgggaattgaatatagataattttctgatgtgtctgctttagggtttgttttccctttttttcaatgttaaaagtttaaccttgtaattcaatttcgtagtttggtgttcttttttggctttcttgaatttcattttgaaaattacttttctagttatgtttttttatttttaaagttgaagatagtaaagaaagctagcaaattatgagttttttttttttatttgcttgatttaggattaaaaagattggaaattgatatctaaaaattttatgttgtttttcccagagatttaacacacttggtgggagctgttgaggtcggttcttttgaattaagactctcattcttttccaaataaggtaagagacgaagcaaattgtttaagttcatatcggctgaattactctttgttataggatttctcagtccatataagttttaacatctttcttagctacccatcaattgttcataattcaaacccatatcagtaatcttattgaagaaccaagatgctcaattttccaaaacccttttctgaaaatgttcttatgacaaagccctttgtcaattatcaatatatttgattagtgataaactttatttagtgttctcttattttgtatctttctatcaactaagactgttttagctgttgtgactttaattctgtcatgaatttgtttattatcatagttatattatttgtttgagggttctagctttgatttttctcttcttaaagtaatgctttttaataaccgaaattaaaatttttgggcgatagaactaacagtgttttttctcttttgtgagatgcaattccggctatcatcaaacataatgcagatattctactggtttttttatttaaatggacaccaagaaattcatccagctggttgaggaaaagaagaaacgagctttggagaagatggaagccccgttgaaatgggagcaaaaattggaagctgctatgaagacaagggctgatgctgatgccaaagagagaaaaacgaaggtgaagcataaaagacgatctgtatcgaagtctgattcggagacagacagtgactcggatagtagcgatggggggaggaagtctagcaaaagaaaccatcacaagaagcaccggaagcatgcccactctgaagagaagaaatcgaagagaaaatcaaagagacgatctttgagtcccagtagcagcagcagcagtgaagaatatgattattattctgaagaagataggaagaggaagaagcgaagccacaagaaacataggcatcacgattccaattccgattcttcaagtggtgaggatgatgaagtaagtaggaagagaagtcatggtaagcgccacagacatcatcacagatcagatttcggtgctcgtgatttatctagcgatgaggaaaatggcagaatgcgaaagagaagacacacgaagcagcatcataaacaccatcgccattcagactccacctcttctgattcttggagttacgaggatgatgcaactaagatcgagaaaaaacatcataaacatcatcgacgttcccacagtgttgactcagatgcccacggacacaagagagcacatcatcacaagcatcactcgcatcatcacaaactcagccccgagaagaaacttcaaaccgaaattaatgaagacagaaatggcactactaatgaaattgctcccgaggttctaggatgaagtgaatacagtagtgaatttctcaggcttctttctgatttaccattaagtcaaatagtaaactgataaaactatctataaccctatcatttgtcttgcaatcaagatgattgacattttttttctttatttagtttacttggattcatctgatttctaccaaaatttaaccatgctacttagctttttctggattgatcatataaattcctttattttgtatagagaaatgctaagatggtgtaatgttattggtgcaaatcaatataagaaactaccacaggcactataagcattgttctttttgaatacttgtattgattcataaagattgtcaccaaataaaggtgaaatttggtagtgtgtgcaaaaaatatgattgtaggaaaaggtaaaattggaaaattcaattatacaatgatttctacattgatgaaaactattggcattgtaggccactcactagccacactactataacttcataatgtaaagttctaactcttaatattaagattccttattgtgatttccgagctgagatatattctatactcaacatttggaacaaataaatactactataacaataagacacatttttggatggtcaaaaattttttagtattttgtcagttgatacaccctcttcaacaagaattgaggtaatttcctgcaaaatccaaagagaaaaaaggtaaattagatattaattgtgtttctttaataaagaagaaatggtaaaagagaaacccattaaccctttatattatcaccacaacataactgaatgaaactacttaatgtgaacattgaagaaataggttaacaaagttttaaaaaaataaagcataatcagaaatctaatttgatgataacccaacaaattgtagaccattcaagtgtttaataggtaataaaaaggaaaatattttccacaagttcataaaattttcttacaatttccatttttgttagaaaccaaacaagagataatggaattcatcctaaaagaatctctccttatcttgttgtaacccccatgcaaattccctggtaatgtcagcatttttgttttcaattttcactgaccaaattgatttctctagtcacttttgccaatatataaatgaaatattattatagatggttaaatctatagactacaactaagaaaagatagaagatttgggcgcactcatctttaagcacttgtaaaaaactcggttttcgtaccccccctataccccgcaccaacttgagactcaccaacaagaagcagaaacaaaaatcaaccaaaagcgaaacaaagacaaacctctgtcatctgcttctgtccacagagtactaccccagtggagcgagggttaaaaatttgcttggctcttttaaaagctgcctgcaaacgcagtcaaaataacaaagtgttaatttgttcatgaaattaaattaagaccgaaaatcttcaaatggaaagcatgatttatcatagtcatacctgcacataaccagtttcacctttccaatcatcacctggttgtgataaaactggcaccacactaacaccagaagattcccactccttaaatctatcctgtatgaagatgaattgaaattttaaaaccatattccactaagcagaccaaccatgctgattcaacaaaaagaaaaaaaaaacttttgatgaacctgataagccattctctgaaggtttcttgccccataatataatctgacatcagatcggttgccagcactaaatcctgactctatcagagaccg

SEQ ID NO: 67143 - DNA, 1008 bp, Cannabis sativa
tataaaataatcttaatttactttatgcaactatgatgatcgtatatatattattttgttaataatttattctataaaattattttactaatacaaaattttataaagattatttttacataacagattttctcttttttttttccgcttctatttaattaattttttttttgaaatgatgtttagttaattaaatatattattaaaagtataaatttaaatcatataaagaaaagtattttagttatttattttgaaagatggaataaaatagttgtagaatagaagtgctcttttattacacaaacacaaaaatgagtattactgttggagagaaaaatggaaattttaaacaccaataaaattattaattgatttttctaaaatgagttttacatcaatttttctttattctcaccaaactaagaattctttgatttttgtaaactaaatttgggtaagccaataacacgcacatgtttgcagtacctaaaataagattcacccttatcttaagctaatgcaatttccaataattttgatagaaattatttgtttatttatttttttaacaaatatagggtaagtgcagtagaatgcttttccaaaaaaaaaaaagtgtagctggatgggatttcgtgcaagatcctagtattttgctatgcatgtatcacattgcacatctctaatcagtaatcacattctcttctcaagaatctgaaacaaaaaggtaaaagcttttcaagtcacaaatatttgagctccaatttttctttttgaaaatttccagaacatataggaatttgattgtattttcttcatctttgaagactcttttcttcttttaccgattggtgtttattcattgttttttattcgcggtctaattccatcaaacctcaacatagttggtttttttatgtaataaggcctctcacatgggttttgtgttattattcagaagaaaatgggaatggaagaaaaattctttgttcttaacacgggagc

SEQ ID NO: 67144 - DNA, 576 bp, Cannabis sativa
aaaaataaaaaaattcctaaaaattattagtaaatatttatttatttttgtataaagtaatttgaacgtaaatacctaaggtgacgtttagtttactaaaatgtaattgtaatggtaataggaatagtaataaaatgtaatacgattaccatgtttggcttattttataatggacattgtaattagtttttttatttggtttagtataaaactaaaattgaataattaatgtattgactaaaatgtcctcattttatttattgttaactacatttggtaaagagataagagagagagaagggtataaaagtctttttgtaatatattggtaattgtaatcctcattcatgagttatatctatgtaatgagaattcatgcaactcgtgtaatgctcattataatgtaaagagattacaaaagttaaaaggctcaaccaaacattctaattgtaatctctattacattccaatcttgattacaccaaagcaaacatgttataagtttaactcgcaaacgagtcaggtcattctctaaagaatggttgcctatttgccttgattgcatttagaaccaat

SEQ ID NO: 67145 - DNA, 873 bp, Cannabis sativa
aactgaaaacagagggaaaaaaaatttcgaaagaaggagaagttagttaaaaagaaaaaaaaggtggttaaaatgcacaactgcaacagaccaaaaaggcacggtgaattaactacattagtatactttttgcaatttatttatttctttttttatttaaaaaactttttcattttcttttattaaaaaaaacgattgacatgaaagaaggtaaataaatagaaaaaagaaaaaggtgataatgaactcgacgtgaatcgaacacgcaaccttctgatctggagtcagacgcgctaccattgcgccacaaatccacctattgatatgatccataaatgtttttatatattctagttattaaaacatctcattaaactattcttcctcctacatttttattacactatacatcaatttctctattttttttttctctacaacatttaaatattatatttttaatgtatttaattcaattaaaatattttgatctaaaatgagaaagaaagatttataaaataatagtttagagcatgaaaagtatttgagtattctgaataaagaagacaataagaatcaagtccaaggcttgaaagctgaaaagagacaaagcgacaccctaaaaattaactcgggcgcctagggttttcacccatcgcccaagttgacttttccaactatgattatagttttcgggtccgtcttagtgaaaatggtccaaactttgtactttgacatgaataagacttgtcatgaacatatttgagacatcagaatcagaatcagaatactttcacttttgagcacttgaggcaccaagcgccccatgcacctacctagtgcacctaatgcctaggttgacacagggcactt

SEQ ID NO: 67146 - DNA, 1575 bp, Cannabis sativa
agtgacggacaagacatttttgtgaaatgcttcaatatgacgaattcaaggacaggggattttatgaatcagttacgaatttgtgctaagcttcaacaacggaatgttgttaggctcattggtttctgcttgaaaggaaatgaaaggttccttatctatgagtttcttcctcatagtctccatcgtttaatatttggtaaaattttcatttgattatgtttacagaaccacaaagttccatttacttctaagtttttacaaaatcatacacttgtgtgaatgtgtagatccagtcctggttgaggagttctctttagattgggatattcgatacaaaattataagaggcatttctcgcgggctcctatatcttcatgaagaccaccggctgacaattatccaccgtgatattaaagctagtaacattttattagatgatgatatgaacccgaagatatcaggttttggacttgcaaaattgcttgaagttgatcgtagtgaagatttcagtatgattggggggaccgtgtaagtatattgattactgagatacaagttagcaaattacttttgtggattctaatcattgaacaaataataatatccttacagtgatttgacatttagtaataagatttaagatatcgtaagcagtggataattatagtagattctgtttacaggggatatctggatccagagtacgcgagaagtgggatactttcagtcaagagtgatgtgtacagttttggagtattactcttggaaatagtaagtggacaaagaagtatctcatgcaatgacaacagggagcacctcgtagccactgtaagtatagatacagattttcacattccttaactttcagaaaaccaaagtaggattatgttaggatccacattgactgattacagaattggttagtagtacataactacttggataccctcttctcttgagctagtttgagttctacccaagtggttatatcaacttgagaggaatttattctagtcaattgattaattcagtcgcaaagtgtgtgaacaagtaggttctctcccacttgggattcaaactgagaaatatatatgattgtaggtatggagaaattggaacgcaggaacaagtattgtagacccttatataagattaagatatgattatgaagaatctgaaataatgaggtgcatccagattggacttttgtgtgttcaaacacgttcaaatgctagaccaagtatgagttcagttgttcacatgcttaactgcaactgtctttctcttcctcttccctcggaatttggagattctcaagaacttagttatccgtcagggcggtcgacgtcaactaatttcaattcaggaattattgaatcatcctctgagatcttcccagagtcagctaatgatattgaactgccatagttcttcctaagttcctagtatcataagagattgtagtgtagttttaatagtcattattagttccttttaatttgttattctttatataggtcatttattttgtttattttttaaattatttggattttgtatttgtattggttagcc

SEQ ID NO: 67147 - DNA, 864 bp, Cannabis sativa
agatggaattttatctatgataatgtccatagattcttgatcgactccatgactagtgaaaagatcttggtaataatcagaaataatagtcaaaagagcttgagaacctgtttgaacattaccattagcatcagtgagcttgcggatgtggttatttttcttcctggtactagcatgttgatgaaagaattttgtgttggaatctcctgattgcaaccatgaaatgcgagatcgttgatgccaataatcctcctctttggctagtaactcgtcaagaatttgctcagaattttggactgcttgtagatggtcagaatcacttcggcttgaattgtgaagtgctgcaacatgtttgtgagagtctttaatctgttcttttaactggccgaaggtggtatgatgccaatgttgaagcttatttgacacagtggagatattggccattagttgagtaatattgttactggagtcattggcccaatgattagaaataattgcagcacattgttcttcttgaagccaaattctttcaaatcgaaacctggacttgaatctgatttcatgtgtttcttcattcaaagctgacaccagaacttttaaagcccgatggtcggaattataataatcaagatgttgaagtgtacttgattgaaatgttgagtcccagtgatcattgacaaatccataatctaatctctctttaatgatacctttgccttgtccttgacttgtccaagttatacgatctccatcaaaaggtagcaagttgagattacaagcagtaacagtaccacgaaaagcatcaatctgtgaagaatttctaactgaacctcccactttatcttcattggaaagaatctcatt

SEQ ID NO: 67148 - DNA, 1289 bp, Cannabis sativa
tgttccaactgtcgtggacagttagtttttttcagttaacacttcacactcttgagcttgggtagttaggctgttattttttctgtttttcttttcatgtagcctgtgtatataaaggcatttaggttctcatttgcatttgatcaaagcagtgagattagattgaaaggggtgagaagaaacagagcgagagagagagagagtttgagagaacagtccaagttgtgttcttggagtactcgagtagagagtgttggggttctctttttaatgctctggagttgtgttcttaactgagattgtaatcatgatcatcaactgaaatacaaggaacatcacctaaggggtagcaggaagtagacatttgttttttggccgaacctggataaaaatttgtgttcttggttgcaagctttgattcattttgtcttttgatttctgttgattacttttactttgatgtttgatgatttcagtgttgtcaaagtacaacactcttcatataatctatttaacaggaaggaggacattgaaagcgacacaaggagttaaatcttattatgggatctatttcttagaataagaaatgctctatgggacatccaaactagctatttagatacaacgaacgatctaagttctggggttcctgaaacaaaagattatatattgtaaataaaatgcagattcaaattcaaatacacacctaaaggctaaagctttggagctctaacctacagcagaatcctcaaatgggcatatgttttcttcgacccaaaaactataataaattaagagtattttactatacacaaagagtaaaaaatggtacttttttccccttttcataatttgagatcacagcatatcaaccttatgaacagctcggttaaattaaatagcataatttatcaacttgatcaaaatcggaccataaaattcaagttattcgagtataattaatataacacatataaaaggaggtggatttcgattgtcgaacaagcagagttgagaatgagtggaatgggagtttggattgtggagattacataccttatcctcgtactcggactcttccatggcaaggagaagctcttcgctttggggttgaggccattgggatggcagcaaaaaagaggtgggaatcttggtggtggaccatgggtattccgtcatgaatcccggaaactgcaacattctgtcccggaaagtgggtgtgtttagttagacgtttctgtattatgaattggattcaatccacaccccttcctatcctgtattagtgt

SEQ ID NO: 67149 - DNA, 894 bp, Cannabis sativa
atttcactggcttttatggtttccctgctgcttctcaatgtgtttttacttggaatcttcttgatgaagttttttataatgctcctaatctcccttggctcattatgggggattttaatagttatctttttcatagtgataaaattggaagtagttattttgataataatatagacagtttttctaacataagtttcaactgtttccccttccttttataggtcacaaatatacttggtaaaataatactgtttctgaaagattagattgggctattgggtctgattcttggtgtaatctatttccttatgcggttctctatcatttgccattttatggttctgatcatagagctcttaaggtcatgattaatcaccatagtgattaatcatgacctaaaaacatttgttgcatccttttcaccaataaacggttccactttgaaaacatctggtttgagaaccctgagttttacaccacaattagaaattcttaggacataggtactcatgggatgcataattcaggagtttactctaggttcatttcttgttagaatgcttgcatttcttctcttaaatcctggggtaactctattagacatatttttaagtctaggattacaactctttaacaggaaattgataggcttcaatctactcttcctagtgataggaatattatctcacatgttaaacatcttcagtcccaacttgatgctctcttatataaggaggaagtttattggagacaaagggctagggttcattggcttagggcaagagatagaaacacaaccttctttcatcgttttgcttctcaaaggaagagaaataatactatcaagtttcttagggatgataatggtactgtctttagcaaccttaaggatat

SEQ ID NO: 67150 - DNA, 951 bp, Cannabis sativa
ctttcttcttcgattagcttctcttgttggttgtttcccttccctaatgtccttatatttcaatcgattgttatcattttttttttaaataattagcatttttgttctccattatttaattttgccccctaaggcttgctaaaaattaccataacggttaaataattatactcattgtgttaggttagacatggatctaatccaacctttttttcctcatggaatctaattcaattaatattggatttgaaaaatcatcatcacatccaatccaattagaccacaaaattcaagagaaaattacactctatatcttttttatattgtcctcttttatttttatcctcttttttaaagtctattatatttacctctttttttaaatattgtaccaattttacccatatcacttcaagatactctctatgtgactctcttatgtcagggtaaaattaaaggtaaatttgatcaattgattaataaaagtggtatttttcaacttaccccaaaattcaatctaatttgatccaataattaattggattggatcgattttttaattggatatcttattacacgcctaatttttaatagagaaatataaataaacggccatatttttaactttatagatagttaatgtctcttttttaaaataataaagcaaatgttcttttttactttttaatacctaaaatacccttcattatataaaaggtattaaatgttttattcctttaatagaaattatgaaaaacaataaatcaaaatcctctacttaatttttgtcaactattttttcattatataaaaggtattatatattttattctttagattttgctgttgttgttgctatcaaatatattatttaagcatataattagtttttttttattaatatatcgtatgatatacaaacaatataccttaaaccaatatacatatatc

SEQ ID NO: 67151 - DNA, 1341 bp, Cannabis sativa
atggacctgcaaggcctgaaaaacctgaccaagggtacgctgcaaccaccctcctgcagcctacaacctgcaacctatgaccaggttatcacactcctgcaaccggagaccaccggacaccagacaagggtacaaggtgcagggctacctctagcacctgcggtatgcatcatgaaagcgatgttttgtccccttgggaccactttgtattccacgccattagagcctataaatactcattctcatatgtaagagaaggttagaaaatcatacttgtaaaaccatattgagaacaatataaatttttttattattctctccattttaagatagcaatttgagtttatatttcattttcttcttcatctcatttttgaacttgaagtataagttagttttccggccacaagttagttgaccagttctcaccatcaacaccaaggtcacttcttggttagaaattagatatatttatacatttaataaaaaaaaaaaataccactgtaaatagagttgttcatacaatttgaaaattccaaatttcaaccaatctagaacaaaccaaacaaattcggtgccaatggtttgatttcaatcacgtttttagaattcttgacaacggtttaaactaagcttaagtacttaatatcttttctatatattgacatttgtaaacaatctttatgtactaaaattatttacgtgttataatagagtttgataaccactaagctataactctataaaatagagtttctgtaataggattgtgagtttgattgaaatttataaaaagaaaactttgaaaaataaaaaagtatagtaaataaaagagataattacttaaaatttagaataaacatgaattataagttgtgaattggtttagttttttttttaatggatttagtttagtttgaacattttatgatttgatctagttttcaatttaaaatgaaaaagaaaaactgcaaaatagtggtttgattagaaaataaaaataaaaattcaagctaatccaatgagaagattcatccaggtaaatgattgtttttaacatcccctgaaaatatctccgacaaaatgttaccatatcagggaaagatctcattaaacgctgactttgacttaatttacatatgtaattaatgtaagtaaagtcaaaagtcgacattttccaagaataggttagctaccaaatattgctttacaacattttcaaagtcaatgatccaattttaaacaaaaactggtctctctctcattctcatgtttacatatcccaatccattctttttttttttttttgaaaaaaaggtttataaataaaattgaagttag

SEQ ID NO: 67152 - DNA, 1459 bp, Cannabis sativa
  modified_base (600)..(622): a, c, t, g, unknown or other
tatttaaatatcaataaataattcataattaaaccctaattatctgctaatttccaaatttaaactaagtggtctttacacaacgccatatgggcacacgtatatggcatcggttattacataattattgaagacatatgcccttaaaaatacatatgccctctatgacatcggttattacataataactgacgtcatcggcccttaaaaaattctttatgtgactaaaaggatttagctacactttctatattactcaactaaaataactggctctaaagaataattttatagtagtgattttaatgttatgcaattaaagagagcaattttttcctaacaaaaagaaataattaaaaataaaaaaagagcaattttttcttcgtaaataaacattcgattaaaaataaatatggggtcacatattttacttataagaattattatatacaatgtatatcctaacatataggtgtcgtttggtaacacttttgttttctatttttttaatcacaaaatgaaagtaaaatttttgtttttaaaacttttgcttttgaaaaataaaaatgtgttctgtaactacttttgtttttcaatttnnnnnnnnnnnnnnnnnnnnnnnttctgtaaagtttatttttattttcattttttttattttatttaagtcaggtctagggccggggtcggattcgggttcgagtcagaggccgggtttaacgtcagggccatgggagggagattcgggtccgggtctggtcggagtctaaaatattaattaagaaacactccaatttgttattgttgaattctagtttccctatttgtgtcacaaatgtatttccttatttttgtttctcattggtttcctaaaattgtttcataaagcttgtctacttcgtttcgtttattttttctttgtgtcattagcaaaaaaaatttgaatttcttaaaaaaaaaaacaaaaggaaaccgagcaaaaagaaaaggaaaccgagtaaaaaaaagaatctggaaacctatcttcatttttttttttgtattttcttagtctccatagtctagaggcttgtttgccaaaactcacacaagtgttccaaaaatcatcatttattctttcagttttcttcagtgttcatttggtttgtttgattgaaattgctgcttgaatcctctcttgtactgtttgattagttttttaaagaacttaaagaagaatatgagtagaaaaaggctaggaactaggtagataattatttgggaaatataaagatgaaaattccctcttttcaagggaagagtggtcctgaagcatacttggagtgggagaagaagatggaattggtgtttgattgtcacatctatttggaaacgaaaaaggtaaaacttgctgccattaaatttactgactatgctattttttggtgggatcagttgtgcatcaacaggaggaggaatg

SEQ ID NO: 67153 - DNA, 591 bp, Cannabis sativa
tatacaaaaattaaatgggctacctataagcatctaagcccaaagcaagcatataggtttacacatgcatactaatttggatggatcctatcatgttcctaggtttatacagagatgaaagaagatttcaaaatttacttgttacaaattattatttgacctattgacaattgaaccattggttaaattagatcattggatctgccaataagttaaccatggcaatttagatcaaacaataataggttttataaaattataaaaggtgtggggcgctgcacaaagtaaggcgttacataaagtatgaatcacttatcacaaaattatgaccttttcgagagcacataaggacatgagatccacaacaaatcctagcttgtggtaaatcaagttcttggagaatatcatgcctaagggtagggccgtccctaggcataagcgaactaggcccgcgcctacagcccactcattttaggggcccaaataaattaataattccttttagaaaatatacatatttttgtaataatttttaaaaatgtcatttatctttatggtaagggcccaaatttttttttttttgcctatagc

SEQ ID NO: 67154 - DNA, 1351 bp, Cannabis sativa
aagaataaacagagtatgaaaaacaaaaaataataacgacaaaaaaataaagaaattaacaccaaaatatatacgggttcaagtccgataaattgataaaatttatagctctacccaaattttggaacatcaccaaattttctttattaattgagcaagaacgagtacaatacagtcgagaaggattctttattgagttctcttaaagtgtttcatctctcacactcttatctaagaatcttcgatcatctacaaaaaattcttcttacaaaactcaaattcaatctctctctttttttttgtacctctctttacctcttaatattttctctctctaactctcaatctcgatctaaactgaatgtagttcatcattgtcttatgcttaagtgtggatggtatttatagaattaggattacgatcctaaaatcggtggctgcaataattaaggttgttaagttagttagcagataactaacttaaccaatgatcttctttagcgaagtctccatgtcaacgaaagtttttagtgcatccaggaacatatatgagctttggggatcacaggccaaaggcactcattaaaagagcttctggataggaaaaagccagttggagtcgactattcagaacgttcttccagtaagaatagctagctatatcaagcatcccttccaggaagaacaactagctattcagaactcctggaaggacaactaggtattcgaaactcctgaaagggagagcactaactatccgaaattccttctaggaagaacaactagcttttctgaagaccatttccaaaaggacaagaaagccttctaagactggcttccgtgagtaaataatttttcagaaataatattagggacttttttagttggagaaactataccacatacacgtattataaattcatattctaatgacatatacattttcatataactgttctgccatatatataaattaaaatatctttaatttatttcacatcaaaattataaaacatttttttttgtttattaatggaaaaagtgataaagttgtatacattataataatatataaatggtagtcaaattaagtaggtagacaaaattagttgagacaaatgatcaaataaatatatatgatgagagagatcatgaatgggatcaattcaatgataacaatgataattagagtagtcgtccatctaatccgggattcatcagctcaagttataattatatatttatctatctatttaccatgatcacttttttacgttatcatttatatctctttattttcttatatattatatattctatatatgatgcatttatattaattattagggat

SEQ ID NO: 67155 - DNA, 617 bp, Cannabis sativa
ggtgactcctgggaggtcttctaccagcattccctaggaccaagtcgttctaatcgacgaggaagaaggggaagaagaagaggccgagatcctccctcccttggactgaaagcgcaaaggcaagatggtggagacagaagttactaagaaaccaaggcgtgttgacactcctgctcccaattttgactcagggattgcatctgaggtggacgagtataccgtgcctcctggtatcgtcttaacccccattcttgttgatgaggaaaggactcagctccggattgcaaagcacaattatgccacatcaaagtatactaaggggaacgcagaggttgaggccttgaaaaatattttgaaggaggcccaggatagctttactcgtagtaaatacggcgggaatatctgggacttaaatttggatcccttgactgactggttcaaccgtttcattggacctaccctggctcccttcgcttcagagttgatgagccatttcgctaccggcttgacccagttcccaataaagagatacgcagcctatttatatttgcccgtatgatatgccttaataccccttaagtgacatgaaaagaagtttttaagtcacttagtcttac

SEQ ID NO: 67156 - DNA, 1228 bp, Cannabis sativa
  modified_base (1176)..(1203): a, c, t, g, unknown or other
atatatatatatatataccacatagtgaggccaaatcatagtgggcatgttgtagtactaataatattttagtgcactgattaagtttatcagaattagtatttttttttttgaaactaagaaatttcattaaaagacatcaaaccaaaaaatcgagatacaaaagatttcatgaattggcatgtcatttaatttgtaaatatatttttttgttagttaaaaagcatagagtaacccctaaaaaagagaaagaaacaataagcatatattaacacaaatcactttctctaaattgattaattaaatgattagttttagatctatgcagtgacgaactcaaaaattttactttgtggaggcttatttatcattaaaaaaatatttatacttacattataattactcttaataaatttatttaattttgtggacttttttttactattttggtctataattatcaaattaaataaaattacatttaattttttaaaagacaatatttttattagtgggactgtccatccctggatctatgatatgcactatctcaaaaatcgacacaaaccaatatagaatcccatcacaaaaaccctaatatttatctaatatatatttacatttgtaggagaacgaccatctgccctagacccccctcccgcgacttacctctctttgactagtgccctagaccctctcctagtccaatgacagtcgtcccagcttgttgaagtttctagccattgaagatagcaaaatagagaaaacagagaggaaaaagaggaagagtaaagagaaagcaaggactgaagaaagagtattattgattaacaatgagcgttacaacttatatagtagctctttacaattgattcaataattgaattcataacaaattgagctagctaattgacacgtgttaactaactctaacaaccttcaagtgtattaactgtctttaatacctccccctcaaactcataattgaatggtttttaattttggctttgtgtttgaactcaaaaaaactttttcttgatatggctttagttaagccatatgcgaactgatcataggtagagaggtgtttgatctaaacagttttattaagcaccttttctttgatgaaatacaagtcaagctcaatatgttttgtgttggatatttattttaccnnnnnnnnnnnnnnnnnnnnnnnnnnnnttattaacatcctaaataagaactt

SEQ ID NO: 67157 - DNA, 623 bp, Cannabis sativa
tgcttcaattaattctgcccacttaaaaaaccatgattttttttttatttcgaaatagaatgacaaagtccaaaaaaaatacctatgatcaatgtgcattatcctgaaaaagacataagacaagccaaatgaaaatagatgttagtgtatgataaacacttgcgatttttgaaaaatagaaagaatttttgagagaaacaagcacagttcaatcacaaacacatattcttttaagataatcaatcaacatgtaagagtctgacacttatatttttcttaaataaactttgtaatatttttcttgcaaagtttcaagcatatgtgtgtgatagtgtattcaagggaacattgcccattttgacaagaaggtccttcctaaatgtaaagattgtaacccatgaagatgctgtcacactacaccagtggtagcccttttttatggtagcgtattcttttcataactgcgaattacaaagtatcaacttactcaaaagatcactttcacacactctcctaacgttcttaggccttctagaatactctttctggaccttttggaatatctctattttcttttttggtatcagagccaacatcatctctattcttacataggagtttga

SEQ ID NO: 67158 - DNA, 1611 bp, Cannabis sativa
aacaaaatttccaaaatccatatctatatatggttttatatatcatcatgattcatgactattgtatagatgaagacagtgattaattatttgtgattttgtgttattatcatgtatttcttgatatttacttgatttatatatatattaattgagcagaagcttttgggatcaacttcacttattgggtgaaaaacataataaagagtgaactttaattgatattatttactttttctctccacatctaataaagcataatttccacttagaaagcatttatagtatactttttttcttcttttgtttgtttaaagtattagctacttagcttttttcaatcataatttttattagtagacggcacattgtggaatgccacacaaaaggttacataagagacatgagaattttgttattataagtccttgtcagaactgtgtcatatctgattaagcaattcagagatatatattacacataatacaattatataaatgtatatcgattatatatataagcttttggttcagatatattaacccctgtaatccgagtaccaagcttaaagattattatatatatatatatagtactaatacttttaattacatcttaatagtcatggtatatatttagatcactactaagatatagccaaaggcaaatcttaccaaccctttatctctaactcaaatacttgacaaactttttttcaatttagggttaattatactaaggtttcattcaatactaatatattgatcaagtctagctagtatacacactaaaaaaagcttacattttgtgacaaattttagtattaaatattacttttagggttttggtatatcgtaatgtattatagttataggtttatttttatacttttttagagtctaatttagggtgtattttagtctttttattattttcttgttgagatttatgattgtttgatgaattatttgttttctaagaaaaatatttagagatctttaattttggtattttcggtgttctgcaagcctttttgaataaaaattgagaaaatataatgaagaaataaaacttctattagcttggatggattctttattgcctaaaatgggtcaaagatagctttttctgctaataatttcgtggtcaatagtcaaactaggaactttccaagtttaagtaaaaaaaaattaaggaaaaataaaaacatgaccttgaaggttgcgacttggtaagtaaggccgcggcttaacttattcgttgaaagaaaattggaaactgggaaataaagaaatcaacaaagatcgatcgtaaaagtgaaaactagcttgtaaggctgcgagtttagtgtttttgggaaactcaaattttggctccatttaaagaaggctaaagacaaagctttgacatcattcaaaaatttagagaaattctcagcataaaaggagggcaaggaggagaaggcaccattggaggattctaaagagtattctatctcttcacttctatcttttatgtttttaattaaatctctattgttttagaatgacttctagtagctaattatttttaaggattattatgtgaactacttgaatttattttatggat

SEQ ID NO: 67159 - DNA, 764 bp, Cannabis sativa
tcacaacccgctgactgtaaagttatctgcgaggaaaagatatacaaactgttgcttagtatattaattagaaaccatatgttattgaaggcatatagcgaggtagcaagtacgttacatctggaaagacgaaagcggcacatatcgactttggaaacactaagtacataacgtacaaactaagtataacagtcgagttgcatcgagacctgataagcgaggtgtctatctcgctatgggaaggttcatacctgtaaactcccccagttaacttcatccatcttctcagtgaggcttacaatcctgacaagtcagaagctaacatttaaacaagcctcgaagaactctttgttaataagaactgcgatcgtaacaaagaagctacaaggcatacttcgttgacctcagaaggataaagagaaagggtccagctcgctattacggtcaccggaaccaagcccctatcgagacatttttgaacgtaacaattaaagacgtgttaaaacacacaatcattttgacctagtaaaagcgggaaaaccacaactatttgattttcaaataataaccgcatttacactacgtgatatgtaatcaaaccccatgattttaggggataattgttgtaaaaacattacagtcaactttttaataaactgcctactatgtaattataaatagtgacaagtaagatcaaaaaggggacgaaaaaatcatacaaaagaggccctgagaaaactatcagaaatctaaataagattgac

SEQ ID NO: 67160 - DNA, 707 bp, Cannabis sativa
caccaacagccacgtctcccccttcttcgtctccggcgacgacctccgctgttggttcggctccgtcatcgcctgcaacgtgattgacctcggctccagctccatccccgctggtggtgtcttggggtgggtttcatcaccagtgcgtcttcctcctccgacgctatcactaacagcgtcttcgtcatctattcctcgtccggcaccacctcccacacagccttcttctccggcaatggcacctgggacgctatctccttcgacataaccaccttcttctctgatgtcgttcgttgccgaggtgtgagcggactcaatggaacaacttccagatctggtgccgttcccaacaaatccttctgctcagaagactccaccagcagccacgcctcttccttaagcgaccgttcctcgtcaacaaatgatggctccgattgaacaggatctgcaaccgcatcaacctccgcctctttatcagttacaagcttcgattgtataactgtctcatcaccatcaacatttgacacccactgtgtcacacttggaatcggtggtgctactccctgaactcgctggctgtcggttagagaaccagtgatgatttctctggagctgtcgagtctagcaaaggctcttttgtgttctcttattgccatttccatctcttcatcaccttcaacctccgtcgctagtgttgaaggagattc

SEQ ID NO: 67161 - DNA, 634 bp, Cannabis sativa
aaaacaacgactaattttggctcctgtgttatatttgccatcagatcaagagaaatttatagtatattgtgatgcatccagagaggatctggggtgcattctaatgcagattgacaggctcattgtttatgcctcccgttagttgaaggagtaagagcaacaatatctgacacatcaattagaagttgttgttgtgtttgccctaaaaatttggtggcattacttgtacagagagaagtgtgagatctatactgaccacaagagtctcaagtatttctttacttagaaggatttaaacatgagaaaaagacggtggtcggagttagtcaaagattatgactgtgagattttgtatcaccccgagaaagctaatgttgtggtagacggtttgagcaaaaaaggtctctgatagatttttagtagcataatgatctatcctcaactagtagcaaggatggttaaggcttgtattgaatttatagttggtaaactttataacctaacgcttcagtcagacttattagaaagaatcagaggtgcatagttcgaagattctgagttaatcaagattcgagaagaggtattagttggtcaggattaaggacttcttaatctctaacaatggaatgttact

SEQ ID NO: 67162 - DNA, 948 bp, Cannabis sativa
  modified_base (887)..(887): a, c, t, g, unknown or other
ctatttcccagtatttctggaaaagcctagggtcataccatcgagaccaggagatttatcaggatgcatactaaacagagctcttctaacttcttcctccaagactggcctaagtaaagcaaaattctgatccacagtaattgaagaagtaatctcctctaccatagttgagtaatcggccacatttaaagtaaataaggtattgaaataatcaacaataacattcggtaactcatcctcccaagtaacccattgacccacatcattcataaggcgagttatagtattgtgtttctttctagaagtagctttagcatgaaaatacttactgttactatcaccttcttgaaaccacaactgtttagagggttggcgccagaacacttctcgttggttcataacttcactaagattcagctcaaccttgcagaacttctgaatggatatagcatcacgccccttcttccaatacaggatctcccgcttccaatggctaatgcattgcttaaagttccctgtataatctcacccccatgattgaagagattccccacaataagaaattttcttcataacatgctgaccttcacaaaggtcccaactatcttttacaacctgcggcacaacggttcacgaagccaggcattttcaaaacagaactgacgaaatggcaccgtcacggaacgcaccgtcggttcaagaagtagcgggcaatgatctaaagtcgatacttctagattatgtagctgggccatacgaaacctctggaaccagttagaacaaacgagggctcagtcaagacaaatttcaacccatgaatcagtgcctctcccacgctcccaagtgtaaggatacttgatttactccatatcaacaagatcacagtnagacaaagcttgattaaaaccatccaccagcacttgcggatatctatttcctcctctttta

SEQ ID NO: 67163 - DNA, 627 bp, Cannabis sativa
tggttcccaagtccgggtccaggttcgggtcccgtgttcgggtttgggtttcaggtttgggtctgggtccggttctagttcggatttaaggtctgagtcttgaattaagtttttttaatatattgaaaccagagatcagatttgatctagaaaaaaattaggcgggacaaatttaatctgatccaagctctaataagtatatgtatgttttggatcagaattgatttgtcgaatcggagctccgacctgctttaattaaatagatctttttaatatgtctacatatacaatcataaaaaaaattaaactaaaaatctttcttgtatgtcgaaataaataaaaatgtactgaaatatctcaacaatttataagggcattttcaaaataaaagatcaacaatcaaccaataggattataacacaaaaacaatatataccaatactagttggaatattattattattattattattattattattattatgaattgtctaattcgatcaatattgtgtacccttatattctttctaattacatgttttatatgcacaaaacaatcataactagttcttcactgcatcttttttccgcatgtaatagtacatgcacttctagatcgatact

SEQ ID NO: 67164 - DNA, 804 bp, Cannabis sativa
ctaaggttagagctttccaaaaatatctcttcttctcttctaatggcagcaaaggtttgtatgaatttttttatcttcttctttccttcttcatctacgaacgaacgcgggttctaggattctaagggtgttcttatttttctttacaacttatttttcttctcttgttttcagcttaattgggattatgaaggatcgttttatttcattgtatagtgaccaaattaaattgaatactatatcaaatctaaaatattttgatgagtccctaataatcaaaaagagagaggcagaaaaagacactttcaaagtgagaggcaatcaccaatgctagtgatgtttagactccaaaagcccaaaagctcaaaagctgaaaaatgaaaacccaaatcaaattgttagattttaaaacgtgaatctatgaaaaatgaaaacaaaaacaaaatcaaatatttgaaaatacatgacaaagtaaaaaatacccttgaaagataaatgggtgagggacaaacaaaacagtagaaaagaaatcttaccttagatgaaaaacttctagcaaagtgaaggccgacgagctccttgcagcagcaagacaaatgctccgataagaggagccagattgagagagataagtcactctgatagtttgctgaaaatggctgaaaaagtagaggaaataaagaaaccaattataggcaggtacaatcctgcttcttttttttttttcgttctaacttttatttttttaaaaatgttcttttcttcgtttaaaggatatatcaatgaaaaacgcaaaaaattaaa

SEQ ID NO: 67165 - DNA, 1368 bp, Cannabis sativa
tattaaatataaataaaaagtcacacccataaatttatcataaaccaagaatttagttatataggcacactttatatagaatagatatgtaatatattatatacatgtatgttatataatttttaagagatatttcaatacaataatttaattatttttttattttaatatttaatatatagtgtaaatcgtttaaaccgcactttatttttacggtgcaggtttttcgattttaaggtcttgcattgcggtttgagaaagcgtaaaaactacatatgcggtttagtttaaaaaattaacttaatccgtaccgctaatattcctactgcattaatgtgccaggtacataaggttatattaaaatgtaatttttttagagtaatttggagtatagatattttttttatattggggaaggaaagattcgaattaagggcctcctgtttgtgaggagaactgtggaaccataaggctatgctataaccacatttgcggtatagatatttaagtttaattttttgacattaataatatttaagttatatttagagtaatatccacgtattattatcttattggtatatttaaagtatataaataaaaaataaaaatttaataatttagaccaatcaaatattgtcacgtaacaatttacttgacacttaaagtctttatagaaatttcaaaattataatttaagtattatttcaaaaattaaaaatttaaatatgtatttgtaatcgaaaattaaatttaagtatttataccataaattattctacttttattaattagtatagttcattttaatcggttattaaattatcattattgaagataattataactttgatgtagatatattattattattattattattattattttgagagcctaaattaatagagaacataaaataatttaggatttaaccaaaaataacaaaaaacaaaaacatgtgtatggtataaataaataaacaaccaagtcaaattgtatcccgtggagttcagacatcccatgtttactagttgttcttggtcaatataattatagccaatatttgtttattattataattatttcatatcaaaatttatacatgggaattttcgaaagattgcctgtgataattagatgcctaattatttattacactatgactaatcaatatgcttattagtgagttgtctaactcaagtcacaaaaatagtataaaataaactaaatatttgagacataaatacttatatactttactttgttgtaattaaattttgggaaattctacaaatgcactctcttaaaatggatatattgatgcacacttatttgttttagcacccgaaataattttttagtcaa

SEQ ID NO: 67166 - DNA, 732 bp, Cannabis sativa
tttaaaaattattaaaaaaatgtgtatattttttaaaagacaatttttttatttggggccctaaaatgagtggacccaaggcgtgggcttagcccgcttatgcccagggccggtcctgttagggaggttagggtaggaaaattcctattgagtatggggatcctttaggtactgataaagattaaaaaaaaaaattataacaaaataatttagtgtaattcaaaatgaaactgaaaagatttttgaatttgaaataaaaattctatttaatttgtactttatattctataaattataaatgacatataaatcagaataatcaaccacatatattgacactatgcttgtaagtagtaacaaattaaagaggatattgatatttgataatgaaaattgatgcgtagaacactatattataaagtatttaatatgacagttataagaaaaatcaatcatcaactttgtagctaataattttaatacgattatacgaataaatatttagaaaattacatagaaattatatgttgcaattggatattgggtgggtagtatatcctgatttgccccaaactcgcttcaggtaaataaaatttttctgcatccctttcccataatctactaaagcgggtactttccgctccactcaaggtgggcacccacgtgtatcaattctcgtgaatcaaattttctatctctaataatatctatttttaacttgaaatataattt

SEQ ID NO: 67167 - DNA, 1577 bp, Cannabis sativa
  modified_base (1435)..(1436): a, c, t, g, unknown or other
gggtcactaaacatttgaagtgtcactaaagagtgaaatctatttttttttttaatttttattaaatgaaaaatactgagttatagagatgcgccatgcgggactgcaaaaacatatcttaacatacatggagtgtcactatagctaatttataaatttaaatattatttattttatttatttatattaaatatagcccacagcccaaggtgggctgaccataataacaattaaattttatttttttctccaacaatataaaatgttttttttaaagataaaatgcttaattacattgaaacaaaccctaacatttagctagaaaatagagaggtggctgttcatctttctccttatcgtccctcttcatctttctccctcttcgatcatccctcttcttcttctcgttttgggccgcaactattcatctctcctccggcgaacgacaacttagctccacagatttctgatgtctgcgccagtatcctcaagctcatggactccaacctaattccctcagcctcttccagtgattcgaaggtcttctaattgaagatgaaggaggttgagaaagggaggactaaggaggagttgggtttttttggttgggatttttgttttgaacagagctcgaccgattgagaaatgggtgttgtttgtgagagtgagattgttggagtaatcgtcggctgtggcgttgccgtagagaagaaggttgttgtttgagttgttgaagccattgaagatgaactctactgacagagccgaaggaagaagaagaagatgaagggtttgtagtatgagaaggaaagtttgaaactttggtggtgttttcatggtttgattatagaggaaaaagttatgaaaatggtactttctttcaactcaaatcataatttcacatgtttgcttcgttgggccactgcttgaattgttatgtgattatttatataaaattattattattatatattttttttaaaaaaaaaatatgtggtcaagttcagtgtttttaaattgtatgccactcggctacaacaagattcagacttgaagggatgggtgctacggcttttttttgtcacccccactttgcatatcttatttttgttataatcattattagcgtgatatgtgctcaattgacttgtgtggtttgaatctcatctgtggtactgattcttgttgtgatcacttttgaagctcggattgaatctgaaatatttttaggcttttttagttccaatattgtattgtaaacacgagtatattgtttgtttaatgaattttgatttcaagttctggccgggattgaggaggcaatgtttggatttgataattttatttgttttttttgttgttgtattgttcataccaatttctgggttgtagtcgtattttttttcactgttattgtattttgtttatgtatttnntttaaattatacttgtatttttttgatcacatattctgtattactgttattaattataatataattatttttgtgtattttttttattattaatttagatgtatttatattacttacataaaatctgaatgtatttatata

SEQ ID NO: 67168 - DNA, 2215 bp, Cannabis sativa
tttttatttttcttttgtttttttattaactaaaatttataaacttttaactaaattttatttatgtttatattatcatcacatattataattttgtaaacaatatttacagaataaataaaaattagttacaagttgttatgaatttctacaaactattatctgcatattttttattaataacttgaactttaaattgttaataatttttctaaatatttgggaaaattataacttatctacaatgtgtatatatatataaatattaccttagttagctataactaatttaaaccatgcatggccatttacatctatatatagtgaatttattgaaattatgatttatgataataaaaaatattaataagtatatactaaagaaaacggttatacctgcattttcattccatcttcagcaacccataagtagtctggaattctagcaaggtgttttctaaaataaactccatttggattttcaacccaacacgaaagcataaataacacctactgattaaaataaaaaatgttaaaaataaaattaaatagaatctataatacttttgacacatattaaattcaacagttgaattacacatagaaaattcatatttaaattttttttgtaaagaaaaaaataataatatattcttcaatattagtttatattactttttcaacacatccaattgtaatatatcgactattctcatcttcgtaatggatatgtttcattgttacttgtaaagctttttgtctaattaatttatttaagggccatcgagtaagaagaggctcggtacacatgtataaactgtcccaaaacaactcttgcacccatggatgaggataatataggtcctcctacattaaaacatacatataatactcattgtaagtatcttaaactataaaaatatcatttaattaatactacattaatttttaattaaagtttgaagataattgctacttcaactcactttagcacaaaaatggcgtactttcttccaatttatttcatcataaggttgagtgaaaagttcttccctcagttgtagaataagaggtgtgattgaaccaacaaatctttttccatataaatatgacatgggcaaataaaccgttcgacagtaacaccacattttagctgcatgcatatataaaagattaatttccgagaattgaaagaaaagagagcaaattatattgattcatttgtgcatgattttcattttatatattaattatgtgtgtgaacttggtacttataagatgcatatgctagatactcttctattgctaataatttagttttaagataaaattttatgcattttattatacactcactctattttattttgtttatggcacttcaaaattttaagaaaaagcttaataagtaataaatttgtcaatgctaaaaaaacactttgtattaattgacctgggtttattggaaacagattggaagggagaatccaaaattcagggggcatgggattgcatccttcccagctaaaaacaccaagtatctatacaatgaaccaaaaataaataaattataatgttatttacaatgaacatacatttttttaacaatatatgaaaataaaatatactacaaatcttggtatgctgtagcacattttgaactgttgtatagatgtaaattagttgtttttccttttctttctttcttttattttttaagaataattgttctaatttacatatatatgcttctatatattggtcatttgactcaaatctttgtgctcatttgagataggttacggatacaagaccatgaatggaagcttgagaattaccaaaagttctttgatagtaaaggtgagaagatcaatggtttgtatgttttccaaggagagaaattattttagctggagaagctagtttggtaaaaggtcaagaattagatatacagtattggcatcacagacttgtgcatattagtgaacaaggcctcaaagaactgcacaaacaaggtctaattgaaaatttaaattctcgcgtcttactattttgtgaagcttgtgttttagagaaacaacataagttgaaattcacatcagcaagacatacaacagagaagatactcaaatatgtgcatgttgatctttggggccatacaaagtgcctactcactctagtaagcaatactttctatagttgatgattatagtag

SEQ ID NO: 67169 - DNA, 506 bp, Cannabis sativa
aaacaggtatgttgtgaaatatatgagagagcttatgtttgtaaaagaactaaccgtcattggaactatcaatctagtttgcagattttaatttttatttgtaaatctagctttttttaccaatagatgtttaattggttaaagtgtaggttggcatttgcgtttttctttctttagctagattggtaagtgctttaacttatgtaaaagattaacttcagttgtattgtgaggaaaatttattgatgcttgcgtgtttgcttaattgtaattaaaaatgttgtgagctgggaatagtgtgataagctctataaccaaattgttgtgtaaaaataagtttgtttagttaacattttaaaatacgtatttaaaaaaaaaaaacattttaaaatatccatcattatatgctacaacaataactttttagaaggaaattgaaatatttattttaaaatatatgtataatttaattaaacaatttataggttcatagttctttatttaaa

SEQ ID NO: 67170 - DNA, 868 bp, Cannabis sativa
cataaatattagtaactgaattcgattatagatatttatttatttaattaatgagatttaactactataaatagaaacctgatatgagaaatcagatacacttttccaactggtatttttgaaatatagagaggagaaaagaaaattattttttctctcaaattgttcttgctcatgtgttgaggaatcaacaacaacacattatacactttatcccacactcttccttatgtgtggtggatcgatttaaaagataccggtgtgaattaatttacatcatcctcatcatccgattaaaggtacagcatacgagaagttttgaggataccttaatagtcatcaagaggtatatgttcttaacttattttttattgttatgatttaatgtacacacatctagagattcattgagctatggtacaatgataataagattatacaaaactcttccgctgtgtacctaatttagtactagaaaatccaacataatctaattaaggaattccaatggagaaggaaaattaagagcctaaggactattcaaccacatctgacaagcaagatgacaccttagaaataaatgagaaaagagccctcccgactgttacaaataacatagttaccaccgttaccaaaaagagcctgaagacattgtccaaatggcaagatatcccttcccgatttccaaagaaagaatttaacacactcctggagcgaagctttccacagattcttccacaccacatcaagggatccaattcttgaactaataagatacttgtaagcactcttgatactaaaaagtccattaggagccttattccaaataagctcatctggctccgaaagaggaagatttttggtaagt

SEQ ID NO: 67171 - DNA, 597 bp, Cannabis sativa
ataccacctccctcctgtggggcaccataaggttaccctttaatatttctgaacttttaattctcagttcaaagcatttgataagaaagttacaacaacttaacagagtcctaattcattagcaatatttcccttggtttacatgaactcatcaaaacacagaaattgtaaacttggagcaaaaattaaaaatgaaattgataactcctctcaaatctagaatacggtcatctcattggccttggatcaatatcagtagccacaattggacttctcacaacatgtttacctgactcttccacccaactcaatgagccatgcacaagcagctcaacctcctccaccacactaattggaccctccacactcagcttgtaactcaacatctcattcttccgccgaaaaaccaacttcgaaggctccaccttcacgttgaaaccgctcatgccactcacctctgctctgtaactcgccttctcattcccaacattcctcaccctcctgatgaactcccttaccactttcggacgatgggagccctccgaatcggagggaaagtaagctataaacgacgggtagttgagatcagaagacggt

SEQ ID NO: 67172 - DNA, 545 bp, Cannabis sativa
aaggagctcaaggactttaaagaccaaaccttaaagaaggccaagagagatgagctcctctcccctgtttcctgtaggcgttgtattaagcgctttgacgatggcatctacatggcctggtcggtaaatggccagagcatcaagcttgacttctactccaaacctgaagagatgattgccaaattccgggagaagaagaagaaacttgacgccatgcttgaggcgcgcattagttctcgccttcctcctcgcattgattaggcccttcaaatccagcttacttcatcaagatttttcttatctcttttttttttattattatttatttacagctattttgcttttgtttaggacaatctttactagctgctgttttatttcctaaggggagacagttattaaggcctgtccccgggccctttgtatatatttttttgacctgcccttagggccaggatttttatatatatatgatcctttttgatgcatattcttttttcggacctgcctttagcgtcaggatatttatacatatgctccttttt

SEQ ID NO: 67173 - DNA, 1677 bp, Cannabis sativa
  modified_base (47)..(74): a, c, t, g, unknown or other
gtatactgcagtatgaaacttatagaaaaatacagtaaaaaagtaannnnnnnnnnnnnnnnnnnnnnnnnnnnaaaaatagcaaaagttagtataatatgtaaacttccctaaaaaaatatatacaaatgggctaaaaaagcccattaacctattattaagcctaaccttaaacttacataggcctgttgctccttacttttctactcttgcatactcttcttctcatcccattctctctctctctcttaatgtttcctcccccaatctttctttgtttttcatgcggccactgttaggtttatttttaagttattttagagtttagttttaggattattcttaatattttttatgttttattgttcaagtttacgcttgttttttgcttttatgttaatttcaagtttaagatgaagagagttgccctttttggtgaaaatatgttgtttctcgagttttttagtgatgaaaatgatcaaattataaattttgcaaaaaggaacctccagattgaatttcttgacttggtgcatttcggaggattaaaaattcaagttttaaaattttagcatcaagaatcgcgactctccaatcgttacagagagaaaatttgagaaaaattggaaagtcacgatctttccttaaaagttgcagcgcttgaatgaaataaaaaaaaaatcattgtttctggataaagtcaagcgtcagaactttccctagagttgaagcacttgaatatttttggtaactttccaattttaataaaataatgaattggggctaggtttaagggttccatatgattttttctagtattggcgactaggagtggcgactggagaaaggaggacacttggagactccacattgtgttttatctcttctatctcaatcttttatatttttgattgaatctttagatgtaaaagatgattattatgagttaatttcagttttagggttgttacgtgactcacttgaatctcttttatgaattaatctagttttcaatttcttcttcatcttttattcaatttcatacaatctatgttaatttagcaattatttattggccatttatcattgttgtttatgattttgaatcaaatctgaaaagtgtgatttgattatgctatggttgttatggatgtaatttaatttagaacgaaagtatttaagtttattgtatgattattatgagttgctatgtttattgcttttttagtaattaaacttgttatagaaatattacatagacgactgagtttataagtcttaaccaattataaactactaaaatcaaattttcaattgattagaaggaagtataatttgggaagttaaattgcattaaggtattaaaagagagaatatagttgataaacataatctccctaattaatttcttattgttattttcttgattttttattgtctttttgctattatttttcttgctaaaaatatttaatcaaatagaaaaaaaaattagttgattagtaattaatactcaatcattgtgggacaatacttggtcttacaaagatttattataaattacgactgtatgcacttgcatatacaagaaatataagttttagctactacaaagttggtagcaaataatctatatttggtagctaatactttttttgctaccaaattttttggtag

SEQ ID NO: 67174 - DNA, 617 bp, Cannabis sativa
tttagccaatctcatctaaagataaccctaccgtgaagctatataaggaaagagatgagagctttgttaaataacctattctaagtgattcaaccctaaacttcaagaaaatctctctttttctcatcatatttttgaaatacactagaattatttcactctcaattttgtgtgtctttatcgtgaattgtgtactagcccactctattctaggtggtacttaaatctttgtggaagatcgtgaagatttatcacttgttagtttaagaaagtaatttaggttcatcacttggcaataccctactacagaaagagaatcgagggttagagtgattaaatggaaggaatcactaataatgttagtaaacaaatcctggtaaaacaagtcctaacagttttatagtaatagacagagccaagcatatgaaaatctatccgtggaaaagttaataagccaactaaagttcctcactttgatttaatggagttttcacattaacatatattaaatatattcaattttctactttttttcttttgtttggataaagatgaggtcgaaatgatgttggaatgtaaggtgttgacttagaaatctggactagacttctaagcta

SEQ ID NO: 67175 - DNA, 828 bp, Cannabis sativa
atattttagggggcaaaattaggtagtaccaaaaattataggggtaaaaatactaataattctaaaattaattatttttctaattctgtgtaaattaaagatttaaaaaatttagaatatcattgtgtttctcaaaaacaattactactacaaaattgagttttcaaaataatcgactaaaatattcctgtcgatatctaaaaatgatgcctatttgactttacggaaaataaggtagactaggcgacgtggaaaattttcaagaaaacattttttagattatgcaaaaccatcagacatattaagcagaccaccgctgccgccaccaaccaccatcatgcaatagtagtggagacatgtgtctaacatctctatatcataaaaacaaaatggctccatggtagagtctagtctttttgtttgactgtgagttttaatcttatttctttcgggttttaagtgatcagggtgcctttgttggtgggtctattctcttcgaatccttctctgtttagtattatggctgaggatagggtgaaaagcaaggatgttgaagtggaggtaatagatgaaggaatgaatcaagttctgcagagggatagcactcttgaaatggaaatgctagagttatttgaggacataactttggaggatgtggttatcaacaaagcctgtgttggaaaggttgttgggtgcaaggacatgcctgcttccattgtcaagaacatccttctcggtgtctggcgtaggctaggcccgtggagaatgaaaaaatgtgaagatggagttatggggttcttcttcgaagaggaagatgactgtgctttt

SEQ ID NO: 67176 - DNA, 1555 bp, Cannabis sativa
agaggtaaaaatgatagactttaaaaaaaagggtaaaaataaaagaggacaatataaaaaggatatagagtgtaattttctctattttatttattattaattggcgtttttacctgctatattatatttttacattttattacttttatactgccacacgacagaatttacaaaaatattgtacgtttttatactgtcttttttgcataccctttttttattttttttttactaattaattttttaaaaattttgtggtgtgatgttcatggtcaattcatgacagttcacctttttaaaaaaaaaataacaaataaaattaaaaacacttaatatattattatttgttttgtaatcacacgttacctccttatttggcatttcatcatttcatatttttttaatcatcacctttattcttaagttatacatctctcttccatgtttatcttctttttcatgttcttctttatttttatttttttgataaaccttctttattttatttattttttttttgtgtttacaaatccatacagttgtttggactttagccctcaagatattcttgacgaaacgctgagttggaaagagaggctggacctgcaggggttaggtaactcaaggaactaatactcaaaatcaacctgatcctggggtgaggagaccacgaagaagacctcgaggttcaagaaccaagagacagaaagcaaatcaaaaaaatccccaaaacacccgggaggaacaacttgggggtactagggatgttccagtgaacgaacaacaaaataatcaagagcgacatcgaagcgcgcctcaaagatcccaaggatttatgaaccaagggaatgaacgtactagaggcttctcgtaggaatgaggatacgagacagccccaacctagagaataggaaatccctcgtgataacgagagaaatcttaggactcaacctaggacaagtgggctaccaccaagacacccttaacatccttctcaatcagagagggaaggtgcatacacgtacctaagtagaggacgtgtatctaacctcttctgaaggagaagaccagtataagacgaaacaagttctggctgggacactcgaggtctcgaggacacagtcgatcaagaaggaaaacacgagaaggaagcagacctcaacgttatgttgatcaagaaagcatgagaaatacacgaagctatcaatctgagaattactcagagacatctgtgagtaattatgagcaaagacaacctgatcttcgtgaacatttgaatcaaagacaacccgatcttcgtgagcgactagattagaatgcacctggcttatgccatcaacttaatgccaaccatcagcaagtggaccccatccagttacaaatcattgagttggaagataagtttaaaaaatataaggatggggaacatgggaaatcacctggctatgactcaaatgagaaaactgagccattccatcctgatattctaaattttgaattccctcagggattcaaaaatccacatgtctcacagtatgatgggactacgaaccca

SEQ ID NO: 67177 - DNA, 670 bp, Cannabis sativa
tttttttttatattttgaataaaaatattaaattttattttgtaattgtgtatttaaatataatactaaaatttaatgtaaatatattacaaaataattttttgtgttaattatagtacaatttttatatcttccaaaatgtcctaccgaatatgtaaaagaatttgatttcttcactctttttgtgatattttggtgtacatacatagtacataaggataaaagacagtgcactggttctgaaataaaaaacgataagacagtgcaaatttggtgtcatagttgtaaaaaatagataacacgagcacttaaaattgtcccatctttaataaatataaaataaaacgaattaaatagtgttccgttggaaaaagttgctggtgtagtgtagcctgtagggaccatgatagggtttcacagccacaaaaggaaatgaaaatatataaccgttacaatctcaattctctaaactatttaattcttcatctactttaagccaacggtcgatatgaaaagctgtgatcctatacccaagaaaaatatgaaataaaaaaaaaatctttgaacaagaaaaatatgaaattattaataatactattaacaataatagaaacctctggaaacatcgagccctcatgggggcaagcaaaatgacacttttggacagatt

SEQ ID NO: 67178 - DNA, 691 bp, Cannabis sativa
gttcaaccaaagaagcaaaattacttattgcactcttaatatctttagtcaagtcgggagttggctgagtcgatttaggatagctttcttgagaacgatgtcgtaccagttgatgattgttgatattaagacactataaaatgaaagtttttagcgatagaatatcataaaatcaatcacatgaatcaagggagggtagtcaagaataatctcactaagggtattattattgcaaataacactcctaattttgtgagaagtaatgagctggcaaatagaggagttggtgtcaaagccggccctgaaaaaatgagagcctaagatgatataaaatttcggatcccttaataaataaattaaaaaattaacctaaaaaattatatgctacatttcataacataaaaataaaaaaaatatatattaaaaatctgaaataagttctaaagtattacaaaaattagtagatttgtatttttttaatttgctctatcatctataataatatttttatctttttaaaatttcaaccatacaataaatcaaattcatgaaaagaaaaaactatcaagtctatatttatctatagctaaagtaatttctaacaactacattaaattatagtccataattataataagatatatataaaaaattaaaatcaaatcaaataatattcaagaaaaaaattatt

SEQ ID NO: 67179 - DNA, 864 bp, Cannabis sativa
aaataataaataaaagaaaaattatcttatatactatttttttaaaaaaaattaaaatgtgagtttttccgtggtttctctaatggtttcagtgtcgattagttgtgatttagattgctccattaattactatagagattcttatataaaatttcgtaaatatatatatatataacttataaaaataaaaaagtctctaaataaaacttaattttccccgtatggagactcaaagcatggaattttcaaactaattaattatactccatcttattaaacttcatctcttcaacatatatataatgaaaatagatgatgaggaatatagtaataagtgattaaaaatgtaattaataaaaataaataaaagaaaaggattattattaatattattattaccccattggaggtgttaaagctaatccatttgccagaagatttctttggatcccttcttcattttcttctgcataattatttgacactaataatatacacacaattataattcttattaccaccctcattatttaatctccttcctctaataaccaaaaactatatatatatatatatatatatagaaatatatactatatataatatacttcttcacttctttagtgatatatatatatagagagagagagagagagaatattttgagttttgatctatatatacatatatagcataatatatagcttaagtagcaagctcaacaataccattattattattattattataattattattattactactatttgtgattgtgactatattttttttatatatatatacatatttttgttcatccacttgtttatttattgattatttgtttcactatttgtagta

SEQ ID NO: 67180 - DNA, 747 bp, Cannabis sativa
gatgactctgactgcatagtactttaaacaaggtattcttttaagagaccataacgaatctaagaagctgatgagaaaagtagctcgctttatcatcacggatagagtaatgtacaaaagaagctactgaatgcctattttgaggtgtgtggtgaaagaagaaggaaaactcctcatggtcgaggtacattagggtttttgtggcaaccaggctcgaggacaaagcctctcaaagaagatactaaggcaagggtacttttggccatcaatgattgaagattcaatggattatgtcaagagatgtgaaaagtgtcaggggttctccaaaatacccagggtcgccccaaacaagctcaaaattatgtagactccctgtccatttgctgtctagggattcgatctcatagcctctctgggcaagggaaaaggtagagtccaatacgcgataatggtcatggattacttcaccaaacgggtcgaagaagagcccttggccaccataacattaaagaatgttcttggcttcatgtttaagaatatcatttgtcgctatggacttctacaaaagatagtgtcggacaacggaacacagtttgatagtgacctctttattgatttatgtgaaatgcactaaatcattaagagttatttaggagttgcttacccataagaaaatgggcaagtggaagctatcaaccaaactcttaaagatatgctaaaaaagttcctggagcaagctaaagggaa

SEQ ID NO: 67181 - DNA, 748 bp, Cannabis sativa
ttgccatcaccttcttcatatcctccttcaaggttttggccatcatcaaggtcgtcaaacacgttctcagagtcctcctctcagtttttggcgagggtcgtaccttcttctttgacaccacctgtctggaggtcagaggcatgggagctggcctcctccatgactatgtctagcagagttttcttgctggtgttctttcacgtattcaccatagttgaagtgaggcaacaactaataaatttttctcagctctcaatgaaagcaccaaaatatttacctagatttttgggaaccaattaaagagcttaaggaaatgcaacatattaaacaacgaaaaaaaaaaaagattttctatgttgttcaggcgttaatgatccttcatccatgagtgagaagtattagccttatttggtaaatatttgagtattaaaagtgtttacaataataatctttgtattctttttgtttctctttaagaagaaagctctctaggaaatttagcagaggttctacaagtaaaaattgttcaccctctaaacataaaaattacggtattatttataggcagatgagtgggtaagaacataccttttaccctactagtgtttcttactcaccacgcaaaaaaggtcaaaaaagactacaagaccatcaactattagtttggtaggtagctcttccatcgtgtggtgcttaattgatgcaggctatcacgtgaggacatggacacgtgtcgttcaaaggtttc

SEQ ID NO: 67182 - DNA, 947 bp, Cannabis sativa
ttgatgttaaataaggtaattgttgtatttgggttctagtgtggatataaatgatttcagctcatttgttacaccatgttatagtataatgttaaattatattgtattgtattaaataataaataatttaaacttatttagtatattgtataatattatattagagtagattgtattatattaatattatttaatataatattatatttggtattgacttgtattaaaaggttatgtaaaattatactatctcataactcgatcctgactccagatccaatcttggatctggatcaaggtccaggttcgagattcgggtccgagatcaaggtctagagcccagacctttttttaaatatttttatacaaattaatacaaattatttgttatgtagtaaataatatgattcatatttagcttgcaaaaaatatgattcatattacattaaaatttatggtcataataattgatacaatacaaaattttatccaaacatagtgttagttgttatttaatacaatacgatccttacggcctatcaaactgagcccttagagcatctccaatagtagcatcttaagtatgctaaaaatttatacatctaaaaatgtaatattttattttatctttcttcaatatcattttggcactcttacttctaaaaatactccaatgtattacactctttaaaagtgatataactatgatcttgcacattattatttaatatatattctaatttttagctacaataactttttagcttcaattttttatttaaaaacaatgaataacatcaatgctacaatatagcatccatacaaatttataaaatgacatcattttttttccaatggtatagtatcttaatattttgtcacatgatatgttcacctcactaagcaatctctaaaattttattattagagatgctcttagatgtgtg

SEQ ID NO: 67183 - DNA, 687 bp, Cannabis sativa
tatggccgttagagtaccctcgacggccgacgccactaatgcaatccatgaaaagaatgctgagagccaagttcattcttgatttgcttaagaatgctgagagcaacacaaaggtgaagagtttaaatgttgattccctattcccttgccatattgagtttaccttgtctggggaagaagaagttgttaagaaagaggccgagacttagttggcaacaaacaaatcataatgttaattaagtacatatagttattttaataataattagtaaaatactaatttattgatttatgctttaataaaaaattggaaagagagagaattaagaagagaacaaataaagttaattaaagagattttagagtgtcatgtcaccgcctcatacttctcctttatagatttatagtttaagagctcgtttgtttataggattattaaatgataacattatatttggattaaatattgtatattgtatttaattattaggactataaattaattcactataaattgtattatttaataaataacgaattatttatattagtttgtattataatatttacaaaatattcaaaaataacttaataaaatttaaaaaaaaaaaaaaaccaagacctaagttgaaaattgaagccaaagactagtccattagaatcgaaacctcaagatattcagaagta

SEQ ID NO: 67184 - DNA, 1454 bp, Cannabis sativa
aaaaaaaaaaaaaaaaacgggtcgggcctaactcagctcgattatctcgcgtcgggcttgacccgctaggctaaaagaatgagtcgggccgggctgggccgggtacattcctacctagaacatggtccagtcggacctggacgctgaacccaaaccctagaccccgaacccagactcaggtttgggtttgggttcgaatttggggcccaagtcccagtttggatctgggtccgaagcatgttccaagtccgagatttgggtctgctgttcgaggttagggtcggggtctagggacagggtcaaggtccgggtctggggtcggagccaaggtccaggtccgggttcggggggtttggggtctaggtttgggtttgggtccgagttcgagtccatagtcacgtatgggtccctgtccgaggtccagggctggggtcagcgccagggttgactctagaacctttgtaaatattataatacaagctaatacgaatcatttgttgtatattaatacacgacttacattatattaaaatttatgatcgtaataattaatacaatacaatattttatccaaacataatgttatttgctatttaatacaacatgactcttatacgacctactaaacgaacctttatagtacttacttttgtatctaacttattacttaagcttattcttttagtggaaagtattcaaattgttacagttacgccttataaatagctaaattattttttattttgcagcaaatatatgcttatgatgtttgtcaaacataataatttaaatatttttgttgccaaaaaaataatgtagacatttaagtgctacaaacataacaatttaaatatttttaccactaaaataataatttaaatacttgaatactagaaatctaataatttaatgaataatttgtaattttgtttcttgaacttttgacattactgatcttgctctttaaatatacagcttgttaaaaaattttcctcaacttttacatttattgaaatttagttcttttgttaagttttgtcatattattccgtttaaatacttacatgtatttgtaaattggtagctttgttaagtaaaataagaaagattcaacatttctccttttttaagtaaaattttggcaactacattattaaattgtacccctttcaaataaaataagaaatattcaatatttctccttttttaagtaaatcttaaaaatttagtttagacttttttttaaaaaagaaaatcattagaatgattaagaaaatttaaaaaaaaaaaaaaagaaatgaaaatttaaaacaaattaagtgatttaaaaaattacggacgaagggcacaacaagtgcttgaataacggacgaagcttgaaggaactaaagcattgacgccatgaccaacaacttgctctcgatgtgcgctagcttgactcacaaaataatggg

SEQ ID NO: 67185 - DNA, 998 bp, Cannabis sativa
taatcgtcgcttgagatgattgaatctcgtaaattttttttttttgtctcttgattttgatactagaacattatattattttagttattttctggttttctttaattataagtattttgtttatttcacaataatattaaaactaacaagttcttaaagtgtgattatccacattataaatgataccaaaaatcactagttaatgatagagtgccatattagtgtgatgttgagcttcttaaaggaccaaacagtaattctcttaaatatagtgtggagatgctattatttaatattttatgtgatctttcctttattttattttttttataaataatatatatgagattatttataatataaattaaataaaaatatagaattagggacagactcacatagaggcgatggtgcaattgttctctaaaaaaaatgtatatacatgttagttagttaaagcatacatttataataaaatatgatatttatatacaccttgttaattttggtataataattaagctactttacatatataataatggtcaagggttcaaatgctaactagtgtacatttttatttttaaaatttatcttttcaacttctactaataagacttgtgtttagtaataacatatttattattatttttttcatataaaatataagtttatattaattttagagaaaattatgtcagacaactacaatattaaggtatttacggatttgttgttcgctattttaaataccattctattctaaatagatttgggataagtctactgaagtaatcgagttcccatcactccacggagcatacatgtggtaagcttagtgagaagccttttattatttattttatttattaaattttcatcactccatgtgctccaatttaattcttctgattttggtttttttacatatacaatactaaatttatatattaaaaatatttttttctttcatattttttagctacgttattaattgt

SEQ ID NO: 67186 - DNA, 3959 bp, Cannabis sativa
  modified_base (965)..(970): a, c, t, g, unknown or other
tttaaaattatgtgaaattatgtgcaaccgtattaaccgtattttttttaattatttttgtgtatttgtgaaataatcccattaaataatcgagtgagattatatttgttaaattttcggagatgttctctttatttcttatttgaaaactaatagaattctcttgtacacaccttctttagcattttatttattcaaaaagaaaaacaagtacatatacaaatttcacttcgatacatttgaagacaacaaaagacacaagttaggcacaccacacatggaggagaaagaggggagaaagaaaaaaaataaagaaaatgatattttatagaaaaaaaaaaaagaatataaaaagagaaacaaaaatggcataatatcatctctaaatgagaacaattaaatattaatgaaatatatattttgtagtattgatacaaaatcaaggaattactgatgaagtatgtgtagttgtaagtttgggtttggcatgtagtttgaggatggacaagaccgtaataactagcaacaaaataaggccaatgaaggaagcaatgagggcaccttctccacgctcacaatatgtcccaaatttgtcacaaattttgttccaccttgcatgagaatttccgtttttacctaactctgccatgaaggtagctgcaccgtctcccgcggctgctaatgccactatcaactgtacccataatcatatgccatgaattattaaataatgaattacacattttattaaggcaaattaagatttttttcctcacgaacttttacattctattgagattgttagatttaagaatttttgtctaatttcattcaattacggtttcggtaattgtttatgtgctaaaccatgctctccagacttttatatctaccaaatcatgtccctcgaactttgatatgtactaacttttatccatgttagaatttttttactaaaattggannnnnntccttaaattcaacaatctcaatacttcaagagacatttttaacgaccttaaaagttcagatgacatgatttgatagatgtcaaaattcaaggagaaaatcttaattagccttttattaataataggagtaaaaaaaaggaagtaccatatcgaaaattggaataatgacaaggcagagacccttgtcgctgagtttgtgcttgaaaatgtcaagagctatcatcaacaagttatgcagactagctaatccgttggctaccacaaagaacctgttaacatgcaccatcaaagtaaatcataattattgcaatattcccctacttaattttcattaaaatatagtaaaattagtttagtatatatattatagatataataaaaacaaagaaattaattagctataattaaaaaaacaaagtaaatagtttagctaaggtcttacacaaatgctgggtcgtattggaacttggcagtaagagtggctgtaactgggctggtcccaatggtggcaacaaccaaagtctttttttctttgttaagtgccataacaatggttgcggaagccgtggccaagaagcaagctaacctaagcatgaaaagggtccaatccttcatcatcgccgccaccactgctgccatcggactcgactcatcctttgctttgtctccattttctagagccattgccttgttcgagtgtgtgacaatattttttttccttttgaaatggaatttgatgagatactgtatagagcatttagaacttattatataacaattttatttggtaagccaaataagctaagtgaaatttgtgttagttttttggtttttctttaggtggtccaactatcaactgaaacttggcgttttggttggtgtagctaattagctaggaaaagttattataattactgtacgtatctttgtggtaattaaattaaataatcctttgtagaaatctctagtgatgaagtttcaaattattataaaaaccaaatatttggtgggtgggtactcctacatatatttatatacatggtgtattatatccttataacaaattgagagattattttaattctcaatatcaaccatttgagtaacattaatgaacttgtactctactatttttcaaaattacacttcattattcatcatagctatccctacgtgatgtcaattttccaactactaattaatttatgttgggcatattatctacacttgatgagctcatatcacaaaaataaataaataaataaattactagcaatttcagcaaaatgaacgttaataacgtagacattatcacaaatacatccatttaagatatacacgtaacaattaagcacaagccaaagcaaacataacaaaacaaatgattgatggttgtcaaaggatagtgacatatagtgtctgttttgttacaaatcaagtgttttgagagttcaagaaactacacaaaccaaacgttttgaagtagcttcacattactaaaagcaaaaacaccaaagttcaatgcgtttaagcatgcaaaattccatcacattcacgaactatagaaattagggtgcttcaagtttcagtaggggcatgaccggccataatggtgtgcaaggtgggctacagggccaaaaaaaaataaaaataaagggctcaatatattttttctttaatgtccaataatttttttttttaatgagcctaacttttgaagaggctaacagtttgtcattagtcacttccatctcaatttctaaagatattttcaattctattaatgcttttaagcaaaaaaataaaaaatctattactgctattcattttttttttcaaaccttttataatttttttttcttattattttttgttctattagaatcaataacaattttaataaatagttcgagttttttggtgtttagaaaaatatataaatgaatgataatatttaaaaatatatttataaattgtatttttttagaggcctaaattttaaattagaacatggcctctaaaatatttaagatgctagtctttacctagtaaaaaacattataaagagaaaaaaaaaaaaaacaagaaaaaaaaataattaatagaaaaagaaagagaaaaaataataacaaagaagaaaaaaaatatatgaattatctttaacaaataattaatcattgataaaacacaattaaaaattcataacactggtttaaatcacaagtcggccactattttctaattagtcaatctgtcaccttcatcaatatttcagaatttataagtacgcacatcaagtgattcaagatgagagcagctagcctaggaaccttccatagttagccaatttctaaaaattaagctttaggtggcgtagttaaggcatgaatttcgtagtagcaataacatttgcattgtcattaaacaccactttgcaattatgaaattcgcgggagatgtatccacagtgatagctcactgttaatgattttagatgatggtagcgtcgtccaacaagtttcagcgttgtttttgagaatgtacatcgtgagaagtgaagtttctccaactatatatcgaagcttggaaactgctctgcctaatccatcacttgagaaattgccaccaataatctgaatgcgtttgacttgactaaaactgatgaaagttaattgaaacaagattacatgagtttgtcatcaatatatatagttttatttatagattggcggaagtatctgatcaacttgttatagaggaagtaagtgatcaagaattattagattaagtggttaggatctgttatattagttgccacagggaagttagttattgttgttgtagttaggcttaaccgacttactacactataaatattctatgtaatgcctttgttcaatcaatcaatacaaaatcaattttctctattttctctcctattatggtatcagaagaaatactctaaagcttcaagaacttcattccagc

SEQ ID NO: 67187 - DNA, 647 bp, Cannabis sativa
  modified_base (337)..(349): a, c, t, g, unknown or other
caccattttggtagaatgctattctattttaaaaaggaaggaaagaacattccaatgtaacaagagaaaaaatttaataatttttttatccattttttacatgcattttaaatttaatgcatcaaatgtatattctattcttatatacaattcttttttacatacaatttaaaataaaactaaacatttctttatacatatatttttttttcttcttttgaatttattatttattattatatttattttaatttgttgttggagacataaaataactataatttgttttattttgatgctagtacatatgtgaattttttttcataaatattaaatnnnnnnnnnnnnnaaagtaaccaatctaaaataaccggtccaatccacattcttaccgattagattagattgaatttgagctattgtaaggatttgattggatccagaaaataaaatccacacttagtacagatcaaatacactatgagtacgtaaaatagtgcggattggattgaatgtacacgcaggtacttaagctaaaaaaaactcttttgagttaattagttttaatagttttttaaggaagagtttcataagaatctaaatggaaagcagaaggaaaagaaccacctaggacccagcccagtaga

SEQ ID NO: 67188 - DNA, 878 bp, Cannabis sativa
caacttgtgccagcacaatttcgccagcaaaaaatcttttttcttgtagtgtgagtagtgttaacaaatgtatctattagaaaaagggatttttacaaaaaatattgaattttggatcaaagtttacaattttactgacacatagaattttttttacaaaaatactgtatttttataaaacaatctaaaacaaccgcaaaataacaaaacaagacaattaaaaacaacagtagaataactaaaaaaacaactgtaaaataataataaaaacttaacacagtacagaatatgaaacttacacagtatacttgaaaaaaaatttcaccccgcaataaaaaaaagaaaaaaaatttaaaattttaatatgaggtgtaataactcctaaaaaaaaacagatagatgtatccataaagcggcaggttatactcatgagtttaaatagctgatttttttttattattagaataaactttattaattatatctacgtacgaccagtacggaggaagatgtttttaggtaatgtttgaaaaatcaaaacaggaaaaataaaataacatagcgtattggaccattttattttaaaggaaataaataaaaataagaattattatatggttaattaatttggatattactgttaaacatcacttatatatattatatgtttgacaaagattatattaattaacacccccttgtttgcttcaacaaacatacattataaattttaattgttaaattaattttagtcaaatttatttctaatattatagccaaattatctttaaaatatctattataatatcaaaatttctaattcatcataacaattatacataaatatttctcaatgagaatgatataacattgtatta

SEQ ID NO: 67189 - DNA, 1137 bp, Cannabis sativa
  modified_base (182)..(189): a, c, t, g, unknown or other
ttccaccgctgccaaacacaattttagaaaacaaaaaattcacatatataacataattaatatatatcagcttaaataaatctccgcaatatgtatattataaatgataattaaatctcatgaataaaccctaattattcaataatctaaaatattgatcttaagcggtctttacaattatnnnnnnnntaaaaggatttcgtcctcgaaatccaacatgaacagctctggatgttgagtcctcatgccagactccaattgctaagtggcttcttccgctttactatttttccagcgtactttaaccaatactaaggttttatttcgaaggaccttctcttttctatctagaatttgtattggtttgtttcatcataagacaggtccggttgtaacaccccaatgctcattaactcagaatatgcattggatctgacacgtactttcttagcattgagacgtgaaatacattgtgcatagctgacaatgctggaggtagggctaacaggtaagcaacctgtccaatcttttcaagtacttcaaatggttcaatgaaccttaaacttaacttgcctttctttacaaacagtctaaatacttccgttctcccattttgtcccaatgaattgggaagcgacattttctaccatagagcagctcgtagggagccattctgatggtactttgataactgttattgtaggagaatccaatcacaggtagatacttgttccacgaaccttcaaaatccataacacaagctcgtaacaagtcctcaagtatctggatagtttgtttggactgcccatctgtttgaggatgaaaggtcgttctgaacttcaaactagtacccatggcctttcgtaaactcatccaaaactttgatgtaaatttaggttctctatccgatacaatagattttggtatcccatgaagacgaacaatctctttcacgtacaagtcagcattttgatctactgtatatgttacctttacagacaaaaaatgcatggactttgtaaagagatccactacgacccaaactgagtcatacattcctgtggtcctgggcaaatcaaccacaaaatccatcgcaatgttttctcacttacattctggaagtgataagtagtcctg

SEQ ID NO: 67190 - DNA, 919 bp, Cannabis sativa
tcaagttctgttattagttgttagctacataacagaattctgttagttgttatttgtttttcttgctgtaaaaaaagtactactctataaatactttgtattttgttcggttgtaaatgaaactttttatttctctctctctctctctctctaaaaattcatctctgaattttacatatggtaatattgtagtagtaacgactgacatggttatttcttttgcatttgtaggttgtttgggccataggtaatgttgctggtgattccccaaatctcatgatctagtacttgtaatgttgctttcattactggcacaattttttttttttaaattgtaagtcatctatatctatgtaatatgagaaattatatatgcatcttgtatttataattgataaatttctcttatttataattatttgtagtattttgttgtaatgtttagagacttatgtaaattatgtaaattgttaaattatgtaatgtttgatcatatgaaaattaattaatgttgtttttttaatttatgtgaagtatttatttattaatattaaaccattaaatataattaaaatacatatatatatattaaaataaataatattacgaaatcagatttttaaaaagaaaatacatagaacttttgatcccaatttttatgaaaaaatgggattaaaactattattttatccctttttctatatgaaaattggaactaaaagttaaaaataaaaatgaaaaaaataggaaaaagcttttaatctcaatttttacaggaaaatcgaggtaaaagggtggatttaatcctgggcttcctatataataagtgtgattaaacgctaccattttatcctagtttttataagaggcttttattctatgagcgaaaattggaaaaaaaaaatactcataaaaatca

SEQ ID NO: 67191 - DNA, 634 bp, Cannabis sativa
ggaagactcttcggatgattatgcttcgtctttacttgttcgggccaatgctcctgcccacgtgcagggtatttttgactggaatttatttacttcataacatgttttgcatcatactttcttttgacttttttatcttgttttcatgtagtcatgtcctagaaggtacttcagggtttaaagaaggtgacagctcggaccagactccttcacccaagaaatctagaggcaatgaggccccatccaaggagaaggtgctggtcggagaagtaatagacctctttgaggtagtgcctaccgtggaccctccatttcaaaatgtctcaaaatctaagagttccaaagggggaatctcagatgggtctggtcagactaagacttcttcaactactgtggtgttgagcacggaggccaaaaagggtaaggacatgctcctgtattatcttcatcggtcacttcctgaagtgagtgatcagttgtccggagcggacaatgagctgtccctagaataggtgatgggtggagtcctgaaggaggctgttcgggtaagtgtttcattctttacttttgttttgcatttttaccagttcgagttttaacttttttcctatgcaggtcaacttgaagatggcct

SEQ ID NO: 67192 - DNA, 1293 bp, Cannabis sativa
  modified_base (759)..(768): a, c, t, g, unknown or other
tatcacagttctaaatattcaaatgcacaagagtatgtttcaatatttttcctattataaaatagttgtttaattaatttaattattaacgataatatatataataaaaacagatcattattgtatatttatttaataatgtgcgtacgtacgtgatcatgaagttaaaatatagttcatgattttgataattaaaagatgatcatatgcacggttggaataataataataataataataataaaaaaaaaaaaaaattattgtagatttgttttttcattgatcattttaataaaacatatatatattctctatcaattctcaatattttagtgcaagatgctaacaaaaagacatcaaacaagtgatttgcagtatctttaaaaaatataaaagtaaattaatatatctaattattgagttcgtgtgcccctatatttatatatatatatataccaaataaattatatatttatatatatattttaaaaaaaaattaagtcaactatagtgattgagtttgtgaagtcatttgcatcataattatgtggtaacttatagtataaacttataaattaaatataccaaaaaagttaaaaggaaaaatatgtaggacaatactgtatgtaacgtcctagctttaagtttttattgggcccccttatacctacagaataatgactcttatacacgagtacgccactctggcggctttatggagtgatgactggccctacaaaccaacacaagtgtttccannnnnnnnnntcctcactcgcatgcttcctgagaaaactttctaggaagtcacccatcctaaaattacctcaagtcaaacacgcttaaccgtgaagttctttcgtgatgagctactgaaaaataagttgcaccaaataaacacaaataatatatgtacaaattaaaaactaataaaaaaagattttgtgtggtctatagtgtcacactaatatatatcaatgggacactatagataatcttatatatatgataagttttagagtgtggttggaatgaattcgatatgaaatctcaacaaatttgatattttaatattttattgcagcatgaccgatcctggaatttagtaggttataggaaaaaaaaatatttttagaccttatttagagaaaaatgtaatctttttcgaaatcagtagaaaatgtgttatatattttaaaaggagacaaacttcttttggaccattggactaggtggatcttaaggggaaatttacatggtatactaacttttgccatttttttacaaaaatac

SEQ ID NO: 67193 - DNA, 1552 bp, Cannabis sativa
cctccatcacctgaccacgtttttctaatttttttttcttcttttttctgttcctgtaaatggccattactcggtctttatctttcccattaccattgccgagaaaatattcaaaaataggtattacatctcttgctaacaaatcaaaagacaaacaatccgttgttgaagatgatgattaagactttgctcaacctaccaaaaaaatgattgtaagcctgttaagaagaaatcaaaggttaatattgctgaagacatttccatccctaaaattaagaaagggaagaaccacgttgatgagagtctgaagatttctttttagttttttttttattattttactctaacattgccctatcttttcatattactagtttctttaggaggtaataatcctatttattctatttttaaatatctttaaggattataagttttttttaacaaaagtactaattattttttattttatatatgactgattaattgttccaccgagtgtgtagtgtagttgcctggaatgctttgaataaggtttctcatttggttgttcttcagagttcaatttcccatggtaacacttatccttggccttaaaaattatgctattgtagtaataagaaacttttaaagatttaacagaatagtcaatgtaataagaaaaaatttataatttcacattaatgtgttaaatatgatgttgataatgttttatatttctattaatattttagatatgacatgcaaacttaatacaattgttatgcaactaatgagttgctccttgcaaagaaggaggtgttgttggttgttgttgtgttgctgaccatgttcacacaatgaatacctagtgaagtaaggttcttctaattttaattgtatgtagaagaataggcttagatcgtcctttatcctcaatggttggtattcttctttaacttggtatttcagttgcagttgagtattttctttgtgttgcgttctagcacatgtttgagcttgtgtactagttctttaaatttgtaatctattgaaatgtattagtagcttcataatttacataattcgtcccttgatcaaactgtccattacaaatatgagaaacaaaattgcgtctttaaactggcagtttaaaaatttatgcattgtaagtcaactatgggataactatcaagaaattgtaatgcaacaattatatttgttgtgaggcagctaatattaaaccttaaaacaactaataatgcccatatgtaatacaaacaaaacttaccaatatataatcgagctttctctgtacgagtcgtgttttgccaatttcgagccatgttttttttaaaaaaaattataatattacagtagcacaactattattcaactaatatacaacttaattgcaactagaaatagaaaattcgaatggtcatcgtcatgaaaaagtttgtcggtatttttttgtcactaattaacaatcaattgtaccttaataatattatgtggagaaacaactgttagaattttgtaaaccaactttataacaaccaaatgaatatat

SEQ ID NO: 67194 - DNA, 988 bp, Cannabis sativa
tatgatataggtttctttccctctgtttggatccggtctagagcaattatcaatcatttcttgttgggctctcatgatctccatctattgatccatccatttttgctatttgaatgctagattcatagctgctcgggtatcctcctaatcatggtgaagagtgttggtatgttcttgcatctgccctaaggaatctcgcatattttacagcttagtatcatctccaatcatgaatcatcactcgaggttctctaatagatatctcctgtaactggcccaatctcttcgtcatgagtagtggtggttccagtttcctgtgtgccctgagtaaatcaagctagagggtttgttactccctgccctgctaatggtggaactcgtggaggcaaacaggtgcttggattaagatttgcgaccattaaattgctttgattaggaggagttttcacattaggatctgtagccattggattagctgtttcaatagtttgggaccttttgatagttacaaccatcttcggatgatatagaaaggatcaaagcgataaacattgttcttttcgctcttaatgaaagtacaaaaatattgacctcgcttttagctaatgacgctaagtcaattaaagtgatgaaaataattgataataaataatataattaagcaataagaacataggatatagaggttcggccctatgattatggtaatagtctactcccattttacttgtattacttcgaagaattaataagatcacaaggagctagctaagtaagtttcttaataattctcaagaaaaagttacaattatttgacatcataagagctctctaaaaattataattttttggtgcttgtgcaatggaatgactccactatttacaggaaaaaaaatacaatatttaggtttcacaaaattgataaaagtaaaaaggaaaactaggaaggtttcctattatttcttgtcagtgcaagtcaatcccataa

SEQ ID NO: 67195 - DNA, 892 bp, Cannabis sativa
ctatgctgctaggactaggagtgtcattgttaatttaatattttagttccaataaaatgtcatcatataaattattattgatgtagttttgttatactaacatatttaattataataaattataatttttgtgactaattttttagtgtcaaacttattaataagtattagataatcttacatcactaatgtgtgaaaagataatagtatatataagaaaaatgagctagtactcttcccatgaccaattaattttgagatagaacctctttcattttatccctaaattctaacaataaataatataaacttaataatatttttcttagcaatagtttattttagtttttttaattatttttaattttaatcacaaattttatttgattcaaattagatagtagttttcaataagtaaatttaacagtaataataagtaaaattggctatttacaatcagtgtctcatttgcaccctaccaaactaaattatgagcacatgttaatattttaaaaaataattttaaaaaattactctttatatattttataaaattttattgttcacattttttatattaatttctataattaatataatttctcttatacttattttaaatcatgtataattttttttatatttttttttctatataattcatataatttctttgtcatatatttaaagtatattttttttttatttaatatatacattttaaataatataagaagaaagaaaaaaatagtataagttaaagaatactttatatataattaaaattattagaataaagtatgtttataagttcttcaacttcaaataaaaagacgatctctaatgaatcagttgtactccaatatattagaagtaaaataaactttatttt

SEQ ID NO: 67196 - DNA, 502 bp, Cannabis sativa
ttatctttcatctaagcatattgatcatgatagcttcaatttcattttattaatgagaacttcttaaaaatatcaacggtgtagtatgttttaagtgtcgtgttgttattggtagaattaagtattaaatcccacataatttaatttattcactatgataatgaaatatcactaactttttgtaagacaacaccttatgatgaaatactcttattctattgatgcaacataatttgaaagattgtaatattttaaacttattagttttatttaaggcaatctaaaatcaaataagtaaacttaggactgttatggatgataatggtgcaaattgggaacgattgttcaattatcaccctatacctaagttatttatataactatatccacctcgttaactgccagcatggcgtggtaagtaggcaatcaaataatggggaataataatcacggttacaatataggctttctctggtccaacttggtagtcgcctaccctagg

SEQ ID NO: 67197 - DNA, 898 bp, Cannabis sativa
  modified_base (59)..(61): a, c, t, g, unknown or other
ggctccttgtgtttcccatatgttgtttgctgatgacagctttctctattgtaaggcannnagagaagaggctcaacgggtcctggagttgcttaacgcctttgagagggcgttgggccagaaggtgaaccttgttttcttcagctctattactgatgttgggactcgtgattctattttgtctacgcttcatatgagggcgacagatgatcatagtttgtatctggggctgcctagtatggtgggaagaaataagactgccacttttggctttctaaaagaaaaggtgcggaaaataattcacaagtgtgatagtaaactcctgtctagagcgggtaaggaagtgcttttgaaatcggtgattcaatccttaccgacttatgctatgagtgttttcttgatcccgttggagatttgtaaggatgtggatcgacttatgggtagatattggtggcatacgaagtcttcacaaggcctaggtattcattagaagagttgggatcagatgtgtttccataagcatcaaggggggttgggttttcgaaatctcagggactttaatttagctatgttaggtaagcaaggttggaggcttttgacgaataatagttccttagtggctcggttgtttaaagccaggtattacccccattcctcgtttctggatgctgaattaggtgttaatcctagctacgtgtggtggagtattctagaggcaaaagttgtggttaggttgggtgcgagatggcgtgttggagccgggttgactataccagtccttaatcaaccatggcttccgtgcaaggaacatccatatgttacctcttcgcatgtggctctccatgactgtaaggtcaataatttattaaaagtgggctctcttgagtgggatgaggaa

SEQ ID NO: 67198 - DNA, 563 bp, Cannabis sativa
tttaataaccaatgaaagttttaactttttctattttggtgttagatttttttttttttttttgatattgaaaaatttaatatgctacatacaattatatgttaaaaatgttgattataatgaatggttaaaaaaatatatgtatagcataagaacaaaactatattcactactatagaattattttatatatatgtgaaaaaaaaattagtaataaaaattgaaaaaggtgtggtgtggaaattaggactcaattatcaaataaaaaaactaaaaagatattaaaaaacaaggaagcaaatcaatgaactcgtattagtccttttatgtttatggggtctatgggtttattatatgaaaaaaaagtttttacaatataagttttatatgtacggttaagttttcactgttgttccacagttgttttttagttgttctatagttgtttttaatctattttgttttttttacggttattttaagttattttataaaaagacagtatttttataaaaaaatttgtgtaacactaaaattataattttttttccaaaattcagtat

SEQ ID NO: 67199 - DNA, 867 bp, Cannabis sativa
tcttcaccaaaactctgtaaataagagagtatctcacagagaggtcatatatgatatattgacattttattggcaacaatttttataacatgaattgtttttagtggtactaagctaagtcgatcggcccattgttagggaatagggaataagtagtagttatgttatgcctaatatgcttcggctcaaaacaagacccacaagtagtcaatcaatgtctactatgggtatcttccatttctaagatagtaaaagatcatgtgatttggttgtcacatagctatgcaaagaaagcataaataaataaataacaagtatagtaaaattgtggatatcctcaaaagtaaatgatgattctccctccttatttagtgtatgtatgtactttggaacttgtggcttaggtgtaaatgtaaggcatctagttttcagtgaaatgacgtaatcttcagtacagtactgtacatgtacatttaaaaacaaaatcactattgaaagaaaaaaagaagtacgattaggccacggttcccagcatgggatgggctggcaactatattaaagtctcaactgagtgatttccaaaactgttattaagccgaaagagttggagattagaagcatgtttgatattcattcttatttttttgttttaaaaaagtgtttttagaaatgaaaataaaaatagtttttaaaattttcaaaactgactcaaagtgaattattttttaaaatagtaaacaatattttgttatttttgaaatttttgtttttttgtgattttgttttctgaaaaatgttttcaaaaaataaagccaaacaaacctaattgtattaaaaaaaactattttctattttcaaaaataaaaa

SEQ ID NO: 67200 - DNA, 1337 bp, Cannabis sativa
ggtgtaaggacccaatggaggcttgaagcgaggacgttacacaaaaccttcccctaaatattttaccccctttttcttttgcgagaattttctcgccttgggttttgccagtgccatactacgctgaaaaattgttgaccaaattataaacgtattaccggtgccatattacgtcgacaaaaaccttacattttgtcgctcaacattctcgcattttggtggagggaaaccaacaccttctaccgacgtgattaacgaaacacgccattaaaaagacttttgtcggagctttttccttactatgccggtaaaactatctttcactggcacaattttacgccagaaaaacttgccaaatttttttaatatttgaagagttttgccgacactgtaaagaaaaggcaccggtataacttaacctttgtcagcgcaaaacccaaaaggcaccgacaaaagttatcatttttgtagtgtttggcttatatgtcttttacaacttatagaatataaagtaaaaattagatagaatatttatttcaaattcaaaaactcttttgatttttattttcaattatattatgctatttgattattatcattttttttaattttcattgatacccaatgagtccccatatccaatggagatttcctactccaaacctattggggattaaacgggacgggggcggggatgcgtacataaatagggaccaaggatgaggttcagggggtgcatgccttgctcattacccacccaatttttgttcctaattttatggaaatgaaggttataaattaggttgcatttgcattaacttctcctttttgtttggtttagttttagttgtataaagagatgttcttgtgactttttatagcaagtcttatagctattttgacattctatgaacttggataaaaataaaataagatatcaattgacttgctacgtcaaatagtaaatctgtttcagcagatcaatcatcatttaattatgagtataatttctttcaaaaagtagtttattgttttatgttcatatcttagattgtgagaagagcatttcttttgtaaaaacttagagtagtgtaggtcttagagagaaaatttttctatatcacattttgagagaaagtgagtatatattttcgccaaaagacttttctcagactcatttccagagggaggaagtgagcacacgtcaaggtttatatatactacccatttttatagtatatataaaatcatttgctactgcaagtaccatttttgtttaaaaaaagtaaccaattgttataactatttatcacagtaacgttttaataattattatt

SEQ ID NO: 67201 - DNA, 553 bp, Cannabis sativa
gtagtcacggcgagacaattagggatgcataaccaacaagtaactttgacaatgatcacttctagtcaactatagtgaatccactagtaatcacgttgggatgatcgagattgaataacggatcgcacgtgccttcctaaaatacccctaatcattatggaaatagactttcaacgatgattgatcccagatagtgatgatttgcaaccaacgagtaacattgaccaagattgattctagtcaactatagtcaatccactagtagtctcattgggatgaacgggaatgaataacagattgcacgtgtcttcctaaattgccacaagtcattatggaaacggaaattttaaccaacgagattgacaccctacagtgatgatttgtaaccaacaagaaacttcaacaaagatcggttctagtcaactataatgaatctactattagtcacgtcgggatgatcaaggataaataacggatcacacgtgccttcctaaaacacccccaatcattatggaaatggacttgcaacgacaattgatacccgatagtgatg

SEQ ID NO: 67202 - DNA, 1797 bp, Cannabis sativa
taccttcaacaaatttatttgcacaaatactgatatgccacgtcagcataaataccaaaattcaaaattattaccgaaaatggaagaaagttacaaattctcgcttccaaaaatttcagtattttgcacgttttttttaaaaaagaaaccttttggttgcttttgatgtaaataatatatcaatttgttactttttattaaaaaaaaaattgattcaagataattttttttctcatacacatttagttacttatgttgatctgtcaattttaaaattaatataaatgtaataattttcataatgtaactaattctattatgtttaagatactatttggtaactttataaattttcgtattaacatattaaaatttctttattaaataaatttgttattaattattaaaaaactaattattagtatactatattgtaacttttaaaagaagattttatggtaatttatgatgttacttgatatgttaaagtttattaaatttaagattttattactttttgttacaaaatataaaaaaataaataaaaaagtaacttttaatacaaatcgtccttttcaaagacagtaaaaaataagaaagatgtctaaatgttagatgaaaagtaaaaaaaaaaactaagagaaataataaattaagagaaaaagacaaaaaaaaaataataaatgaagaagataataatgttaaagaagagaaaaaaaagtaaaaagataaataatggaagaggcttataattttttttttagattttaagttatagtgtattattttgttgtttaagaaactttatagtctaataactcttaatttatttagtcagtttttttttagcaaaaaaatatatgctttcaaaataataatcttaaaaatagattacaatagtgtaataattgtgtctaaataataacttgtgtggctaaaaaatcttttgaaataaaaaataaagaaataaagaagtgaaagaatgattatactgatttgtttattcacataaaaaaaactgattgtatatcaattaggagagtgaaagacatgtaaatgaaaaatatataattaattttgatttcggtaagcctataacggtatttaagacaataaattagtcaaacacaatttcataaataatttgtatttaatgttgatatgtgcaattatttctatataattctctactttcatatccatttgtgcaattagcttcttgttggtctttgtgtctatttgaatggtaatcttttctttaattatatgagtggtcttgtctatcattcatggacttattgcttattttcaaatagtagcaatctctccacatatgtcctacccttccacaatagaaataactatttggatccttaggacctatggacggtgaccttccctttccttggtttggtccttttcttggtccacgactttgaattctacccttgcagggtgttttcttgaacttgtttctcccctgactaaaattcaactccccatttgagttttcagatatttcattcttcatttctaagtccttagacttcaaagcaaaatgacatcttctagtgtaattttagttctgtaattttacttccttgtaagattcttggagagaattcaagataatgatggcttgattcttcatcactcaaagtctcattttcacccaagtttgctagctcaatgtgcatccttaagaactcatataagttcagatccagagactttgttggactcatcttaaaatcaaagattctttcctttaagaaaatcttcttagttagagactaa

SEQ ID NO: 67203 - DNA, 781 bp, Cannabis sativa
  modified_base (570)..(573): a, c, t, g, unknown or other
aatatttttaaataatatttctttaaaaattaaaaataaaaatatatttaataatgaatgttaatattataataatgagcaatttacggcgaaactcccttatgttttaatttttatacacttaatcctcttatttttttttttggtagcaaaacctatttatgttttaacttttatacacttaactcacttatctttcttttggtggcaaaacccccttatgtttcaatgtttatacacttaaccacgttatccttttttttgtagcaaaaccccttatatgtttctttttctgtgcaaatttgacacgccagttaaatattacctttaaatatcaattggatgaccactgtatacacctgtgtatatgtaacggtaaaacctcgaagtcgatacagtggtaatgcagttagtatttatcgataatatctaactaaaactttaaatttgcaaagaaaagtaaacttaagggggtttcgctaccaaaataacagataaggaggttaagtgtattaaaactaaaacataagggagttttgccacaaaaaaaataagggggttaagtgtatnnnnactaaaacataagggggttttgccacaaaaaaaaagataagagggttaagtgtataaaaattaaaacataaggggtttcgccgcaaattactctataataatttataaatagctgtgtaagttatattaaaataataatgtaaattttttaataataaaattttaatatatttaaaaataaaagtaataatattataacttttacatg

SEQ ID NO: 67204 - DNA, 951 bp, Cannabis sativa
actactcttcttcacaaccaactgttttaccacaaatcaaaaaaggtaaaaaacacaatacttgcaacagattccatgacatcaacaaattcccaattgtaaaaagttcatatcagaataattcattactatgctattgctaagccaaattaatggaagcggcattcaaactatcaggaaccacttaaaattcagttgtaaagaccacatatctgcaaatttccgtcgaaataaaatctagaatgccaaagagaaaagaattgtagaaatactcaaatcagtaagaaactaatattctgtttccaacacgccatcgattagtccaaactccatagcctgcataaaaaaggcataaagtaaaacaaagatgctcaatagtttgaatacaaattcagataattataaaagtatgatctgtctgactgaaagttggaaataaaagttctggaatatcctactagtccataacattttcacaaacagaatgaataagttgatgcaataatggatggtgaaaatctagcattcgtgacaggctacaaagatcaataaatgatgatgttttacagcattcagaaaactgatgaactccaaattattgtctgttatcctaaatcagtttttcttttataagtcctgccctctcttgtaaaaaagtttccatgaggtttttataattttatgttattactaaagctttctaactcctcgttatatatattctcttaagagagcagaaagaaagataaacaggtcttcagttaagtctgttttgacttttataaaatatatatatagagtatgttgtttatttgtatcctgggaaataaaccacttctttatgacaaagtaatgtgactcgtatattctggtttataataataaaaagcaagtgtagaaaatatttgcaacccatgttttatttcttacagtactcagaagttgaaccaa

SEQ ID NO: 67205 - DNA, 2150 bp, Cannabis sativa
tgagcctagttgaagttgtgattatttctcctaaattgatattttcatcgggcaaggatgtgtcatgcaaggacaatgttgatcgtttactttttctcgaccaccaattatatttaagtgtgtgatccttatgtccactcattgtatgtaccaactaaatttattaaagtgatactttatcttgccacatgtaataactcatatgctacgacaagtaaaaaatcaagataagaaaaatatttttataaaaactttaaatcctttttatatataatttttgaggtgtatgttcggtttttgttgcgtttggattcactagatgaatactacaaataaaaaatgagattacttggtttgatgatattacactttgtattttggcatatgtattccttattctctttgttatcagtgtttttagatgactaataaacgtgctatctcagaggcccaatatgaaacaaggcccattcatagggtcctcaaagatcagaagcacggtccacccgtcaaagatgagtggagcttggcatgagctctaactccatccgagttgaatttataagaaggatccggaacttcgaagcctaatatctccctcaattaaaatttcaaacaagtctaagacaagaagggacactctcaagaggcatgcaggaatggaatatcaaacggcatttgtaatcactcaagatcacgaaagtcaacccagtggcagctgacgtggtcccgagaaattaggcggcttgtcccctatgctagaccacaaaaaggttcataggaaaagaaaatcacctttttgtccaacatccactactattacattctctctccaaactgatgacacacacgtacctgacagtgtcagcaacgtgtttgcgtatggacaacagttaccaacatattggacctcaccaaaattttgggcactttcaaaacaaccggtcgcccgattctgcctagtttctgtaactccaaaattttcgagttataacccttttaaacttgttcaaatcaattataactttccagaacattatgttcatgcattctaaacaaaactataagctgagaacacaacataaactaaagaatccatactcatcgttaagttatataaacttaatgtttatttttagcggcataagtacccaacgtttataaaactgtaattttcctcaagtttcattagtacaaatgttttgaattattaaaagaatattggaagtaatttatactacatgtttctatctagacccaatgataaagaatcttgaccttatatatgccctatttaagcgataacagaatttgtacaaataaaattagagaaaaattacagttttataaacatttgatacatatgccgctaaaaataaatattgagtttatgccatttacaaacataaaattttaggtatttatgctgttatttatcctaaatattaatgatcaagtaactttaaatatttttattgtaaaataaaaaaaattgggtatttaattattatattctttaaatatttggtatttttaccaaaattaattcttttttaaaatataataatatgttatttattacactataattaatgacaaaccaaattttcactttgtataactagtttactttttaaaaactaaatcttcatatataatttgctattgattagtaaattttaagtaaatattaaacattatttattgtgcattctttaaaaataaatattcatatcaatgtaaaatgatttcattgtcattacttttttgttacaatttatgattttacataccttttaagggtagttttgaatttgaattcctacttttttcatgtctccttcttcccttcgttggttagttattattaataattaaataaaataaaaaatcaaaactttcaattaattactcattctttcaaaaatataaaaactaaataataataatatctagaagaaattttaaaaatatatgttatactagaatacaacaattacttattttagttatagtcaatttctccattttctcaagatcatattttatacaaactgttttattgtcttggtccatatatagtaagagagcatgaactaatggaacaaaaaaataatacacatctcgatcttcttctctctcaacaagca

SEQ ID NO: 67206 - DNA, 814 bp, Cannabis sativa
ctatgtgggtgtcataaaaatacagaaatttaaaagacagtttataactgttggaaaaagtcaatttcaatgacagtttacaattgttaggaaaaatcacattaaatgaatatttataactgttggtaaaagtattatcttgattaaatttaattattttttaatatatatttcataaatattaataatatataataggattaattttcataaaaaaataatattaatcaaaatatataaaattaatatatttctaaatttaaatatcataattcattaaatatttaaaaaaatatatatcataattcattaaaactgtacaaaatcaaaaaattattacataaaatcaatatgatacaattctagaaaaaaataaaggaagataaaacgagagggagactagatcagatccatggatgttgtggccatcaaccagatcagatccatggcttttcccaatgtgttgtgtacctctgatcgtggagtactgaaccttcagcttttgcctcaatgccatggttaggcaaacaacacgcacgattctcggaacctctcgtgcatatacaatattgcaatctccttcaaatctgaaaaaaaaaaattacaaaattcattaaaaaaatcgaaagctcaagcacacagtcgttcgaatctactaaaaaaacaaaaacttagtagaaattgaagaaaaaaaaaagttacggttacagttaatgaagatgagtgttaccaaaaagttacagccatcgtacgttcggggaaatggccatggcctggcagagccaccgcgcaagagaaaacagagagagagaga

SEQ ID NO: 67207 - DNA, 1455 bp, Cannabis sativa
  modified_base (503)..(504): a, c, t, g, unknown or other
taataaatattaaaatatattattaatcattaaaaaaatatatagtagtctacagtgcccaccattattagtgggacgctgtagagctccataaaaataggttggcttttgcagtgtggttggagcattttgaaggaaaaatgacagtatatataagtttttgccgtgtcattggagatggcctgagaatgtatgtaggtaagagaattacatgtgagggcatgtgaaactaaagtgtactaaattataattctacctatttgtggaacaaagaatttaattcaaatactttccatgtacagctacttatctccataacaaacaccccattaatgacccaataaaagacaccagtagtgtttagataaaaatatattttttatagtgtaaaaaagaggtattttttgatatatatttttttaattaagttgctaaagtaaacatagaaattcaaatttctcttttattaaccaagatgtaatggtttaatatttttaaaattnntatttatagttaaatttgtttattaccaattaatgagtaatacccataagtattccatatataaatatattatataatatgttatatggggattatttcactaatggtacatggaatggaatgaaatgaaatattctctttgtacttagttcattggatttttaacttggcatatttaattaccattttgttagaaaatagagtaatttgcggcaaaatccttccaactatcaatttacttgtaagaaatcatccaacctcatattttggtgggaaaaccctccaaagtactgttccgtttatatttttaaggtgtcgtctatccagcctcgttaagtcttaattttgcccacgtgacaatgacaaattactaaaaaattatcctaaataaataaaaactttaagagtaatttgcggcaaaccccccaactatcaatttacttgcaaaaaaccatctaaaaaactttaaggttggataatgataatagattaaaattttctacaataggtacaaatataatatagatataatttagaacacatatctagaaatatttgaaagctattcctaactaattaataaataatataagtttatttgtttagtcactaaattacattataattactcatcaattattaaattattatttcttatccaacaatgatttattttatttatcatactaactcaaaaaatataaaattaataaataattaaaaaattaaaatatcttagctatcgaaaataaatatttattttttagtcattaaattacattataattactcatcaattattaaattattatttcttatccaacaatgatttattttatttgtgtttatgctatggatctagaattctatgataaattatccatcaaatattatatgatttatttttatttgcaatattatttattttattatatcatactttgtataata

SEQ ID NO: 67208 - DNA, 754 bp, Cannabis sativa
taaaatttaataataacttgatgtaatataatagtgtcatgacaaaattaatcacattatgtatattttcatattaagaattatcttcaagttggttatataaaaaaaattatcgaaaatttaccttatagggttctattcataccattttgaaaaatacaaaatatattttatcatttaacgaaataaaaagttcagttaataactcttacaaaacataaagtctaaaataatatcaaccataatatttttcatattatacaatcaattattgatgtatatattttgttaaagaataaaaaacatttattctcattatgtacatgcttaaaaaaaaaaatgttattattagatctgaccaaaaaaaaaaagataatgttatcatttgaaatttgtaacatgtgatatgtttatgctgtccaaatgtccaatctaattgaggcataatatagttttaaatgggaaatttgattttttatacttaaaaaatcttaatattttattcttaaaccaatacattttaaacaaaaaatatatgacacttttatctaaaactcaaaaatacccctctcataactcagccccattttttcccaacccacatatgcatcggaccccccatcggaccagtcggaccctgcatcggacccgtcggaccccccagctttcaagcatcggaccccccatcggtcccgttggaccctccccatcggacccccccatcggaccccaacccaatttttttcccaactcg

SEQ ID NO: 67209 - DNA, 1181 bp, Cannabis sativa
tattgttctcttaaacatgtctagctttttaataagtggttcttgaatattagattcaggagctactagacatatatgctatgacataaaacatttccaattaatgcatatgcagtttcaatcccactagactgttattacctaacaatgaatgtttaattgttaatcaaagtggcaccattgccatcacagataaactagtcttgagtaacgtactctatgttcctactttcaataacaacattatctcagtaagttgtctaacttatgatgacaattatttgtatgttaagttcttcactaatcactttgtcatacatgaccaaatcaacaagaagaagattggcggaagtaaatccaagaatgagttgtacatactggattcaagacctcatgattcaccaatccttgcagtttcagctgatgtctagcactcgaggcttggacatccctcaaacaaatacttgatacttttagacaataaattcaattgtaacatttctaatttacataataattcttcttgctatatttgtcctatggcaaaacaaaggaaacttccttccaaaaataataatatttttgctgataatattttttgatttgattcattgtgatatatagggtccctatcatgttcaatcacattctggttttagattctttctcactattgttgatgtgatcaatgaagattcacatgactataccttttaaaacaaaaatttgatgtgcatactgttattcctcaattcttgacttatgttgagaaaacacatgcaatttatcttctcattataataatatgcacactctatattcttcaactcaagtttgatcttattttctccttaaacaaagatcaaatttgatcagtttaacaactcaatcatatcaaggattatcactagttataaaacacacttaatgaatatcactagctcattgttggttactaaaaattaatttaactataaatattaatttttaaaatattaactcattcgattttgatctaataacgaaaagaaaaaattgtatgcttaatttaacaatataaaaaaatattatctttttagactattgtttatataacaacatttaagttaaattcaactttttttttttatcttatatttttgctaaatattttttttaatacaacctcatataatataaaa

SEQ ID NO: 67210 - DNA, 898 bp, Cannabis sativa
gagtaaatactttactgtttgtgtgatcatcggtttaccgctttccattttaggcagtatgcaagcatatagattgtttatgtgttacgtgataccatgctttaaatgctatttgtttatatgtatattttatgaggtaaagagatgagttagggcttaaggcaataagtgcgtaagtgtggtattagtgcttaactcgctggggttgttgattataggggtactagtaatggaccctctgcaatcatctagaccacagggcaagcaagtagagctcggggctacctgaaccgatccaccggcaccgcctccacctccgtagaatccgggggataatgcgggggctggtaatgctaatcctcctgctgactgggagcagatgttttatgaaatgcggagtgttatacttcgtcaagaagaacagttgcaatgttcaaggcaacaggatgccccagttgatctagggttaccaccagcacctgtgccactggtgggtaaccaagggtatattatgccgcaccgggactctatgttcgagcggtttgtgaagctgcaacctccgacttttctgggaggtattgatataattaaggccgagcagtggatgagcacaatcacccgtatgctcgataatatggggttgacgggaactgaaagagtgaactatgcagtctttatgttacaagatcatgcccgcgtctggtgggatattgtgggccaaacctgggatgtcactgtaatgacctgggaggaatttaagaatctttttgaagaaaagttttataatactgttgtgagaacttaacacatggaggactttgtgaagcttactcaggggaaaatatcagtggccgaatacaccctggagtttgatcggctatctaagtttgctggtgat

SEQ ID NO: 67211 - DNA, 594 bp, Cannabis sativa
gtcataaatgtgcctcaaagatctagaggaggactgcaagctcccacaactcgcaaagttctcgagaacttggggataaatgatatccatgttcctggacaaagaaacacgtggcataagaagagaagtacaacttcaaacaatcataaaatgagtatcctcagtgacaccaaatcacatagaggctacgcgaatccaggagtagattaaggccaaaggatacatggaggtttacctaacctcagcatgccatccgaaacacagaaggcttacccttactccaggatccagagtttcccaggatcaaagtttgcacaaagagatacctagaaggttacttgaagggcctatcatagacactgactgcccaaaagagatgtgaacgtctaccttgaaaataaacccagatgctaacaacgattatgctttttttgacacaggattagatcttgtcccttgtgacaagccatggtagtgtgtacaccccctacacctttttgccagacagttcccatgcatttactttttaaggttaaaccttttggcgacacgcatcctatatgatggtggtcctcttgttgggttttatgccct

SEQ ID NO: 67212 - DNA, 983 bp, Cannabis sativa
ctgcgacgttcccggcctcccaccgcctgcgcacgatgatgacgaacgaagctctcccttcgactccgactgctccactgccccaaacgcccatggtctccacccttcggttcccttgtctccccgacgtcgttcgccacgaacccttcgccggagagaagaacctcactctatttatttttctcaaagaaacccttttcttttcttcttgcttcactatcctatgaaacaatttactattttttcagattgaagatgattgtggctgttggagttagcgattggggctgtttggagtggtgggcgattgaagattctagaacttttaggtttgattaattttctgattttttgttgttctttcttcatagaattttttgggtttgtagtcacttgactactatgtatttttctatctttttcattatcattattggttttttttttcatagaaaaaatttgtatattgtaaataaatattattttaatttaattttgtaagcagattgtattgttgattattgtgtattgtgtttgttaataatctgaatgtaattatattgcttaaatgaatttgtgtattatcataatttatatttattaaaattagtatttatattcatttaaattatataaatggaatattttttaaaaatgagaatattaggaaaataatttattttaaaaataaaaatagatatagtgacactttgagagagtggctattatttttagagtctgacaacttgagactcttaaagtctatagtgacgtgcaatgagaatctctagaaagttttagtgacacgtgctgatgtgtcattaaatattacctttccagcagtcacccaacccacattagtgacatgacacgtagtgaagtgtcactaaaactttatagagtcactcaagatgagtcactgaaacccatttttgtagtagtgtaaacttaccgttatatctttctaagtcaatatcaatggt

SEQ ID NO: 67213 - DNA, 3300 bp, Cannabis sativa
  modified_base (65)..(73): a, c, t, g, unknown or other
  modified_base (3165)..(3184): a, c, t, g, unknown or other
attgttagatttaaagacttttgtgtaattttagtaaaaaaattttaacatggatgaaagttcannnnnnnnnatttagtttatatcaaagtttgaggggcatgatatgctaaatatcaaagtctgaggagtatggtttagtacataaacaatcactgaaacagtaaaattgaataaaattagacaaaactttttaaatttaacaatctcaaaagttcggagggaatttttaacggcaaaaaaagttcaggggacacgatttggtacatatcaaaatttagggaaaaaaattactaattaacccaaagaaattagagggtatgtatgtatagtaaggacaaatctatatttattttaaaataactattttttacaaactaattaagacatatgtgtaagacattaataaaaaaattaaattgcaaaacaatcattagatttgaggaggcaattatattgtcccctcttgactttagtacgtaggtcctccaatgcattccagtaattgaaattagtgtaatagtgataaatacatttttagtttttatactaaaatatttatacatatttatgtgattttgttatatcatcgatcaacccatatattatttttaaataggacccctcatattttaacttatttatttcttgttattcataatatatgcttcataaaaacatataacactatctatatatacataaaaaagtttagtgtatacaaataggctacttatttaccctaataataaaatttggcattaattaattaattactgaaaataataaaattgcaaattaaagaataattcattataataaaaaaaaattcttgttactgaaaatggatttacaaaatttatcattttatatatatatatataaattaaatgaaaaagggtgtagtttgctttatgacaaaaaataaaaataaaaaatgtgatatatgctataagttattaacgtttatttctttatttattatttttgtagcaagacttgacgtttaatttaaaccacaatatactgcatgttttattacgagtacgaattattgcctattaaaatgtctaaaagttgtattattaattgcaaaaagaaaaaaaataatattatgatctagtagaccgtagacgccatgaacgtagatcgagaaagacttttcaacacaagtgctcgaaacttgtatattttcatgtgccgggaaagactttttagcaattctctaaacgttttacatggacgacaggcgaacaaaataatcgtaaaataaaaaatttatattattattattcatataatataacgattaaggaatgtatatatatagtagatcagttcttacagtggtgttggagaatcgaatcggaacaaacgtactaactaaaaggaagatcaggaagagaaataaagaagcacatagtgccgaagacttcatatatggctgccaactcctcattttaatttcttctccttatttaattcttaattacttatccgcctggaataaatttttggtctgttagaaaacgagttatatatttatatatataaaatgttaaatattattacgtacgtagccataataaaaattggcatgcatgtcatgcttataaatatacgtatatatagaacttttcgaggagtaagtatgcataactcatctcagaatgattatttttaaataacaatttattatatatctataatatatgtgtgtactgcatgactgtataccgttttccatgttattgtgtttataacgataaagcgcagtgtagtacatgtacacaaatatatattaaaaattatataatctaatctacttacttgtataatacttgtgtgtgcttctgctttaatgttggtcgattagcactgtttgcaaagcccatgtaactttaatctctgcaactcaatttacaaaagcttgacatatatcagtgatttaagtagtttgacatggttttcgttgagtagaaaaagtcaactacctaaactatatgcttaccaattatatgaactatataagaatactgtttggagagagaaactactctctatataaaggccaaaaaagaaaaaagcctgagtgaactagaagaggtacatattagctttaagaaagcaaaatgaaaggtagacaaaaatgttggaatatatcagggctatatacgctcaagaatgtaatctaggagagaaacattagagtttgaattaataataaggccgacgtacacgacttggggaggtttaatttgagtgttaatttttgtttcctcctatgtaagtcaattgagttatatattattaaactatattggagatcatgaacataacttaaggatttagaaatgtgtttactttagaggcccgtcaagtacgcttaggaacctaaatattatcatgtatattatagtttaaatatgtgttaactacataacagtcaatgtatacaacatacaaaaacatatattaaaatgtaactaaaattaatgcacaaatatatgagtcgaatagatatatatttattgtatttgattaaaaaaaaaaaaaaaattatcattcatcataattatgttaatcttgacaaatatttttgtgcatttattatatattttctatgaatttaattacaccaaaacacaacataaaatcctattatatagtttatatatatttacaagtcggtatatacatgtacacatataaataagtagtgcaacactgaaaggtaattaaggcttccaataattattttagcattatggtcttttccagcttttaatttttactagtaatagctcttggatatacgtacgcgcttacaatatattagtcttatataatatatatcaaccagtagtctctttcttcaatgcatggagcttttcacgacaacttgacagtttattttattttgctttttgagtaaattttaagtctttaaagttcaaccctcctggctcaaaatgacaagaaagaaccatatatgaccaattctcaatgttgagatataataagatgtccaaaagaccatccttttgtccgtactaatttatatcccaattgttccgccgatccagagtccttgagcatcttacaacttcaaatctaattatatggtatgttacagtatctgtaagtgtcatgttctgtgtggcnnnnnnnnnnnnnnnnnnnntcagtatttgttgtctctaacatctgttctgtagttagttgcatctgttttcactaatatcattttagtgccatgtcagctttctgctagtttgttagggtgtgccagctgtactt

SEQ ID NO: 67214 - DNA, 712 bp, Cannabis sativa
aaatgtatttatttataatttatgacacaaattaccttataaaataatatattatttttattattgtttattgataatatgtatttggtcttgttttaaagaaaatgtatgtagtcccttttttttttggttctaagtccattttttgacctcctaaaaaaagcgaatattttgaatgttagttgaaaacaaactaaataagaataatattgaagattttttttcttcttcttaaaaaggttatgctacttaacaatgttactatgggtaatcgttaaaaaaagaggataataattaaaactagctattttaaaaaaaaatatatttaaatttatctataaatattatatattataattgcaaatgtaaaaatgctattattttatttttttaaattaaaattttatactacttaattgtagttatataacacttttttaattaatttttcattaaagaaagtcacacacaatttaatttaataaatactataaaatataactaattatttacgagatgccattttacaccacgatgtcttatactaatactcttttttttttaaaaaaaaataaaatcataagcatattctaataatttcactttttcttcccaatagtaggtgtctcaagctaaaatttcctacctattataaataaataaataaataaaaaaataggcaggtgttataaatattaataattatgtggat

SEQ ID NO: 67215 - DNA, 639 bp, Cannabis sativa
  modified_base (382)..(395): a, c, t, g, unknown or other
aaacgcctcgaaacttacgaaattcatgactagcactaagtatagtatactaaattactaactaaactagtcctaattctaccaaaattttagcagcataacaactataattgaacgtttcccaaaaatttaaagctattaaaacaataaaacattatccaaattaatataaaacaatcacaataacatttagcaatacaaaaatttaccactcatctgactgaagtacatgtattcgcagaacctactttactacgaatgaatatttaagatattcaaactcatctaacatgcatattactccacccatctgatcgcagtacaatttatcgcagaacctactccactacgaatgaatatttaagatattcaaactctactnnnnnnnnnnnnnnaattaataataaaagttagtaaatttatacctcgagctagctagaaaccgatcaacaccaaataagcaagatccttacaaattgacctcacaacttacaatgtaaaaaaaatactataaaaataaaaaattctttgttaaactagttattggttatataatttatgagtaactagttaatttattactaactaattactaatgagtaactagttagtaattaataaaaatacatcaataggaat

SEQ ID NO: 67216 - DNA, 947 bp, Cannabis sativa
taacactatataaactcgattctcacttagaaattgaagttggctaagcatttatatcatatacctaacatattcaagtgagatcaatgagcttccaagtttaaaatccaacaaacacttttcacacactttgtgccaaattttgtgtttattcattgcaagtgtgcttgttaatcactctaggtttctattgtatcaacattcttctagagtgaattttcttgtcatttcaaacacatttccatattgtaattgaggtgaggttggcactggtattgtaaaaaacccagttatagtgagatttttactacaacaattcaagaaagaggttaatagcccttggcagttcaaaactattgtaagaggtttggaaacaccttggtgaaattttcccggttgtaagggttagtcaagcctgttaacttggctcgataatggaactcaaagctaggtccatttctttgaagaccaaggacggacgtagatggcttagttttaccaaaccttacataaattgagagtttgctattttgacctttaaactctttactttacaagtttgaatgtttgctatacattattgcttgccatattacttgcatttacttaattaatagtttaattgcatagttttgtgctaaaagttttaatttaccaaaattagtttaaatttctaagtcaccccctcttagaaatatatcttgagctaacaccctaaacaaaatatcaatgttagcctccaaaaatttgggtctcaacaggttccccccaatcttatcatccaatggacataatctatgaacatatttcacaattttgaaatcagagtcatcaagagaattagacactgaatctaatttagcatcaacagaacctagttcaataaagtgagacttaataacagtccctttattcatgtccctctttccaggaattaagattggtgt

SEQ ID NO: 67217 - DNA, 940 bp, Cannabis sativa
taggatatttttatgtttcgttgtggagtactatatgtaggggtgttcgcagtgtgagtggtgcgatttttgttcatttttttaaattaacctgtaatgtggtttttctaatttttcaaaccgcactcgcaccgcgaaactaaaaaaccgcggaaaccgcaccgcaaaaaatggtgcggtgcggtacgatttttgcggtttggattatcaccaataattaaactagtacaaatacaacaaaatttgagcaacacttatcaaaaataccataagacttgaaagaaatatgaaaaaaaaaatttaagtttcaataatacaataattaatagactttgggttggacattcacgtattagacctaaaaaatataaaaatttgtatttttataatgtgcggcgcggtgcagtttgaaccacatattaacaattcaaaaccgcaaaccgcaccacacggcgcgatttaggaaaaatttaaatcacgactgcaccgcaaagaatttcaaaccgtattttttttttgcagtgcaagcggtttaaatagtttgatgaacacccgtaataccatgtagacacaattgtaggcacatatatcacacatattaatgtaataatgtttattaaatatgtcatatctattattagaaaaaattatagtactacatgcctataaaggtttttcggtatgttttttttctgttttagcatttataagattataatttgttctaatattttttttcataattgtataagttataattatttaaaattacatataaatttttaaaaaacttcttaataatatacaatgcaaaaaattctaaattttgtacgttttttttatatgcatggtaaataattatttaaatttgatttttgatattataaactattcgaatttttttaaaaaaaaattgaattaaaaaagctctttagatacc

SEQ ID NO: 67218 - DNA, 713 bp, Cannabis sativa
gagagagagagagagagatgcgatctgagatcagagatttgagatccccgactctaccgtcaccacagaggttctccaatagtccaagctgaatctctcctctgctgagaatgggttctccaatggcagagagaggtggacccatgaatgcacaaatcacagaaagagtgagagagaagtcaagataacaaatcaaaatagagagatagggaactgactcatttctcatgcactatcctgaaacagaggtaatttaatgtttatctataactaaatggccaacctttaatgttttatattcttaaaaaaataaaataaatcaaaataaagattaatgatacaataaattcaagattattaataaaaaaaattgaaaaaaattaaattgagatacaattataagggtacaatagtatatatatttttggaaaagtgaaattatatttgcaccctaataagttataaatacaacttattttaaataaaaattttaattacatttttatccttgaacaaaattaccaaaatatacaattttaaatgatgagcctattttaatttttattttaataattacaccccatttacttataacattaaaattaaaaatctccttcttcaagttttaagaaaaattcatattaatagaaaaaacaattgaagtttcatcaatgaagaacatttaataaacgcataaaaaattatatgtttaa

SEQ ID NO: 67219 - DNA, 994 bp, Cannabis sativa
  modified_base (577)..(578): a, c, t, g, unknown or other
agggtttgtgtgttttagattttttagtgatatttgtgcgattttcgagcgatattatatgagtaagtaaagttttttgggttttgggtttttttatgtgaaatttgtgcgatttttgagcgatattatgtgagtcagttaagttttttgggttttgggttttttatgcgatattgagcgatattgtgtgaccttttatgcgattttagtgctgtaagcattgttagaattagaaatgatatttttggcgacttctatgcgagtactatgcgattattgtacaatgtttactaggcagtttgcaattgaagcctataaatttattgttgtggttaagcgattttaagtgatgtttgtgcgacatatgttggatttttgcgattttaagtgacgtatgtgcgattgttatgcgattattttgcgatatagtccaattaataagattttttgtttgaatttgcagatggctccagaattcattctcccattggctgagcattttcctgggcgtatcacttacagagggaatgggtactttgcttcaattaaagcaaagtttgaagcctttaacctgacnnagagggtgaaggaaactccttttgttttttggaatgcaaatgatctgaaattctccggggtgattgtgcatcaactgctgttgaggaaaaagaaagtgagtgaggtgaaaaatgatgaagtgtggttttacgtgggtaaaaccaaagccagatttgaacggtctgagttcggtttgatcaccggcctaaagatgagcggtggccccacgacagaagaattgagtacactttgtgagtctgatcagatactgcgggactacctcaacaatgccaaaagggtcactttcaaaccctttggctagcatttgaggcgtgcgatgtggcagacgatgtgtacaagttagggctgttattacttaaagtttctctttctctcttcatcatcttcttcttcttttcttcttatttatttcata

SEQ ID NO: 67220 - DNA, 660 bp, Cannabis sativa
tgttaaagacttgcttgacattttgcttgacatagcaaaagatgaagatcacaaatcacatatcaaattaggcagagataatatcaaggcaattatactggtatgttctttcaaactcttacacattcttttaaagtcttaaattcaaagaccactttgatttgcaatatttcagaattaatctttaagagtgaaaaggtaaaacaccattgtgcaatttagaccttaaattatcattcatacatttattactatatatttcacatctgcaggatatatttgtagctgggactggaacagctgccataactatggagtgggcactatcagagttaataaaccacccaaacattatggaaaaagcaagaaaagaaatagatagcatagttgggaaaaccagactagtagaggagtcagacattgttgatcttccatatattcaagctataacaaaagagacattgaggcttcacccagctgggccactaatactaagagaatcaactgaagattgcaccattaatggttactatattcctaaaaagaccagagtgtatattaactcatgggctattggtagagactccaaatattgggaaaatcctcttgaattcaacccaaagaggtttctaagtgaagatgggagtggaaatatcaacc

SEQ ID NO: 67221 - DNA, 2691 bp, Cannabis sativa
aaaaaaaaaaacccaattatttttatagaggtatactttattaatataggacttagaaaatatataactaattacaatttgaatgtcattcttattcagggccgaccctcaaataaagtgggccacagaaaaacaaaattatttttcgacccttaagttagaaaaaaatgtggtttttttcaaagttagtaaaaaaatacataattttgaaagaaattttttttgggcccttagactaggtgagccctagacacaggcgtagcccgcctatgcccagggtcgggcctgttgttatttataacggttttaaattgggacttaatttttttataataaattagagattattcttgaatagagtattcttatatagatgttctaccgtattagacaatatcactaaccaatagtaaagataaatagaaacggctagacaggtttataatcatccgtgatttttggcaggctagaactttgggttgaaaattccgaagtctgagttatgtaagctgtcttatttttgtctccaataacaggtcattgcccgttggttgtatttgtaattgtttgtatagtataattttctcctttaaattacgctgaaattaggttgtgagttaatgattaacatgtcaaaaatatgcatataatataacaaactagtcatgaaactaacgaacaatcactaatgaagcatatcttttatactatttgccaattactttttcttttttaaatatgccaacttgatttttgaatggacattgatcttgtaataattaaggatcatcactagcttaatttaatactatatttgtataaataaagataatagctatatataggtaggttgaccataatgtgaccgaaaattcaaagtctacccttcacatgtgaaaacatatattttatattttgaggtacttcgtagttcgtaccacaaggtgcgaaatttcgtagttcataatcaaacacaaaacatatataacacactaaactagttctcaagaaattcatgaacaaccaataatgaagcaaacctttcttactcttcttctcttgtttcaagtaactctttcttcatcaaaagtctcaaatacactaaaccaaggctcatccctatctgtagaaaatgcagcctctgatgttttggtctctccaaatggagatttctccgctggatttttcccagttggagaaaacgctttctcttttgctatatggttcacaaggtcctctgttcctaccttagtttggatggcgaacagagaccaaccggtcaacggaagagcttcgaagctctcgttgaccaaaaatggtaatctcgtcttgctagatgtgggaagagttcaattttggagtaccgaaacgaaaccggtttctcctgttaaactccaactcttagattcgggaaaccttgttcttcgcagttctgttttcggtgatgttgtttactgggaaagctttgaatcacccactgatacacttcttcctaaccaaaatttcatcatgaacacaaggcttgtgtcgtcagtaagcaaaacaaactattcttctggatattaccacttctatttcgacgatgacaacactcttcggcttcgttttcaaggcctcgaccgggcaagtgtttactggccagccccgtggctcgggccctttcaaaccggaaggtttagatacaacatttctaaatccgcagtccttaactcgattggcgactttgcttcttcggataatcttatgttctcgagcttagatcacggtgctagaattacccgaagattgacacttgacccggatgggaatcttcggctgtatagtttcgatataaagaataagagttggagtgttacttggcaagccatgtcttctccgtgcaatgttcatggaatttgtggtcctaatagtatgtgttcttatgatcatgttttaggcaggagttgttcttgtgtagctggacataaggtgaaaaattcttctaattgggcatttggttgtgaacccgaattcgaatggagacatatcgaaaagcagagtagttttcaccgcattgctaatgcagaattctatggttacgacaagaatttctatgagaatctttctttaaaagaatgtgaagagaaatgcttgttcttttctgattgtaaaggtatccaatatcatatgagcaatgttgctaatcctggttcaagatgttatactaagcatttattagttaatggagctcatacaccaagtttccctggagatgtttatgtaagactccctaaagctaacatttcttattttgagaaaatcaatagagaaatgagaagtcttcagttctgttcttctaaattggtgttgttggatagaacttatatcaaggttaaagagaacggagggttgaagattttggtttgggttgccattgcattggcaggagttgagattttctgtgtttctgtggtcttgtctttcttgtattggacacgaaaagagagcaaactcgactcccacggttactccctcgcctcggttacacggtttcaaaggtttagttatgcagagctgagaaaagccaccgttgggttttgcaatgcggttggagctggtggtggaggcactgtttacaaaggtacactatttcacatggcattgttattgtggtgcaatttaatatcgggtttcacacatttaataatttcc

SEQ ID NO: 67222 - DNA, 607 bp, Cannabis sativa
gaactttgacatgtaacaaatgatgtctctcgaacttttaaagtcgttaaaaaacttttaaactaaaattggataaaagtctttaaatccaacaatctcaatagttgatgatgcatttttaacgaccttaaaagttcaggggcataacttggtacatgtcaaagttcagggagcgaaattcttaattagccttataggaaatataatatctatttatttttttgggggttttttatttttttttattttttttttattttctatgttataattctttatttttttttttgtgctaaatttaacattatcttatattgcattggacatggtttaatcaacggtccttattcccctaaaaaaggaaaaaaaaaattaatcaacctctttctttctaatttattgctcttttataacgctccttattcccccattttataacgctagctcctcctctatatatttgctcacattgttttcacaacccagaagaaaaaaacaaaaaatcaaacaaaagctttggatcgaaacaatgacaaagtcctatgaagaagagcacgccaagaaggcctttggttgggctgccagagattcatctggagtcctttct

SEQ ID NO: 67223 - DNA, 1004 bp, Cannabis sativa
tgtatggctcagtagaatcacatccttgtattttagtatagcggggcggtattgttagacattgggaatgtcgggattagtcgggattgtagaatttcccaaataaccctttagtggctattagtatggaagggcaaaattgtcattttgccaagccttagtttgtctttttgtgggattatgctaagtttctaatttgaattttatttaattatttggctgattattttagataaaaccaactttttctttaattcattttatgaaaaatcaaaagaaagacaaaatcactttttctctcaagctctctctctttcggttttcttgggctgttagggtttgatttttctgctgaaattcaatctttctcaactacttgtgttgttaatccaagccaaggtatagctcttgcaccctctttttagtttcttgtaatttaaggaagaaaatggttgcatgcttggtgattttgatgttgtagctgctgttattgtttgttgttgatttctaagttttaattgtgtttagacatggagttttaagcaggttttgtggttgttaattggttttatccaactttggagtttgaagctcaaaactttgggttttaatggtgaaatggtgtttttgctgctgtgattattgtttgtttttgggtttgttttctggatgctagatatgttgttttatgttgaattaggtgggttgtggtggctggttgttgtgttaaccaagctttgagctttgaagctgaaacttggagcccccatggtggtttttgtttctttgcatgctgggatgttttgttgcttttgaaatgttctttgggatgtttggagcaggtctggagagttttaggtggtttggggttgttttggtcgagttatgaatttttgaatcttttctgcactgaaccggaattccggttcagtgggacctataggaaccggaattccggttggtccccaggaaacccctcagaactgaaatttcggttggggaac

SEQ ID NO: 67224 - DNA, 1026 bp, Cannabis sativa
tttttacttggggctggcaacacggctaatgttaaaacaaatttaagaaataattgataattattgagtaattgcagccaactcaggtcaatgctcatgaataaaattaaagtaaatgatatatgttattgaataaatagaattttagtcttttgggttttgcctcctctagtggaaataattacaaatttttctctattttgttaatttttcaaaataattcattactgtgagtacgagctactaatttaaactaactaaaaccaagctaattaataagtataataaatttacgattcaaacatcaaatctaaaattacaaatatagaaattttaaattttaatttttttattttcgtctgaaatcttgaattatattaaattaatttccaatcactcttatatcaattacatcaagaaactatttacaaaatgaacaaaatacgacttgaatgaacaagtttgtaattattaaagaaatatttggaaagttaaaatttatctattcttttttatttaacgtccataaaactaaaagtgcttgagtttataaaaaagacacgtgttgagcaataaactacatttccatgttaaaaaatcaacatctaacatacaaacgaaaaataaaaataaaaaatctaacatttgtcaatcaaacacataagtgacatttaattggaaggagtgaaaacataaaaataagaataaaaataggattaaaaagaataaaatttaaaatacataaaaaaaatttataaaaaaattattaaattttttctgatcatagattggaatagtcgtatcttccattttaaaatgaaataatcactaaaatagtataaaaaccattctattaaaatgacattccaacactttaatatgcaaccaaacaaaagaatataatgaaaattattttctttcatttccattccatttcattacctccaaccaaatgccaccataatttttttttctattgtcttaagtctatgaataaagataaagatagacattagatacgcttat

SEQ ID NO: 67225 - DNA, 1027 bp, Cannabis sativa
ttatgccgctatttaccctatattcttttcttttttaatattatttataatagtgtttttttaatattaaaaataaagttttattcttttttttttttttgtaaattatttatgttgctaaatttttttgagtgtatataaattttctagaagggtatatatgtaattcaacaaccaaaaacccaaaatattgtgactattaatttagttatagatattgtttactcaaatttttacgataatgacgtgtaaagagtagcaatacgtggcacaaaaataccgagactaaattaataaagaatatgtaaagtcatgactgttacaatgaccgtcaaccatgaggggttagtcaaggggttagtcaaggggtatgcctctaccccctataccctcatggcacaagtcatgcattttatcgtagatataatgacatattctcaaaggtatatggggacatccacattacaccataactactgacgacatacaaggggtctcgggggatcacccaacgatgacgattgtcaaccccctcaagtttggtcccggggggtcacccaacgatgacggttgtcaattccctctagttggatcccgggaggtcacccaacgatgacagttgtcactcccctcaagctgggtcccggggggtcacccaacaatgatggtttttacccccctcaagttgggtcccaaggggtcactcaacgatgacggttgtcaccccctcaagttaggtctcggggggtcacccaatgatgacggttatcacccccctcaagttgggtctcgggagtgttgcccccaagtatgggcttcatcctcaaaggttgttgacgaccatgtcacacctataagagaccttcgtcgtcagtaactttttcaaaatgttcaaatcccacgaaaggctcaaagacagttttcaacacaggaaaatagtaggatattatgataaaaatcagacttcaactacctccgaaaatcaaggggacattgaggtagctctgcgttggtcgcgtctcctgaa

SEQ ID NO: 67226 - DNA, 1693 bp, Cannabis sativa
tgccatgtggcagccgcagagtcactgccacattctgacgcgcgtcagtaaaaaactttactctccccactcgcgtgtatgtgtcactctcctatcctatttacatgtgtatcccaccctctccttttacacttggtatttatctctccattgtatttttgtaataaagaaactttataaatattatttttgtaattagtaaaagtataaatgtttatttttctttaggatggtataaatgtttattttgagtaattttaacctaaaatagaaaaaaccacaaaactaagagcatctccaacctatacactaaattaggtgtcacactatcactaaacatattgtcaaaaactatttccactccaaccagaacatcaaaagttacactaatattccttaatattactttttcaacaatatttttttttaaatattatctaaaatcacaactattgtaatatataaataataatttaaataatactactaattaatttaaagataataatactatgaaattggtataactcgataaattaaatattatattacaataacataataataatttatggtattcacatttaaatttatacacaacaaattaaaaagtatctctataatgcacccctccaaataaaagagttatgcatgcagccgacagtttgaactttattttttgcgtgttaatttttttaaatttctcaaaattttatagaatatcttcaataattataataaatacaaccatgaaaaaaatagactaaaaaagtcttttagataccaaaaaaagatatggcacattttaattttcatacaataaattaaatattaatttataattgtgaacgagatttggagttggtatggctgacattgacgaccacgatattgtagagagagatgagacggttaagcttcatatggaaggagagtggctgacctataatgccgccagtacgagaatgactactgcatgttttgatactgatttgaatgggaaacagcggtggagtggtgatggaagaagccaagtttgggccttacagacgaatctcaacatgaataacttcatctttcttttatggatagagaaatgagtttagtttcttgttggcattagatgatgatgacattgaagaaattactatgcaagtactagattaaaatcttatatttatgtaggtttcatgagctcttccactactaattctgctttatggattcatcaaaatgtgtctatgtgggaaaaggacgtattaatatcaggtttgattcttttattctctttctagtcttttccactggagttcttaggcctcttcaatgggtttcacgacagatttggcacctggtgagcgaaggcaaaaataaaacccagatctgagatcacaacgtgaaatctacaaattgataattattcatggcaatgtacagttcacggttgttcgtactcgatgatagcagtggtttgttcgtaccaacaatagtggttgctcaatctgaattatcggagatactattggtcttgttagctttaacactttttcagtggaggtggagattgcagggcatagaaagaccatggttatacacgatagactagcgagacgaattccatgcaggtgatagccttgaatggtagagaaaattaagctaagtaattgccttctatatttctatttattaacat

SEQ ID NO: 67227 - DNA, 937 bp, Cannabis sativa
  modified_base (511)..(511): a, c, t, g, unknown or other
taatttttaaaaattatttaatttcttttttttttttttaataatggggtgtatttataagtttaatgggtgcaaatagaactctccttttacaaaaagaataataataaattattttaaattaaattagatttgtacgtggcaacatatacaataaatgcaatgaacattaacaattccacataatcaacagtctaaaaattatccctatctcatacagacaaaactaatgtgaatatggaggttatcaaaactaaaataaataaataaatatatcaaaattaagaatgaaagtaactttatctaaatttaaatgttacatgaattcggtggattctggtatccaggcccaccaattgttatgagtatcttaagttggaattgccgtgggcttgggaacccacgggccagacaattccttgagaacgttgttgttcaaaagaaacccaaatttatctttttatgtgaaactttgtgtaaaagtgataatattgaaagaatgagaattaanttgggctttgagggtgcttacagtgttgatgctaatggtcataagggtgggcttgcacttttatggaagtacagtgatggagtgcggtttctgggattttctcacagccatatcgacattgaaatttctactccaaatctccctacttggcgtttgactggtctatacggggaaccaaaccgtagcttacggttcaagacttggcaattaatcacctctcttcactgtgagtctcaacttccatggtgcatcataggcgatataaacaacataggtaaccaaagtgagaaaaaaggaggtagactttatccttcttctttgatcacaggtttccaagaagtgctatgcaattgtaacttgactgatatggaactccatggccatccgtacacatgggaacgtggcaaaggcacgaacaattgggta

SEQ ID NO: 67228 - DNA, 1096 bp, Cannabis sativa
  modified_base (228)..(228): a, c, t, g, unknown or other
gacaaggtctgcccgcctaccgctaggcccacaagtggaactcgtgatcagggatttggcgactgaccatttgcagtttgggaagtattcatcgttagatctttgtctgtttcgcccagagggatgacatttggaggttgctgacctacagcttggtaggcttttcgtatcagcacagtagcttaccgactacgattttcaatttctgtatgatgagcccttaacgcntccatctctttgtctctccactcggtaaacatatgcctttgttcctcgaacgcgagatttaccactgcgcggagatcttcctgatcatgttgacctcgcttttagccaacgacattaagtcttaataataagcgataaaggatatgatttaggtgtaatataagaagataaataaagaacacaaggtttttaaagaggttccaccccgagcaattcggtaatagcctactccccttgatttgtattaacttaagaacgaagaacacagtgtttcctctcttaaagctcttatagtgaaatctctgagtatgctctcttagatctctctcaagtgattcttttgacccccttaccagtgagaatggatcactatttattgtgctacatgcttgagggaaggttttccttttacttacaatatctataattggtaagaatacatattacatatttagaatacacaaattgtgggatttggacagcttgtcatatctctgtgatacgatcccagatttatagggatttctcttgtgcttcacgatgcaaattctggaattgctaagtgttggtgtgctgctcggattgtccactactcggctgggaggaccacattcgtgcaggtatatgctgtgttctactcgaaacatctctttcgggcagatatggagaatcaggtccacgtgtcattagcatgtgatgccacgtcagagtgcgaaaattgggataacacaggccatacttcctactcttatatttggttaagcattaaattgacttcaaatataataaggtagtggtttaattttggttccctgaggttccaatttcaggtagtacttctttttcttatatttgagaatttaactta

SEQ ID NO: 67229 - DNA, 887 bp, Cannabis sativa
taataacaataatattataatctacttcattataattataaatatataaaaatttatgttatatagttttttttttttttactttttcaaagtatgaattcatatgtatttgatagaaataatttataatatttttaaattatattttaatcacatataaaaaaaaattaaaaaaattaagtatataagataggttgatgtagtttgttaattttaaaaataaaaataaaatatatataatgaatatgaaatataaaacatttttaaaacaaataaatagtggttcatattatgtttgattttggtggttcatgtaaaatgtttctaataattaataattaacttagttgataaaatataaagcttaatctcaattttaaccctctcattgataacaaactaaatcttactgtcatatatatatatagactggaacaaatttaacacctgctaaacacaaagagagtgatgattaagcttgttgcgactttttttttttcatttttcatcttatagatacatattgattattagttacttttttgtataagaagaatgttgtccactgacactgagagagtatagatagcagagcttatagctataatatcattagatttcattgtcctcttcaagatccttgagatgctctttcagggtatgttcctctgtctcccatgtctcactgtcccaagctgaatcaatttcaggcaattgatagtcttcaggtgttaatgaaagttgaaattctggtaaatctggtaattgttggagaaccctgcatacatatatatgtgtgtgtgtaaataccaatttaagtaatttggttcaaaatgactgatgaaaatattcaaataaagggtttttcttacttttcttgttctaag

SEQ ID NO: 67230 - DNA, 723 bp, Cannabis sativa
tataaaaatactctttaacaatttgcaatagagaacttttgcataataggctgtaatacatattgctctaatatgtacttatttcaatataaaaatatttttattttttttttatttttggatcttggacttatcatgaacttttaaatgaacctactagatgacattttaaatttataacatatataaagtggatataaaatctcaagtcgtagaaaatcaactttataaatgtacatgtaatatagtaattttcatttttcattatgctcatgaatattttcttacaagggaagaatcataagatttcattttaaaattaattgtttataagtgaagtagtctatatttttataatgaatcaatattttactatttattttatgtgagagagtggtctcacaataatatattacatataattttacataaaatataatttaatatataatactatatataatttgacaaatcagaggattccaggttaattattttagtgtacaacagtacaatataacaagtcaattcagaattatgaagcagtactatagtaattccaataattaaacttttcaaattaatataaatttttttgttatgctagatcgtacaacaattaatacaagacggcaagtaaaaatatatttatgaaacaatagaagttctagatctagtacgtatttccaataattaaactattcaaaataaattgtctttctt

SEQ ID NO: 67231 - DNA, 541 bp, Cannabis sativa
aattggtaacttttgtaacacagagggtccaaaatgatatttacccataatattttaattaaggcttgacctgaattttaatgggcctaagaaaaaattatcttttagactattatttaaaaaaaaaatatatatatacgtggtatttttcaaaatcataaaaaacattatgtgtatttttaaaaaggaaaatatttttttagacacttggactaggtgggctctaggcgcgggtctaactctctttcatgaaaaatataattttattgaaagaaatagaaattttgtgaggaaaaagataaatatatctaggggtgttaattggatcacatccaatatttttaggcttatccagatccaatctaattatatattggatgatagattttaccatccaatttgatccaattaatttcagtcattcaatcgatccaacatccaatggatattagataggattagttctatccattagatgtattttatgtatatctattggttcaatttaggtttatccaaaatttacatggtatactaactt

SEQ ID NO: 67232 - DNA, 662 bp, Cannabis sativa
  modified_base (618)..(628): a, c, t, g, unknown or other
tgtacacaatcacaaacaagtaatacaatgataagtatcaaagttcgtatccacatagatttttacactaaataattcaatatcagctaaaagcaatgataaaaaatttaaagtaaaattaaataaaataaaataaccaaatccaaagaaaattttctatccttgatacagaagagtctaaaaacaatatttagagtagtccctagtagaggtttactataagcaaggtagtccctagtttagggccccaattttatagtagcacttatatgtataaaattttaaaaatatatcaagatttcaaaaatatactattaggtcatttattaaaaagaacatagggtatttttaaaaatgattaaaaatatatatttttatagaagaaaatatttatttgggccctcagttacatatgggctttttattaaaaagatatgtgatatttttaaaaattattaaaagaaatatatgtatacttttaagaaaaaaaatatttatttgggctaataggttagatggttggaccttagacacaagcttagcttgtcttattctagaccccgactcaaataaatatagaggtaagttgaaaaatgccttttttattaatcaattaannnnnnnnnnntctaattttatatttatttaaaacatacctcttt

SEQ ID NO: 67233 - DNA, 1078 bp, Cannabis sativa
  modified_base (879)..(881): a, c, t, g, unknown or other
ggaggagcgagcgtcctccgtcacaacaaagacaacgagtaacaacctaaggtcgtgagaatagaaggaataatgtaccccctcctacacagcaactaactaggaggaatgcacaaggacctactgccccacaagacaatgttgtagatcccccacgaggaggctcccgtgaggagaggggcacaacacgcaaatgggatcctaccatctcagccacctctagcacctagggatattggtgtggacgagaggggaagagaccatgttcggaaccctccttaaccaatcaggttcaccccatcaccaataaggcatcttgagcctccatgtactaatgcaccagcaccacatcaaccagccctaagagagaggtcacgacaaagggaagcacctcccaatcgccttcaaagtcaagacttatcgcgaacccctcaaaacgggcgagaggattaccgagacaaccatgcttaatcggtacctcaacctaggggacatggaggggaaagacgacgcaccatctcccgtgataactatgcccatccgagactagcacccagggagactagaccacaacatgcacaacctcactcaccccgagaggatagttacttatcatgatctcggactaccgcaatgcaatcgtatgcccaacaatggcctgcactttgggggccgcaacaatagagaacgatgagcttcatgggggagtgttaccattccgactcaaggagccgggtgagcgttcaagacaatgcaccttctccatattatgaggaacatcctcgataccccccacgtgacgcgaggagctcggaccttcaggaccatctgaaccaaaggcgaaaacttgatttgagagaccacttgaacagggggcannnacagagggaggctccttatcgagcgcagtatgacattctgccacgacaaggagaatatgcgccctaacttaatgtgaacgatcctctactacacggtctgaatactcctgtgcctgtgataaatgccccacgaattacagcattagaacaataaatttagcagtttttggatgcccaaggaagagtcgaggggtact

SEQ ID NO: 67234 - DNA, 990 bp, Cannabis sativa
  modified_base (963)..(964): a, c, t, g, unknown or other
tccggatccattttcattggaggttccgtccacaaatactttccatgctgggaccgacggtgccggtgtgtgtacggttgcttcggcttcattacattcggtgatgaagtttgctagcgcttgcccctttatagaaatacggggtatgtattgtaagtcgaatttacttaactccatcgcccatttgaggagcctttcggacgcctctggcttttgtaggacttgccggagtgggtgattggtcaacaccttgattgggtgatcttggacgtagggtctcaacttcctcgaggccattagcaggcaaaaaaccagtttttcaatgacggggtaccgcgtctctgcccctatcatgcgcttactgacgtagtacacgggatgctgtgttttctcttcttcccggactaaggctgcactgaccgcgtgctcggagacggccaagtacaaaaacaagtcctctctgagaatgggttttgacaagattggaggcttggccatgtgctctttcagttttttgaatgcctcctcgcactagccagaccattcaaacttctggcacttcttcagaatgtagaagaagggaatgcacttgtttgtggaccgggagattcaacggctcagggcagcaacctttccggttaggctctgcatgtctttgtgtttcttgggggatggcatgcttagaagagcttcaattttttttgggtttgcctcaatccctctctgactaacaatgaagcccaagaacttccgtgatttgaccccgaaggtgcatttctttatgttgagcttcattccatatctccggaccacttcaaaacattcttctaggtcgtccgcgtggctgttgcacgccttacacttgactagcatgtcgtctacgtatacctccatgttgcgccagtgtttttcaatccaaaaggcatgactaggttacagtatactgttaggttttatgccctnnataaaactctttacaatctgattagt

SEQ ID NO: 67235 - DNA, 722 bp, Cannabis sativa
gaatcatatttaaacatgtgcctaacatatttaaaaacagagtttcatagagaatttgagaagattcgggcaatgaatgttgcggttgcacaatatcttaaggaaattatatttgagaaatgggttcggtcgtactttctaggggtacattacaatgtaatgacgagtaactgggctgaaagcttcaacaacacaactaaggacgcaagaggctttctggtcactgcttctgtagcattcctgaggtccaaagtcaaacaatggtttgctacgcgaaaagaaaaagctgacaagtggacgaagaccctagcaccaaaattggaggaggacttggcattaaaatttgagaactctcagtatttgaacattgacacatgtgcaccttacacgttgaatgttcaccctggaggattagttgagaccggtgccgtagtggacttgcaggaacatacttgcacttgcggcttgttccaaatcatgaagtttcattatcctcatgcatgtattactgcttagcaacgaagtattagcatatacgcactatgctcgccatattacataacagaatattagaggagcacatatgaaggcacaattatgctagtttgtgacgaggatgattcaaaattgcctgatgacataaagaacatgatagttggagtgcctgttgagaagcaacaagtaaggcgacccaagaagcaaaaggtgttgggttttatgcc

SEQ ID NO: 67236 - DNA, 1051 bp, Cannabis sativa
  modified_base (69)..(72): a, c, t, g, unknown or other
ttattgttttctttctagttttaatttttctcttaaaatataatataaccaaatagaagtaaagatttnnnnttaaagtacttaactacaattcttatgggatcgacctcactctttgtgagtctattacttgtttacaatacgtatacttgcgtgttgaaattaccacaacatgtatcaatggtattttgggatctagtgtcgactaagtacggtggactcaatggagaagatgaaggaataagtgtagtgttcttggctgtcgtcaaataagtttcaaggagaagatttcgaagaagaagatccaaagatccagaagaagcacttatctcagtctcttacttatccttatataggttttaggatttgttagtgatccctcacatgtctgggtatctcactaacaaatcttgtataccactcttgttaatgaataaaatattacaagaaaataaatatctataaaaatctccttgtttctacgcaaaaatcccacaaacattggaaaagttgttattttcagttgaagatgcaccaatttaaaatggagtgataagatatcacatcttgactgcaaatgcatgttattggcgataagtactgaaaacctatattttggagtgtcagtgctcgcatacaatgccacatgggatgttgcagtgtcctctatcaaccctcatttaaccacatttactcaattaagagtaaaatgtaccagtcttccttgtgagccaattttagacccaataacttcagaattgagccatggctgtgagacacacttatatccatattgaaattatctttccaattccagttgaaacagatcatttggataaaaattcagagagttccacctattttactaaatgtagtttatgctatcttgtaccagttatgaatgagcaccgacagacatggccaaatagcagtgctcgaccatgcatgttctcggacccctcggggtgtgttttgataggttttttgatggcgagtcatattttaggggtcttgagacccaaaatctcattttgacatctgaaaccctaac

SEQ ID NO: 67237 - DNA, 1792 bp, Cannabis sativa
gcacattttttgtaatataattgtttttgttgtacactaatgaaaaaaccccttcaaaatttatatattagccatatttttttataataataaaagacctacacctaaacattttttaagaactatactagcattaaaattaagcttacgattaacactattattagaaccagagcaaagcttatattccataataaacaaaatgagaagtttatatttcttaacaagaagagataaattacatgatgcttgtggattccctagaatacgggcattccaacttaagatgctaagcacttacaaaaaatatatacaaattaaaggtaaaaataaaaacaaagaacgaatgccaaaacgcacccagggtcttgaaagaaacaaccaaagcccaagccaaagtaaagaacaaatcttaaggagggtttaagaagaaacttgcatgtaatgaccgcactttagaatatggattagtaaagtcaattagcactaattattggtatttttataattatgcatgaaattattatattgtgagttccatttttagaaatgggcattagagttgtaatttcttaattctagagatcttattaaactctaggggtattttttgtgttatatgtgaattatgcaatttttctgatttttgctcggcgacgacgaaaaatgcgatggatggccgttagagtcccatgggtacgtctaaaacctttttctaagtgggataaatatttaagataaatagaataccaagtttgagcggggttatagtttttaactattttacccctaggcttgaattagcttaagtttaagcatcaagggcattttggtcattttattagtgtgatgtggtggctatttgaaagcttgacagctggctttttctccttcaactcagcctaggtttatctaattatttgaaaaattaaaattaaaaataaaaagaaggaaaaacccaattttcctacacctctttctctcccttcgagccttccttgaaccagcgataactttagtttttggcagtgatttcagaggggttttggctgaaatcaagtggggaaatgctaaggtaagaactctagtttctctttttggagtttttatgttgttagttagttcacgtatgttgaaattgagattttactactgtttgagttagggtttgtttttgattgttttctagtgattgttggagttgttctaggtctgattttactggttttggagcttaattcttggattgaacaaagaactaaaatttggaattatggcatgtttggtttttgtgtttgtttctggtttctactgcttggtttgtgttatttgaggttattataggtattttggaaggtttggtaaggtttgggcacaatttaggcatgattttgaattatttgggttacctggtgcaaaccggttaactggatcagggtctggtttcctgaatattttttgttgtcaattcatgctattttcagagtttcggttggttaaattcttgtttgttagggttctatgattttagtggtgaatcacagaacccttagttagggtttaagtttttctagattagggtttttgcgtgttatttacccgtacacgtgaatgtgactaggacatccatccagcacgaggtattccagccaagttaattgaattcataaacaaggtgaaagtagtatagaacatatgatatgtatgcgaatgtatgtatgtgtgatatatatgcatgcttgttgtgattcatacactaccaacacaagtacagtagcggtacagagtgcat

SEQ ID NO: 67238 - DNA, 1005 bp, Cannabis sativa
  modified_base (961)..(964): a, c, t, g, unknown or other
acacgaacaacattactatccaaatgaactcataccaaaaataaattgtgatcaattcgagtgattactcttatttcaaaaaggaaaactgacgataaaaaatcaatctcagttcaatcgtgtactattagttaaaaaggattgaactaatacctgaacaggggcagcgaaaaatctgacgttagtgcaaaactcggtaggtgttttatgaatggtgatcgaataggaataaggtgtgagacatgatttggtatgtgaaatggtggggtttagcaaagaagcgtgaggaaagctcttgaactggttcgagaattgtttgagctttgatttcccaattctgcaccaaaatgccatcttcttctaacctcacaaatctgattttggctaaagtaagagtagaaaaagcatgtttatacaaactgatttgggattaaaaaaaaaaactcacaaattataaaaatcacagtcgggagatttacctaagttggcagctgcgattgtagtattacaggccgtcgacgaacggagctggagctcgaaggcggaggcgggcgaacgaactttgcgccgggcccgaggcggtcgcagtagccggcgacgggcagatgcggcagaatatatcgagccgtctggtagagagaagaacacgatatgtttttttttcttggcatttaggttttatttgagtttttttttttattattattttatttttagttggttaattaggatttttatcctccaactttcacatatacaaaatcatgtctcctaaacttttaaaatcgttaaaaatagttcttgaactattgagattgttcaatttaaggacttttatccaattttagtaaaaaaaatatctaacattgatgaaagttcagggagtttgatttagtacatgtgttactaaaatttataatcactacgcaagtatacgcaatcaagtagtaaactcacacannnnaggtcgaaccacagggaattggactaattactactaaatta

SEQ ID NO: 67239 - DNA, 1333 bp, Cannabis sativa
tgactaaaaaattatttcggatactaaaacagatagagatgtatcggtgtatcccttttaaggggatgcattatagaatttcccgagatttatatactgctatttctccaaaatatatatttaaaacaaaatgggattattttcttctttaaatgtgtattaatagaaatttacttttctgtaactgctactaagtcccatgctcaatcaaaaaacgtaaatattaaaaatatcaaagcttttttctactgatgaatgcttttaggtttgaaatcttttaacgaggagttttttaaaaggttctacaatcagtttatatatataattctattaaaatttgagtggtggggtgtacttataaaaaataaaataaagaaattaaaaatatctatttcagtcattttattaaaggttaaatatgtaattataattttggggtgtagttagaattttgtggggtgtaaatataactccccataagacaataatgaaaattacatttacgtacatgtaaataaagtttcagctatgcccttgttaagaaaagtaatttcaactataccccaattaaatttaaaaattaaaaattaaaaatacaacacagcatttatgtattgtagaccttatatattaatacaaaacatatcggccttttgttaagttttactgaaaaaataactattaagattagtcactaaatattttgttggttgtaaaaatcagtaaataatatataataggggaattacttaatatactattttttttaacttttttttttttaaatttacggttttggtttctaaagtggttgcatcactagttgcaataggggtttctatacgatatttgttgcaaattaagttgcagcgctagttgcaatatgggcttctatgtaaaattccgtaaaaattcaaaaaaaaaatgcaaaaaaaaaatggttagaagtgtaaaaatgaaaaaaccctatataatatgaaaataagatttttataaaaatattaaattttgagtaaaaatttacaattttattgtcacataatttttttttttacaaaaatatagtctttttataaaacaaccgtaatataaaatagaataatcaaaacaacagcagaacaactaaaaaataattgttgaacaacagtgaaaatttaatacagtacacagtataaaacttacatatttttgaaaaaaattctaccctacagtaaaaaaataaaaaatttaaaaaatttagtatgtggtgtaaaaacccctataaaataattttacctacactaaaattactaaagagtaagtccgacctttttttttttgggaagagtaatat

SEQ ID NO: 67240 - DNA, 1236 bp, Cannabis sativa
aagatttccagaagagagtccaaaagtacatcaacttagaagaagccaaatagtggcttatgggggatactatccgaccggaatagcagggtatgtgcctagagtccagctcctggggaccctaccaacggctactccaccaatgagcgacatacaattctccgccaccccagggtataatcagagctaggcattggctcctgcatcttctcattatgggaatccttctgggataagtggacaagtcctgtctcactctgctcctgctgcaagcctagcgggaccttctcaaggctctcggagcaagaggtcctcaaaagatagcaaccggacggaggacaagcgacagaaaagggggtacactccccaatacacctagtacacggaactgacggactcctaggaacgtgtatatttcgccaccaggcaaaatacgcactaccggagaccgcctcctctgtacagagatagctcccgaagggatcccaataaaagatgcgagtaccataacgacattggacacaacaccaatgaatgcaaaaaccataaagacgagatcgaaaacttgattcgattgggtcatctctacgagtggattaagaaccgggtgcctcatctcaacctggttctgacagcaggacctttgccccaaggaacgccagggggtgcgtccggagtgttggcaccagttgctcccccaggggaacctcaacagattcctggcctgccatcgagacccaatggaagagtagctatgatctctagaggaccccatatcggagggactactcgaaaggaattgaagcgctacgtcggggccgtaaaacacagtgaagtttgggaagttgctcaactcccagctcaaaggtcccgactcatggatcaacccattacattcacagaagaggacgcaaagacggtgcgttttcctcaccatgaccctctcgtcatagaaactctaatcgacaacaagattgtggctagaatcctaatcgacaatgggagttctgtgaatttattatttaaagacgccttcacggtaataggcctcagggaccgggatctctcgcaaagtggttcccagctcacggtattcaatgggacaacacttatcccaatgggaaaagtaagatttccagtcaccttgtgcccggatacaccccaaagcacttttaaatactgcacattcgtggtggtagactgctcgactgcttacaacgtaatcctcggccgacc

SEQ ID NO: 67241 - DNA, 1098 bp, Cannabis sativa
ttcctctctctgtaatcgaatgaaaaaaaaaaaaaaacagtggtccgatggtcgaatcatggggttcgattgcctttttttttcattcgttttcagatagaggaagagagagagtggtccgaccatcggacctgagattttttttttttcattcgttttcagagagagagaggaagagagagagtgtttgagttatgaggggggtatttttggattttgaaaaagtgtcatatttttttgtagtgtaaattgtattggtttaaaaaaataaataaattttttaagtatagaaaattaaattttccatctaatatcactcactgaaattgagtgggctccaccataaaaggaatcttctaacagtttatgtacttatttgaagagaaaacatattaagtaataaaggacgcgtcaaaaaaaaaaaaattaagtaataaaggagagttcggttttgggaaaaaaaaaataaattatacatattgagagaggatattcaacaaaaagtatgagaatgtatgaataaaaaaatcaaaatgtctcgattgtcgaggcccccaagtgacagcggtgtcaccttactcttgtttgcccatgtaacatattttaaataagaggattgctataagagctgctccaagaaactacaataataaagtttcaagttgcatttgtctttagacacatcaattacttcatcaaatgtgttgtgtgactttttttttaatatatatttatattattataaaattaatatttaattattgtgtgtaaattaaaatgtacccttatttatttcaatatcatagaaactttactagtttattttttctatggtcgtatacattataattatttaaaacattcagtaaaattttaaaaaatttaagaaaatttaacacgccaaaaataaggtacaaactgttagttgcatgcatggctctttttattttattaaaaaattaatataataataaaaaatatttttagtgtaatttttagtatagtggttggagtgaaaatagcttttgacactaaatttaatgatggtgtgacactaaatttagtgtatgggtcggagatgctctaagagataatacc

SEQ ID NO: 67242 - DNA, 637 bp, Cannabis sativa
gttctacttttagtgggtctggaccatcctcaaagacaggaggattttttttcctaaactgctcatatatcagctccatacaatatcccatttttggctgcactaccagaggtgccaatgttggtggaggatgagcttgttcctctctcaagtctcaaatctgctccctttctacctaattatctcatgcttggaagcaaacatttgtctccaattctaaggaggtggaggatgctctccctccccacctacctagaaccccagctcactattaaaatggctagatccctgctgcatgatctaatgcacttgcgatctaaaacttcaaaccattcagaattcaactagatatcatatcaatatgcatatgtcacacacatattcttatcacaatcttggttatattactttcccaacatgctttataatagtctaggtaggtgattcaatatcaattaatataaacacttactatacaatgatttgacctatctttgtagcaagtgtacatattccaccagtcttaaggacctttaaaaccatggctgctctgatactaagttatagcaccctaatctataaggacgcaatgtgtgtgattttataattattttagtgataatagattaattaatta

SEQ ID NO: 67243 - DNA, 1055 bp, Cannabis sativa
tttatatattacaacatattttacttgagactcgaatccaggaccttcaacactcacacacccacctatgaccacttgagctagccccaagtgatattcttgaccattacatctttataattcaatgctttaataaaaagttttgtgtaaaattatgtgttaatagagactatccttaataatatatatgttgtatgtgtagggtagtaaatgattttatttaaaggatatacaaaatatagggaatttattttgtctcttatatataaaaacaaaatacattaccttgttttatattataagctttctttttctattttgattaatgttgaatgaatgtactctaaaatttaatgtactttgacttttaaataactgttattgaacagttataatgaagataaacgatatattttcgaaaaaataaattttcacttcataaatattaaatatacatcagagcgcaataagacaatatgtacttacggtggccatgtatcagcttctataaaaaatcaaatttagcaagaaaaagacatatgagctacaacttttttttaaaaaaaaaaacaaataagtacaaaatgattacaagttagggattggctaaagcatctccaatgataaaaatttaaaggactagatggatatattatgtggcaaagtattgagatactatattattagacagaagaggatgttattctaaaaatttacatatatgttatattgtaccattgatgttattcattattttttaataaaaaattgaagcaaaaaattattgtagctaaaaattaagatatacattaaataataatgtgtgagatcataattatagcatttttaaaaagtgttatgcattaaaatatttttaaaagtaagagtgtcaaatataatgtggaaaagaaataaaagaaaatattataattttaaataattttatcatccttaaaaatattaccattagagatggtctaatgtcgcctttacataaaaaaatgttaccatttgcttttttcaaacacagtcgttggagtggtctatgtaactac

SEQ ID NO: 67244 - DNA, 948 bp, Cannabis sativa
ttctgctctactgtatgtgcagaagtgcaccagtccctagtttacagaagattggcttttgttaatatgtttttaagtttttccctcttctttgttgggcatttgtaccatcataaactattaattatatatggagtcatgaataccatttcagatcctctacttatactgcccaattaattacatgcattttctcagaagtattttccaatacatttcttcttcctctaaacactacataaacagcttattcaagatatggattatggagagcttcgatttttgtcttcctaattggagatatatgttatgcaaatgggacaatggttgagtcaacaagtttcaagttcaaatgtttgaaacattgcagaaatatagaccactgagcttcggattaacacatcagattcagaacccattttgttttagaactagaagaatatatattcaaccgacttaatctatttctcaaatttattctcacctcaaaatctatctcaaagccctcaacttgaatactaccctccataatccatatccctaccagccacccaagcaaattatagttaagatttataacaaattaaggggaaaaatgactacaaaatttgccaacatttcagcttttcaggtgctataaatgttaagaaccttccaattgggccaataacaaagagtgcatacattagaaaaacaaacaaaatgtaagcaagaagtcagtagctgttattgatccgtttcaggttgtagatctattatacattattactaacaacaaagctaaaactactgctgcttttttttaaagagaaatatcattttttctcaaagacatttaatcaaacacctttactatacaaaagcaacaataacacagtggttaaaaacactaacttcaaccgttgattttttcgatcattcgcatcaatcttttcaagtagtattgct

SEQ ID NO: 67245 - DNA, 2709 bp, Cannabis sativa
cttctacacctccctctgaaggtctggtctccttattataatctcatctattatatatatatttatatgtaaattgatcatgtaataaaatcatgttgtatgtatgtatgtatgtatatgcagtgagagcattgaacttgatctttgagcaatggaatataagggctgagtctaatgaatggaacataagtggagaaccatgcagtggcttcgccttggatgaatccccacccatcaccgacacatcctataatcccttcatcaaatgcgactgtactttcaacagtggcaccatctgtcacattactgtatgtatatatatatatatctattatttatatgtatataaatatttttttttagaaaaaaataactttgtgtatgttgtaagtgtttagaatcatttctaaatttttaaaattttttgaataatttataattctaaaagtaaaatttaaatatgttattccgtgcgtgactgcttttttacacgattaataagtaattgtttgaattttatttttaacactataaattatttaaactattttaaaaaaatttaaataactatataacttacattaaaagtgaattaaaaaaattaaaaaaatttagtagatgcccaaaaataaaaataagcttatcctgaaatactggtctaaagtgtactgtacacttcccaaaacttcactctaaatttatatttaaattaaattacatattgtgaaatagtaacttaattatcatatagagcatatttgctaacataataaggttgctatcatggatcttatcatcttatagtgttgtacactatttttatccattaataattttcaaaaatatatatttgcataattgttagtcatttatttttaaaattataaatatttacgtaattttagatcatctagtggtctatacacaaattaggcgcttactcattttctttgataataattgcttttttgacattttgtaaaatattgcccttttaaaaatagaaaattaaacacttattatctttcataacattaaaacactctcattaacttgtttaccttattggacctatcacttaaagtattttactaagatattgtttgataatatttttatgttttcattttttaattacaaaataaaagtaaaatttttatttttaaaaattttatttttagaaaacaaatacgttctgcaaccaattttttttttcaattttaaaaaaagaaaataaaagtgtgttctgtaaagttcattttcattttcctttttcttgattttatttaagtcgaatctaggtccgagatcgggttcgggtcagtgaccgagttcagcgtcagggctgtaggagagatttgggtccaggtcttgtcggaatccaaaatattaattaagaaaaaaatgtttaaaaaaatattaaagtgatttttttttaaaaaaaaaatttgttctcaattaaaaaaataaaaaatgaaaacagttttatagtacatatttttgaaaaatattttcacttttccaattttaaagaacagaaaattaattaaaaaagtgttaccaaacgccacctaaaattttattttttttcattttacctcacgtagttacattatattgtgtaacaactctctatatttttctctatattatttaaatattatatttttacatatattttattacttaaaacaaatacaagacaaaacaaagtgtggaaaaacaaaaatattaattaaaataatatacaatgacaaaaataaagttcaaatattttgtttcacctgtaattatttattctcagagcatggtaactgtttaaaccttattctcgatactataaatgattcaaaattatttaaaagtatatatgttatcctaaatgttgtcaatatgtacatgatctcgaagaaaaaaaaatcaaaataaaaaacttttctaaaagtcaaaacagataccataatacctttatagaggagtgtgttggggtatcaattcaagtcccacatcgaaagaatagacaaaaattgtcttgaacataagtgttccatgtccaaaaataaaacagtgagggcctaagcttaaagtagacaataccatactaatgtgggagttaacgtgattaggtgtggtagcccaataaggtgggtcaacaagtggtattgctaggtttaagagttgagcaatgggttgcatgtgcgatgtgtgggagaagtcatcaatgtgacgacctcctgattgaagatttggatggtgcatgtatcgaaagtctacctgatattagtgaaggtcagacagccgtttggtgatagtagcggtacaagatgatttcgctagaggggaggtcatgagtacatagtagggagtcccacattagaaaaatagacaagagttgtctagaatataagtgttctaccgactctattagtataagacattttaggcccaaaacggacaatgtcatcccaagccgccaactgatgagtgtaaaaatccaagacacataaaaatgggagtaattccaaaaatctaaaagggtgaaggaaaacaatagtacaattccagtttcagatagtaaaacgctaattaggggatctgactatctgtgagagaaataacattcctcgaatgacaaagcgtcagagcatgaagaagagcaaaagtctcagtgggaaaaagatagaaactttaatagtgagaccttccacc

SEQ ID NO: 67246 - DNA, 816 bp, Cannabis sativa
  modified_base (46)..(51): a, c, t, g, unknown or other
cacaatcaaggtagtacatatactcatataaatatatatatatatnnnnnnatatatatatatatatatcaataagttcaatttcgatgatattttgataaaacatgcatgttctttctttttcatcgatctttcttttgtgggaattgtgttaaatctacttaactattttgaaatgatagttcatatgtttcttgtcttagtttgattttctttacatattagaaagagagtttttttttttttgtcttctgaaagggacttataagctgagtaaatgaaataataccatatatattttaggcagttcaagttgttatgaattttattaatgataatactttgcatcaaaatattatagacattatataataaattttgtacctttaatttaatcaatttatattatatttgtttgttaatttgctatttttcagaacatatatagacgagtctggacttagggctaaagttatcagacggacctaattaattaatagctagccacacaatgatatatatacatatataatttgctaaaagaaagctaataattatcaccatcatgtaatgttgtacaaagtattatcacacaaataaatatatttatgaactgtatatatataacgttcaatagaatattcaagtgttataataataagatgtggactaattattattacttaggatgctttaaaaaatttctatgtacatattcccacaaatacaatatgcttttctagttatcagaaaaatcgatggaataataatcaacaatttgattgatttgttataataatataattatatatatat

SEQ ID NO: 67247 - DNA, 621 bp, Cannabis sativa
taatatatcatgtttctaatatgagatgcatactaatgcatgaacatgttattaatcaactattaatgaatatttatttaaaagcaataaataaatagtgatgataaatcgagtactaattgggtatttctaattttacaacctttaaaattagaaactaaattacgaaacttatatctccatagcagcaatgataattttgtaaatttgtaggatcttcgtaagcctcaaatttaattaaaacaattttaatttaatatacctttttaaattcttttaattaattaaaacaattttaattaattaattcttaaataaattttctatttaagacaaattaattatcttttagttttgtcttaaaatagtaatatttattatttattttgagttaagacaatttttttttttttaaatttagttttaggtttaagtttgaatttcaaacttaaaattaattatatttatttaattcaaatatgaatgtgaaaaaaaaatatctttcaaaactctattaatttggtttaattattaaaaataataaaactgttttattatttattaattaataattaggataattattattgagattaaaattcaaataataactatgatatt

SEQ ID NO: 67248 - DNA, 1307 bp, Cannabis sativa
aaagtcagagtaggattgacaggaccattattgatgatgaaggcatttcgctggtaccagattgcagagaggcaacatcctatgtaatttaggaacccagctctgtttcccccataaggagagttggaaaattgtcgcaccagatttcccattacatcagatagtgaatcatcagtcacttcactaatcctaatgggtttgcttcctccaaaccaaatagatttagcaaaactacatctgcagaacaaatgcaaaggggtctcaataccagtatcacacaatacacactctctgtcagggagaaagtgaagtctgctctttgttgggacagcatcattaagaactctccaaaggaaaacggaattcctggggtgaataccagaagcccatatccacttccatatatctttagtcgggtcaaacctccacgattgttctacgttgtaagctgccttcactgaaaaaagaccattttgagtctgcttccagaatacttgatcttggaaaggagcagggattcttgggatagcaagaatacgggttcccaactcagtaccaaaaatttgaagaaccatctccgagttccaattgttgcctgaagaaatatctgctatagttttgattgtatatcctctatttctcatgtcctgcattagagtaaaaaattcacatgtatccatccacggaatccaaggttgatgccagaagttgattgaacccccagaagcagctatggaaattgttcccttggcaattgtagatcttgtatccaaaatgcaattccaaaggtaagagttattgctcttgctctttacctcccagaaagaatcatacttgcaatatttttccagcaagcaattgacccaaggtttgtcttcctttgttgtcaaactccaagctaacttagttaacagggctttgttcatgtcttcacacctccttaaccccaaacctccagaagctttcggttggcagattttatcccaggacttaagcgcaagataccgatccttatccaccctaccagaccaccaaaatttcctcattaatgcatcaagctctcgacagcttgctaaaggaactttcgaagtggacattgcataaattggcatagccgaggtcactgatttgatcagtgttaaccggccagcatacgatattagtttcatcttccatccttctagtttcttcagcatactttcctttagtttcaaataatcatcttttttccgtctcttgaagacaaacggatttcctaggtgtctttcctcacctcggacttgctcaatattaaggaggccaaggat

SEQ ID NO: 67249 - DNA, 1274 bp, Cannabis sativa
gatgaagagtgttcctacggctgacgaaatatggaatgtggtggctgccatgcatcctttgaaggccccaggtcctgacggaatgcccgattttttctatagaagatattggaatatagtggggagtgaagtgattgaaatggtccaagatttcttccattctgggcggctggagagacaggtaaattacacctatatttgcttgatcccgaaagaggaaaatgcgagaacggtggataaattcagacccataagtctttgcaattttgcttacaaaattatctctaagatatttgcgactagactgagggaggttatcaacaagttgatctccccgttccaatcggcttttgttccgggaagatggattgcggagtcctccattctcactcaagaattggtccacacgataaagaggaagaaaggaaagggtgggcttatggcgattaagctagatatgctcaaagcatatgatagaatcgaatggaactttcttcatgaggtgcttaaaggtcacggttttgaccagcaactttgtaatctgataatggaatgtgtacaaatggtctcctactctgtgttaatcaatggagtaccgcaaaaaaaattctttccaaaaaggggattacgccagggcgacccgttgtctccctttctgttcttactctgccatgatgttctatccaaattaatcaccaagcaacaagcaagaggccagtttcatggaatctcaatctcaaggtcggccccagcaatatctcacttgatgttcgcggacgatacaatcctgttcacccgtgctaatgtgagtatggcgtccaaaattttggactgtgctcataagtatgagctatggtctggtcaacaatgcagcttggtgaaatccagtgtactcttctcgaagaatgtggaaacccctttgaagaccaatattctgaatgtgttgaaagttaaggagtgcgatggtaatgaaaagcatttggggaacccctttgtattcaaaaggaagaaaagagatgaatatatgttcttcaaagaaaaggtgttgaagcggattgaaggttggaaaacaaagttgttatcgtttgcggggcgtaccaccttggttaaatcggtagcactttcgattccattatacgcgatgtcaacaaacaggctgcctttatctacatgccgggaccttgacaaggttattaggagattttggtggacgggggactcggaaaaggagcaattcatggcccttgtggggtgggaaaagctctgctcgccca

SEQ ID NO: 67250 - DNA, 1951 bp, Cannabis sativa
tcattttcttattggtatatttgaactattttttttaaataataataaatttaataacttggaccaatcagggattaccacgtggcaatttatttaaccgagtacctacaaaagttctaaaactataacttaagtattattaccgcaaaaaattaaacttaggtattcatttgcaactggaagttaaacttaggtatttatgctgcgaattactcttttaaaaattaataattttgtaatatatagtgcggtgcaatttaaactgtaattattaaatttaaaacggcaaattgcactgtaccgtgagatttggtagacatgcaaactacaaccgcacagcaaataatttcaaattgtatttttttttttttttttgcagtgtagataattttatcaacacccactacttgtactaataacaatgaattgttgggattaaatttgatttaagagggtaattaattaattaagaaaaaagaggaatattaatgtattgagatgggtcaccacgtgtgatatagtcaagtctcactcaatggccttatccaaatgcaatgctttttattttattcattagtcaaaaacaccataaccactatgtcaatatggtgactaggatcaccctcatcttctactatacacaattaatcattattattattcctttatttatttatttcatattgtatattttttcccattccccaagatgataaaacttatgaaagaaatgtaatgatccaattaaataaataatttttagttaccaatagctaaaatgatataatataaaaagattattttattttagtttattaaatactaattaaaatgcacttatttgatattgtttagaaagaaaaaaaattaaggtagaaaatatttaatggatagcaacacccttttctaaggtgatttatattttgttaccaaaaaatttatcttcttaattaataatcttttgtaataattatatgttgttatatggagtagaaatattttaattaagaaatgaaacaaacaattaagacatattagctctttatcaattttttaggtggaaaagttagacatttttattattgtttctaataataataaaaagtatctgtgtaaactaattctattttaaataatttataatgacaaaaataaaatttacatattgtactagttacaagattatttttttataaatgtggtaagtactttttaaatcttatttttgataacaagtagtcctaaataactacaacgcacacaattattaaaaaagtagattaaaaaagttttctaaacaccgaaacagttataagatttactagaacgaccttttaaggaatctgctataaatttttctaatagtttttaaagaatattactaaataattaaaaagacaactaatagctaaaaactcataaagaaaagtatgagttttaagttagattccgcgttgtttgaaattgtaatataataatattagtattactaggcttaatcctcggatttggataatgttgccacgtaccttaattatctttttcactttctctctcctacacttttcaatgtgtaaatgtatatatatacccatatgagcttaccattctttcatatctatattcatcatcatcatcactctcccattttgtgtttttgattagtttattttcatttagcaaaaaaaaaaaagattagttttttgtttttaagtgtttttgaaaatgttggcaatatttgataaggaattggttcatccaccacaagagctaaatagccctaatgtggattcaagaaaggcaaagtttcctcaagaaattcttaaccatttctcatcttcttctgataatgacaaagctttctctgttgggtttggaaactctgctcttatggcttttgttccacaagaaatgtctttctctcttcatcaaaggtatatataaatataaa

SEQ ID NO: 67251 - DNA, 2107 bp, Cannabis sativa
  modified_base (1897)..(1902): a, c, t, g, unknown or other
tctctcctcacacgcacgcccctctctctctctctcattaactcacacgcatcacacacatcagtgtggtgtgagttttgtgatcatccctaactcttcacagtatctcatgagttgagaatatactgtaattgcataattgtattcattttatagaatctaatagtccactctattcttgagtgttgaggctggcttggaagattatggtgtaaactcttcagtagtttcgtagattggatgttcgattaataatacaaaaagatagtgaggatatcctttattaataggctacaagaggtattgtctctctattcattagactagatttaatctatatatattatggtgagatccttgagattatcgttcatattggattaaattatttttaatcaaatacgcttctacttttctaactcttatatggaccataaaaactaacattacgttcatagtaaagatgaaattttggtattttggtagtttttggaaatattgaatcatttgggtttggccaagactgaagacaattacaaaagttcgaaacttctttggttaagttggttaataatgttgtattgtaaaaaggatttccaagaattccatatctttaactgaattaagcaagaaatattcagcggtttgtgttgactgacaaatgtgaagccaattgtcaaaggttgaagtagtgattgattatagctctagtgttagttttaccatcagagcaagaacagtttgtgattattattatgcttctagatagggtttgagctatattctgatgtaagtcatcagggccattatgtatgcttctctttagatagagaagtatgaacaagttacccaacccatgttttggaacttgctacaatagtgtttgcaatgaagttttggcggcactatctctatgagatgttttaagatactttatcatcctgggaaagcccttatggaagcgtatttcttgagtagaaaggaattttgggtaggttttagtgcggagttaatctctacttagtaatcgctaacatggttgagtcaggtatcgagttttggtcgacaatcttagtaatttgacgcttcagtttgatctgttagaaagtgttcaccgatttttttgaaaaaccaataatttaaatgtaagagccaaagaaaaataattcaaatatcaaagaaataagaacactcgggatttttacgtggttgaggcgttaactagccttagtccacgagttaatattattaagttaggctagaaaagctttacggattacaagaaggtatgagcactctctcatttgcctgggcatctgagtaaagaatttccatctgttttcatgtaaggtttattgagtatttatagggcatataggtcatactagttacaatttttccttctaaagggaagtttacaaataaaatattaactttgggcttatctggtgaagcacgtgttgggattcattttaccaggatctagatttactaacaagtatgcttcattaacatcctaaatatgaattttctaatacgatgaaattaacacataagagtttagaaaatcttccattgatggcagcggaataatatgactcattccgctcaaatctctaacccttgttcctttctatcgcagagtaatagtaagatctgagcctggatctctttctctccttcgggttggttaccactgtcttccgcactatgattgagtacttgacttgctatttgtaggcatggcactctatcactatggctcgattatgaagaacaatgaaggagactcgaaatcactatagaaggtgtctctcatctactagctgtctaacatagtaagaaactagatttggtaggttgaaaagagttaagttggatgagatgagagcatcannnnnnttttatagtattttaactagggtttaggtttgaattatatggattaaaaaagaataaaaaattggacaaaaatacacttagtggtcggccacttaaggggccactccctagttacagttttgccactttatttcaaccacttattcttcttttcaataataccatattttccaatttaaacctataaatgttaggttttatgccc

SEQ ID NO: 67252 - DNA, 702 bp, Cannabis sativa
aattgaaagattataaaaaaaaaataagtgtacaaaaacaaatcaaaacaccaaaaagtatcaaatgttacaaatattgatgttgaaaattagctcaacaacaaatttgtattatgatataaaattctttacactaagtttaacatagttgagatatatttttctatcaatttatacaatttccccttagtttctattattactctcttgttcctcagtttcaccagcttagaatgttttcaagatgtattctaacagaattttgattagcttggtgtaagcaagaatcctccttccttttgaacgatgtggtttcctatttgtaggtgggaatgattgttagttcacttcctttcatttgttcagattggtccacatagattcattcttcctcacctatttgcacgattttcttgctcgcttatgtttctcgagttccttaggctttgcttctaatttctcaagttatgctccgctttctatgattgtcaagctttgtctttccaattctgtctcttcctttaagtgaaacgcattaaatgctcctgccacattgttttatcagatcttctttatttgtaatgaatggaattacttccttacccataagatgtgtttatcatttacaattgcccattaattctacaatttttgagcttgtgactgatttagtttgagcataaattttgtgaaagtagttac

SEQ ID NO: 67253 - DNA, 578 bp, Cannabis sativa
ttgtcgatttgaggaggaattaatgggttaaacttggttttttcacccaagctcgaagactccatgtccatgatctggggtacattttatagcattgcttagaaaattgcctagaatttgtttaagctttattctatcacctttgacatgtgagaacttgatcacagaaacaccacatggatccaatttcaaatcaacttttcttttagctccagaagagtagtaaagatcaactacctcttccaaaagttgaacccatttgaaagtcaacctcttccaactgaatcattccagcttcaattttgctagtgtcaagaacagtgttcactatagctaaaagccataagaatatgctagtaatgtcacacaagaaacatttaatcatttgcataataatcatttgtaaaatggtcttttgcaaaatattattcaaaaagaaaatgtcattttgcagagtaacattaagaagaaaaaatccatttctaccaataactccaatgctagtatcttaagcgaacaatgtcacgatgaacaagcaccagcgtcgtgatgatgcctaagaccgaaattccaaaact

SEQ ID NO: 67254 - DNA, 783 bp, Cannabis sativa
attgattggtagttggatggatttaaatttactgttttgccctttcttatttccttgaaaagaaaagagataatatttggttaagtgatagattaatacttactattggtttttttttacatttaaaaaaataataataataataataataattcattatgctgtaaatccatgtttttcgttttgcgaaaatatggataggctcctaaaaaatataggttgtgtcgtattaataattttatagaataaatttatcaagatcgtagacttagtatttttaattacaggtgttcattggatcatatttaatgtttttaagcttattcagatccgatctaattatatattggatgttaaattttaccatccgatctgatccaattaatttagtcatctaatcgattggatgttgaattggatcggttctatcagttggatgtatttcatatatatttattggtttaatttagatttattcaatattttagacttagtattttttggatcggatcgaatccatctaatattttaatttttaagtccagtatgtattggattggattggatccatccaattcaagaaaaaaataataaaatttaagtgttaatttttatatatacatatatatattacgtataacaatataaaatctaattacacatccaaactaaaaatactaatgtaatacccagaatttagaaaatgattagcaaaaccctaattagataattatgagttaattgaggaattatattattatatagttcaatatatgtgaactt

SEQ ID NO: 67255 - DNA, 1340 bp, Cannabis sativa
ataaccttccttgcccctctttaagtgtttaagagaatgcaagagttcaaaagcgatgaggatattatccgtgattaaccttgatttgaggaatgcactttgagactcagaaataacatcaccaaggatcggttgtaatcgaagaacatttgctttggagaccaacttataaagcacattacacaaacttatgggacgaagctgagtgatagtggttggccgtttcacctttgggatcaaagtgatgactgtttgattaaagcttgaagggtcccccccatcattgagtatgttgaggacagtttttgtgacaagatcaccaacaatatcccaataatttgtgtaaaacatgatcgacattccgtcaattccagggctgccatcagattgcattgatttaagagcctcatacacttcagaatctgtgtaagggcgagttaaaattcgattaatgtctgctgtgatgagacttggaactgtggaagaaatctgatgtagagcagcagtatcaataccttcagagctgaatagagattggaaataagcctgaacaacatgagcaattccatcaattgaagtatgttaaacaccttggtcatcagtgagcatacggatagtattgttggttctgcgattcgatgctttttgatgaaaaaatctggtgttagagtctcctgattgtaaccatgaaattcgagatcgctgcttccagtactcttcttcttgagttaataattcatcaagaatggactcacttaatttaatctcttcaaaatggctgatacttgtatcgtgtttgttgttgagagcttcaatcttttgttgtgaaattttattttttttggtaagtctccaaacttagatcgatgccattgttgaagctgtgaagcacaatttgacaggtttttaagaaggttgctggtgggattagtctcggtattcttccaactgttggtgatgatgtcaaggcattgctcatctttaagccatattttttcaaatcgaaaccgagatttaaatcttggtactgatgttgcagaaggcacggatacatgtactcgaagggctcgatgatcggagccaaagaaatccaagtgctcaagtgtgggaatgacaaaaacaatcaagcccagtattgatttaaaaagcccataatcaagcctttctttgacatttgtgagttgagtatgcttgttatgccatgtaaatctgtcaccagagaaatcaatttcttgtaaactacaattatcaatggcagatctgaaggcatcgatttggtgctcatcacgcagaggaccaccaagtttatcttggttagataaaacttcattaaaatctcc

SEQ ID NO: 67256 - DNA, 893 bp, Cannabis sativa
tttataaaaacacaatatttttgtaaaaattaacttaaattccagtatttttgtaagttttcatttttaaaattttgttctaagcccataaaagtttgagatggtcctactgcaaagcggctttggaaggggataagttaataataccacttttttgtatccattaatcaaaatattttcatattatattttattaaaatatacccacttttttgagtggattgtctattatactctcactctctacttagcatataatttacattaacctaaggatctaatgaggacatcatctataaaagtgggtatatcttaaaggatataaaagtagaggtaaaaataaaaataagtaaaataaagtaggtataccatataatttcctcctttggaagaaataatctcaaaggagagtgataaaataatgcaaagttctcctgtgaggtggagcagcaagggcaactgtgccaaacccttagttgaagaggctcccaatttttttaatgagctgattagtttcaaagcaaaacccccaacatgccaaattatattaatggcaatgagctaaattttaatgacaacctatatgagaaagtaatatgtttgtttgtttgataaaaaataagaaaaatgtcaaaaggtatcattgtctactgtctagtatatttttaggcgtcgtatcgctagtagtgtaattaagtactggtctcatataattttaatttttttttgctaacagttccatataatttaatataatagctttaaagaaatattgctaactaatcgagggagacatatctaaaaagtgttggataccactgatgtccaataaaaatgtgaaagacttaacagttggcaacatttgtttattttttttgacaaaataccccatt

SEQ ID NO: 67257 - DNA, 699 bp, Cannabis sativa
cgagtttcgtgccttagccaatacagcagccaagattaagtggctacactctgttttacatgaacttcaagtgcatctcccagctgctccaatcatatgggttgacaaccaacgggctgcctctcttgctgccaagccagtatttcacgccagatcgaagcatatagagattgatcttaacttcgtgagagatcaaattttggccaaagaaattgaggttcggtatgtgccatcaatagaccaaacggctgatattttaacaaaaactctctccactgatcggtttctctatctcaaatccaagctcaaagtgtgctccactcactttcgcttgaggggggatgataaataacaaactttttttaattcattgtattctgttatttcttacagttgtacagattgttagtttttatccacttgtactctgtcttaacagagtttgttatgtttgccattttttttgtaatctttctctatataaatgaaaggttgagctcataaagatttcagagcttttacaattctttgtatccaattctatattgttaccagttaggaattgtattgataagcatctctttcatatcaaaatacaaattaaatttttattcaaaagaaatacaaattaagttcttctcgtttttactttctaaagaaaaagcaacaacaataataaaacatgatatataattgggg

SEQ ID NO: 67258 - DNA, 1740 bp, Cannabis sativa
tattagtattttacaaaaaaaaattattattattattgtaaaaaaaattgtcacattccattccaatgtaaactaaacacagtaatattgctttctaaggtttatcattcccttcatacactctccaagcaatgttaaacctattcacatgaaatgaaacctgtataccaaatggcctctaaaggtagtttggtcattttccaaaccccgaaaatttcccgatacttccaatgcctaacaatgatgccccgctaataatattctaaagcatatgaaacgcggctctctaatggcacaacgtcgtgtaccacagctaccaagcacaaatatagaaaatacgaaactcacacatagcataattaatacatattgaattgtaataagtctccacaaatgtgtaaatcataattaataattcaatctcataattaaaccctgattcttccaacatattaaatttaggcggtcattacaccttctttctgagttttgattatcaccactatagtttcttcttgaacgtgttgtttcagaagtatggggtctttgagaacccattggttctttcccagggcgatgtgtagttttttcaggtcgacttccatcgtttcgattgtgatcggccatggatagattttttgtttgtaaggagagatttttctgagttttatcacgtaggctctcaatgaaagcaccaaactgttaatgcaggatttcgttaaccaataataagttttttcgtaataaatataacacagaaataataaaaaataaataatgtattagtaacacaaaatatttttacgtggttttgcagttaaatctgcatactccacgagtctatcttatttaagatattttctgaatacaagatacaatatacaattgatcgtatatatcttccgtccattattctgtagaatctgctcctatttataggaatataagttggcagttatttacatttaattcaaaatataatcgttaatgaaacgtgattaattcccacatttcatttaaatcgtatattggataatactagctaaccgggtaaatgcttgttattcttatctttatagatggttaatgctgattcggacaattgtatctcgtttattttctaattgcttatccttgtctattataatgtggaaagaacgctaattgttagcagatcattcgcctcgtcaagtttctttagaattgcaaggtggttgtctcgctattcataacccgagattgctttgcataactgtattcactcctttaaataactgaattatcttcttgggtttgtgtactccgaggcagatatgtgtctcgtcaatatgaattttaatagtcttctatccttgtctcgctttaagactatatagtcagcgagttatgaatattttctattaaccctatatttgccgaggtattctttttttctcgcattaaataatataatttcattatatcagacggttcattttttactgtaagacacgtgccattctctacagtgtacgtagtcgaattttaggtataacattagtctattattatcgagttgaaaaaattacatttaatttttttagaagacaacatttttattagtgaaagctatagctctcacattaatactactagttcgttactggctcttttggtaaatttaaacgaagctgctgtataaaaccaagtagtagttctcgtacatatacatacatgtatttacaaacacatgtaaaaatt

SEQ ID NO: 67259 - DNA, 1241 bp, Cannabis sativa
atgacaaaaatgcctctgtaacctattctggttcaaagaatctcaccccagattcattcttaattgagaatacttggttttacctatgtctttgcttgatacttgcgtgaaataatgcagtgttgctgtcaccatctttaagccagttaatcttggctttctgctgtagaaaagaagaataatgctgttgagctgagagaaatgaatttctagtaacaagttcttgttgctgcaactcttcattaagtggatccgcatgtagattgttctgagcttcatcaagagactgtttagcttgagtcaaaactgctagcaaattagaaaaacctttctgattaatctctcgaaatacattcttcaaaatcttcaacttttgcacaatttgatacatactggtaccatttatttcctgtttccaaactgcattaactctgccatcatactcagggtgtgatttccacatcctaaagtatttgaatggctttttcccgcacttccatttgggaaataaagacaaaatcccaggtgaatgatcatagattccttcctttaagaatagagcttcagcattcggataagcatctagccatctttgattagccatgactctatcaatctttgaaaaaatacggtcctgaccttgttgcttatttgtccaagtaaaaaaacatccagtagctttgatgtcttctaactggcagctttgtatgcaatctataaattcaacttcctcatagtatttaactctgtgtcccactctctcttctttagttgtgatagcattgaaatctcccattagaatccacctttcatctgttttaagctgcattagatccttccacagctctattctatccttcctgtcattgaacccataaacaacagttaataaactgttatatgtaccatccattgttgagattctcaagtgcataaattgacttgtgcacttgataatatcaacagtgaaacggttcgggttccaagctataactattctccccccttggtgccaagctatgttcgatgaaaaacaccacccattaaagacattaaggtacaaggttccaagtttgtgaacctttacccttgtttcgagaagaccaacaaacccagcctcctgagaacgaataaactgcttgatctgttgttgcttttgctggttgttggctccccgcacgttccaaacaaggaacttatccataaccaagagagggacctcccccccccccccccccccc

SEQ ID NO: 67260 - DNA, 1132 bp, Cannabis sativa
tagttcttgataataaatgtgaagtaaaatagaatatttaataagctacagacaaatacatattacaaaatgttacttttagaagttatatagatgaacagttaaaaaaatatgtgtacaatataaggataaaaacatagtcaccaccataacattattcactatatatgttgtagctagaatgggattacttgtggtatatagtattcaaattcttccaaaggtacttctatgctgcttctttttaattgtataatcaaatattttagaccattctttattattggaatcattattgttgaatattatgatacttaacacaatatataacacatgtaacatatgagttataacatgtataatagcaaatgatagtatttaaaacaatataaagagaaaaataatagattgaaaacataatagcattaattgttcatttggctatccaacaaagacttgatatcacatcatttttcacattatttgcaagctgaatgccttttagtgatagtaatttcaaagatagaaaactaaatgagtaacccaactcaattccactcaactctaaaatggtcaaggctcttaagttgtctactaataaccataattcttaccttttcctgggtttaagtcaaccaattctttgaccttattgtgaactgcaaaaaaaaaaaaaaaatagaaacaatttcaagttaaactagctaagaaaaagttgtgaaacaatcacaatcatcatcacatcaagaaatggcgagtcaagtcgaatctcccaaacaagcagcaacaaagtataatctattaataactaatcaagtaagccgcaaaaaccaattgatttttgatatcttttggcttttttttcttcacaccgtgatgtttcattgttatctatccagaatttaaccatattttcatcggtataatatgtaagatacaagtaaaaaatttcataccccaaatactttgttgcatcgctactgaaccattaattgcaaaaattagatccaacaatgcttgcattcactgatagcaaaaatacaaatgaaacaagaaaaacttatatgagtctttcataagacatagtagacaaaaaaggaaaagaatgaaacataaaagagatataatcata

SEQ ID NO: 67261 - DNA, 1525 bp, Cannabis sativa
gcgtagcacgtgttgttccaactagtatataaagaaatttaaaagcacacgattgaacacaaatgaagattgcatgcatagaaatattatagtgctaaataaaacaaaatttaatttactaatttattaatatccataaagtaatagttttatcttctgattgtgtagctaaaattctttcaaatattttgtcccttcaaatatatctacagtctacttatatagattatggtttacaaattcttaaaatatgtaaaccataatctacatatatatagagcgtacgttagtatagataaatttgattttgattaacgttaaattaatttgattgacaatctacaaatatgcattactacaatgtaagcctttagctttccttttttcaatccaatttgatcagcgtcggtagtaaatttcgcgaaaaccgacgctgaaagggcttaaaaactgcctctaaagagggtttttgtagtagtgatggctaacaaacggcttgaaaaaaattaaaagagagcaaattgtttgcaataattcgaggtgaatttttaacccaaaaaaaaaaaagaatcagaaggaattggccacgctaaaaagttttaggatagatccccatagttcaagactatttaccttttaaaatatattaagagtagaaaaaagaatgtatagaggtaggaacaaataaaatataccagtgaaatcaaaaacaatttaaatatacatatatactatcaacaaagtcttaatattttgcgtaaaataaaaattgacaaaaatataattaagtaaaaattaagcaaagtaatattcaagtgtctttaatttctgtatgtgtacatgtatatatggagaattatatgtataatttattgtattacactatataactataatattacaaataatcattaaaaataactttttagtcacattttttgtaattaagtgtgattttagtcacaacaaaaaattaattgtgactaaaacataacatttagatacataaatatattagttacaacaaattgtgatttttgtaactaatatctttaactaaccacggatttatcacaacataagaatgttaatttataatttttttgtagtgtatatatttattaagtgtaaattaaatccaaattaatggataaggttaattacgtaccattaattacaaaattgttaatatacaattttgttaattaattaagcaatcggctgttgttagctgactgagaattagccaccaaattattatataatataatattaaaactcattaatcctcatcatgatgagttgaaaacatacacagataataagaagaaacaacataaaatattaagaagaaaagatttcaggtaaggcagccaaatgtatatagctcattattattgttattaattatagctgttaattaaaattaataggagaacttaattattaatattatcatgacaaatattattaattaatgaccggcgcagctttcttcatcataatgggaatcatacatgcatgc

SEQ ID NO: 67262 - DNA, 611 bp, Cannabis sativa
atgtgtaagaatgatattgtggactgagtcaaaactcagttgggttttgagtgttcctttattgtaccagcccaaggaaacaaaggtggtcttgctttcttatggaagtccaccaatgaagcccatctcattaacttctcagcccaccatattgacatggaaattcaactccatggttacaatcattggaggctcactggtgtctacggcgaacccaatcgctcccttcgccattcgacttggaacctcctacgtactctcgctgatgaatcaaatctcccctggtgtgtcatcggcgatttcaacaacatcacatctcatgataataagaagggaggacgtccgtatcccgactcactcattaatggcttcaatttggccctccacgattgccgattatgtgaacttaacctccgtggctactgatttacatgggagcgtggagaagggagcagcaaccacatcgaaataaggttagataaagcttttgcaactcaatcatggttttttatttttcccgaagcttctctgtccaactttgacttctcttcatccgatcacattcccatttttctcgaaccattacttgctgctagccccacttttatcaa

SEQ ID NO: 67263 - DNA, 1971 bp, Cannabis sativa
tccacatctcacgagcggtggttttgaacatgatactagcagcgatctcacgagatacagactgaagaatccatgacatgaccatattgttgcaaatgtcccacgcagagggagaaggatcatttggaggaggacggggtatggtgccttcaatgaagagggttttgttttaggcagcaatatttatagaggttgtacgcttccatgactggaaattttcttgaccagtcaagagaaatgaagcaatgagattgtttgggtgatatccagttcctagatgaagcggagtacgctcatcatgggaaggtcgataaagaacggcacgagaaaagccgtgattagcagtaaacaaagagttatcattaaaaggcacatggccttgatgtccaaggttaggaatgttaccaccaagaaaagaagggttcgattggccgaaggtggcggggatcgattggccgatggtgcgggccgagatagtggcggtgctagaaaaaggagttgtctgttgcaccgtcggggtcgtggtggtggtggagaatggcataagcagattataaggtagggaagccgagaaggatggcgccgacgccatgctggaactgatgggagctgtggagggtggtctgatcattccactaatggggagatcggcaacgtgaccggagccgaaaacaccagaagtgggaggatcggacagaggaagaggagctccgatcgtgtccgacgagagaggagcagtcggcggtagggagggcggagcttcgacgtcggcgatgatggtttcggcggaggagagttcgtgactggagatgggtggtaggttcggagatggatgcggcggccatggagttcctagtccttggagccatggaagaagatgaagaagaaagatggatggggttttatgcaactgataccatgataaaatgaagaaactctttattgtttctctgctagggcacgacagaaatgccaatatgtggaaaatgtaattaggtttctacattgagaatataatataggcaaatgaagacagcccagaaaggcaagtgggccgaaatacatgggccagaaataagtgggccttctaaacctaataaactctatatctaaattataatttaattaaataaaacaaacaattatttttaaaacacaaaattaaaatttatatttactctatattcgcgcgcctagatttatagtgtatcaaataaaacacaataatatattcatgttgtaatgggaatattagtggacccacgccacacggtattaaaatggaaaattttattttcaccaataagctatccattacaatttttgatgtctttctaaaaaagaaaattaataatgttaatcaactcattatataaacaaaccaaaccaccccaaacctttcactgccccctacaaatacacatttattagtttagatatattaaccgtgagtgttgtgggtggagttgagagatagaactcctcctccaaataaaaatatagttcatggtcatggctagtaaaaataatagcaacattttctcaatgggttctttattattcttcttctacatcatctttaatctcttccaatattccttttcagaagctcagaataataaggctactccagccatgtatgtgtttggtgactccttagtggatgttggtaacaataatcacttactcttgtctcttgctaaggctaactttcctcataacggcgttgattttcctggcaaaacagctacaggaagattctgtaatggccggaatacagcagattttctaggtatatatctataaatgttctatactatgttattttataatatactcatttttataatatatatttagagagaaagagattttataatataatgcatagtagaacctctatttaagaatagagtaacttctaaattgtaattagttatacattttctaagtctcgtattaacaaagtat

SEQ ID NO: 67264 - DNA, 726 bp, Cannabis sativa
aaaacctaaacccaccaacaccagagccccaaatccctaactacccaatcgcatcccgaaccagaaccccactcaagaagcaattcgagatatgggtaggtcgtttatcgcgtctccatccccttgatctttttgcttaacttaattatttataagattaagaaaattacaagaaattaggactacacgctattcttgtgatttgaattgatgatgaactaatcatttactctgtgcctactgtttgacttaattattgttattatgattaactgttgttgtagaatgccaagagggcatgagaagtttgtagccattgcagatgttcaaggctggggatatgccaattgtgacattcgtggaaatcccattcccattatggcagtttcgacaagtttagttgattttgggtgttttactttacgaggcataaaaatagaatgatgcgtaattacaaattgattttctcaatttctaaattggaagacaccagcagcaagcactaaaatttagagagtggaacggaacctagtaattaaatttacaagactagggaagggatttcggaggtggaagaggcggtggtggtttacgagcatggtgagaatggcagaagaagaagaagaaaaagaagaaggggttctgtccagattcgagaagaaagagaaagaaaaaaagaatttttttttttttttaatttttataaattgttttttttttaatttt

SEQ ID NO: 67265 - DNA, 920 bp, Cannabis sativa
tgcacaccctacaggtcttacttcactttatgagagtaaatttgcttggactgtgttataatgttttggcgaataaaaaaatgtatatcgtaattctcgacaaatctaatatcatgatccttgctatttcatgttagcttattgcataagcacacattcaacatctattgtttacaaaaatttcagtgtatgataatttcctcctatattgacataaattattgagatctctttaaattacatatttttcaaatatatttatcatttataggtacctatatagaaccacttcaggaattcaattatgatcaaatgtgttatgcctaacttctcttaggagtctcttctagagtaccgtttccatcacagttatcatttttaaatcatcagtactttataacattaaggcatctccattacctctagatttatcaatttcaggagaaattaaatgaacatttattaataatttttacattgttcatttatgcttcaggcgttttcaactcattataactcaactttgaataatattgatttgcagttagtatatatcattttgaactatatcgttcttacatactttgtgcaaggatcatttttcaaaaatgatcatcgatctcaactgcttttctccctatgatcgagagaatttttaaaaattatgatatttaataatattaatacacctttagagatttcaatatatcacaataaatcaatatttgtttaaactcatatatactatatggcattgaacttcaggttcaataaacttcaagtttaagttcaataattatgaacataatttatttataagaatgagtcacacgtgtataattagaaatacataaatttatacttttgtaaatccatgatcatatgatcttatcacgtcgataagaaactatgcaataaaa

SEQ ID NO: 67266 - DNA, 1577 bp, Cannabis sativa
tttattttatttaagtcgggtctatgttcgagatcggattcaagttcgggtcagaggtcgggttcaacgtcaaggctgtaggggagatttgggttcgggtctgatcggagtctaaaatattgattaagaaaaaaaaattatttaaaaaaatatcaaaagtgattttttctaaaaaaaaaattgattcttaattaaaaaattaaaaaataaaaataattttataaaagatattttaaaaaatattttcacttttaattttaaaaataaaaacttgattaaaaaaatatttactaaactaattaaaaaaaaaataataaaaggcaagagaggctatctagtatctatttttagggaacgtcaaacccaaaccccaactccacctccacctccacccaacccaataccaagagggtcacactcacacacagagtcatggtttagtcaaggaatggggacccaccaagaaaccccaagtcaaaaagtagctcgtttcatgggccacacatgtgcagcctctcaccatatatatttaataatttactatttcctcattcaatcatttcaagaagaattgttttttcttctctttcctttttctcttcgaatacattatccgaaaaaaaaaaaatcattatttttgtaatgtaaaaaatctcgatatatacgagtttgaatacacaaacaaacaataagcatatatataatatatgtttacaatagctttagttaggttcttttaataatgaggtatattcttaatctctgttgccaagattacaaaagctaagcttaattatgaacgtaaaagaagtaggacattggttcttgcttctctttaagatataacctttaatgatatgggacccgttttagttaaagataatgaagtaagcctttttctactttacatgttcgagaggaaaagaatatgaaaacaactcaaaactctttgtgcaaattcaacaatggatgacacccatttgggcagaaaacttcagagagaaaaatgaaaaagaacaacctgataagaaaatgagaaatcagctgcaaaatacacagattttcaaccttttaatttgtcgttttaacgtcggaatcttgagcagacaataataattataactataagccaaaaaaatatttttatgatatgacccaaaataatatgaaacatatgtttgtaagtattatctcttttcaaaataaataatcaaatgggaactaaaaacaaataaattaattacagcgtggtaaatgtgtagactattgaaagaatttctaactgaatataagctattacattgacatagaatagaatagactattaattcattatatatataaaacaaattgtaaacattatgatatgatgaaataaatgttgacacacgacacaacaacgtatgtaagaatataaagctaaggtgacgtgagaacaataaaacataagaattgaaaatgcaaaataacaattttttctaatataattattacgtataatcctggtcgatagtagaaagtgtccgttaaattagttttgcatgataggtagtaaaaggaaaaatagtttaggataa

SEQ ID NO: 67267 - DNA, 774 bp, Cannabis sativa
aaaagagttctttaactgtggtttcaaagactctgattcttggttttggaaaaacgttgttaaaatcaagtctatcttaaggaaatgtgcttgcaaactcgtggcggatgggagggatacacgaatttgggaggaaccttggatccctcacatgaagaatttcctccctaagcccattgggtctcctgccagggaccacagacttgttgcggagttgctttctacagatggaggttgggatagtcacaagttgaattgcctttttgatcgtgagactatttctgcgattttaagaggtggtgctccctctggcatgggtcaagacaagtagatttggacttttgaaaaggataggaggttctcctgtaaatctgcttatcttactcaggccttggaaagagctcccttttgtgaggttgctccctcactttggaataagctttagaactaaaaagttttggagcgtcataaggtactctagtgggcattctctccaatgccttccatgtcaggtctgtaattaggaaaagatttcatatcgaggaggcgagatgccctttgtgtgggaaggaggaggaaactatggaacatttctttcttacttgtgatgtggctttccatgtctgacgatcttctccttggggtatctatccgatatgtgacactggtatctggatgttggattgggtcaaattcatttgggacttgaaacataaggggattgatgtggaggaggttttcctgtatgcctcacttgtggtcgacaccatctgg

SEQ ID NO: 67268 - DNA, 978 bp, Cannabis sativa
  modified_base (175)..(182): a, c, t, g, unknown or other
aacatgcgggtctgtgtcatacagacaaatgtgaaatggcattaatatttatgtgatgtgttaattacgattattgataattatactatcttgctgagcttggcttacaggggtaaatctatctctcatctgccatgagtgccagagctcggtgatgtatgtacatgttcgggcnnnnnnnnaccaagcgggttggggtctactagtgatgtgcctttgtaactgtaactctgattttgccgcttaggtcggctagtggaaaggacttgtaatattttgtaaataatttcttgggatctcgaaacatgtaattttgattgtaaagttaaagttattacaagttttattttcattctatttttcgtttaaagtttaaattttcccgcgcttatcttactagtaatcccatttaagggattagggtttcttaatcacctcgggtagcgtgcctaattattagggcgttacattaagatagaaagagaaaatatgtgatcatcatattttcactctcataaaccatatatattgtaaaagtcttcctaggtctcaaccaataggattaggacactttgaatcaactttggagccaaaacacgtcttaaagtaaatgttgaaattttctttaaatggctggggcgacatgtcgcctaagactaggactaggcaacatgtcgcttggaactttcaaacagagtttatttttgtgttggatatctcatctcccaagtgacatggagcagtctgatggagtcaaagttacgtaaatgcatgacccatgcaatgtgctcaaggagacatgttgcgtggcctgggtgacatgtcgcttggacacaaaataactatgtgcgtaaatgtcctctttgacatctccaaacgatttcaaatttcttaggtaatcttatacactatataaagtcatttaaactttcaaaacataattattaattatgttatatcaaagttctcactctcttg

SEQ ID NO: 67269 - DNA, 2040 bp, Cannabis sativa
gacccattcgggcaactcatcaatatcctcaatatcggctactaatccacgctccatataaaactcccgattgtccaccttctcgtgatactttgtctctgctgcctcgcaatgatttctttttattcttgttggcggtcttcttaacttttggcattttcttttcttttaacttgcacactaccccaacacaatgaatttcttctctgcttccttattcactgttgcccctcaacacaataatcactcttacaatgcacttcactgtccccaacccaatcttgttcaaaaattgctaacctgaccgcccacactaactagcattcaaagcacttatactaactagcaccaccacaaccaatcaatttcctaataccatacataaaatttcacggccacacagagttttcaaactagcacctcaccaaatttcacgcaacaacctgttcacaatccttgctcttcccaaaatcaacaatctttctcagcccactattcttcaaaacttgcaccaaatgcaaattaaattacatactcacaacagtgcagcccattgtttagaatcacaccaaaattccaatatcacacccaaaattttcaaagtcacaccaccaaattcagattatcacaatatacccaagttaaatcagcaccacactaaatatactactcagcagccataggagtatatattgaagagaaataagactttttatccaataacttttgatagtgctctctgtggcaatttaactttctctactcttcacttatcacaatcacaaacagaatgcagtgttggtggcgacgggttcctggtgaagtcgtggttggtgcgaagtgatgtgggtgactgctgggtattggtcacggtggagctcagtcgactgcggtgcttcggaggtgagtttgaactcgttggtgggtcaactggaaaagggctcggctcgattgggtgctggacgtgatggcttcagttggtacagggatgggttcgacttggttgatggttaagctgagttgaacgggtggagttcagtcgagtgggaaacggtgatacgtttgcaggctggtcgactggacaatggtgatttcaggtgggttggtgtcgacttagaggtggctcgggttgaatggaggaaatggttgggaggtttgagattggttcgaatggtgattcgggttgctatgagttcaggcgaagacgactgcagacggcttgggtgttgctggttcgtggctgggtcgagcttggcttgaacggaggctatggtgatcacgggttaattctggtggtggaggcttcaagtggagctactggttcggttggtaaagggaaatgaaaaagatgatgttgaatgtgttagggttgaggttgggttgaccattaattggattggtcaaaacttgctggggcccagtggaccaaataattgggcccaagactgattaaacaatgtgaagtggggtctttgtatcttcaaaaatcacttgggctcactcaattcaacactgaagtacaacccaaaatgatttatctgaacaataatagacatatccaatgattgaatcatgaacaacatttcaatcacatgtttttctttgacagatcattcactttatttttcttttttttttcaaaccccagttcatttgatcagcctagtacaaaaacacttcttgctaagcctttgctatagcaactggctagcaatctgccaccccaaacttaatgcttttgcctaattcaacatttcttcacttccacagcctttttcacttgattccctgcacaaagaaaaaaacacaatctcaatttcaccatgacaattatttatagctaattataatatatatatataatttctttttatttttttttttcaatttttttttctttttttttcaatttttttcaaggtgtgccttcattgagatttttttttctttcattccttttcaagttttttttttcaattcaatttttttttcttttgtaggcaccccaaattacaatgatcaagcatctttcaaagagat

SEQ ID NO: 67270 - DNA, 1136 bp, Cannabis sativa
tagagttggtcaaaattgaattggagaagaaaattatatatacagatagtatacaatacactaatataattgcgaattgtagttgtgtatcatctagaaagagaataagaagaagttgaagatcaggtattacctgcaagtcaaaaccatttcttttgggattagcttcaagaatctactcattcgaattctaattccatcgtttacttctcaagtaggaaattactatttgagtgtttataattaagactggtctcaaattactaaattagccctatctgccttcaatcaatcattactaactttgggcccatttctcatcttcaatcagcgcatgtttttattttcttcttcacttaaaaacgaaatttgcttttatttgatggttggtttggatttttagcattgtaaatgacttcctctcctagcgttaagttaagttgaggaataccttgatattaatcaaaaatattttgtgtgtcgcctaatatatttttaccctacttaagtgtagcacataatttacatataatagagaaattatctataaaaataagtatattttaaagaatataatgaaagtaaaaattaaaataaataaaataaaatgggtatatcatgtaatttcctctgttacttatagggatagtgacataaagcgtttgtaaattttttatacttttaagttgaagttttttttttttttttttttacattttttataaaaataatacaaaaatatcaaaaaaattatacaaaaataacaactaaaaaacattaaaataacagtataaaataacatataaataacaaaaatcaacaataaattaataagagtacaatataaaaatacataaaaaattttattttttatatataaaattataaaaatcgtaaaaatatttaaaattctgtccaatcgtatatttatatatatttttttatttttgtataattgtgaaataattccttactttttctatgtgtatttattctattttaaacaatggccacttcattgaaaataataattttagttataagtacatcatagataaaaataagggtaaataccattttagaccctctattttacaaaagttaccaattagaccctgtgttttgttaaatgacaa

SEQ ID NO: 67271 - DNA, 531 bp, Cannabis sativa
cgaatgaggttgttggtcattaacttatgcacctcttgctccaaggcgtcggccttcacttggtcaagtagaggtcttttttgttgtaccggaggcatatctgggttgacatccaggacatgggtgatcacgtgggggcttattctcgtcacatccccttggcaccacgcaaagacattcgtggctgctttaacgtatctatgattttgcttctttcctccagctctagattttttcccaggcagataattttagtggagtcgaggtcgcacacgcttacttccttgatgtcctccataggttctaaagttgttttagatcccacacgggtatccaactcgtcttgttctgttacaaggggttcttcgtctctttgtaccatcaaaactgacagatgtgctgcaacattgtaacattgtcttgcctctccttggtttctcctcaccgttcttactctagcctcccgagtagggaacttaagtcataagtgttgaatagaggtaatctctccaaaatcgaccaaggccggtc

SEQ ID NO: 67272 - DNA, 919 bp, Cannabis sativa
gtcccggtatgggttttggtttgagtttgggtttaggtttgggtcctgttacagtcccatgtctgggttctagtcccagtcctggtctaattccggttctaagtttgggatcaggtcggacttgaacttgggacctgatcccagacccagactcgaacctagacatggatctggatacgaacctggactcgaacccaaacccagtccgatacccaaaccgagatctaaacttgggaacttgatccagaccgagacccacacccaaacttgaacccgtacccaagacttggactcgaacgaggacttagaccccgaccctaacccgaactcgaacacggaatcgaaatttgaactgggactaggacccgaatccaaacatggacccaaactgggacctaggacccggacctggaagggggacctggactcgagcctcagaacccagacccgggtcggaaccaaggactcggacctggatctcgattcaaacctagatctggaaccggactgggatcgaaaacccgaacccaaactcgaactaggacttgaaccccgattgggtcctagactcggaccaggacctaggttccagacctagatgggggccctggacacgggacccaagcttcggaactggcaccgagacctaggacctcaccccggactcggaccctgaacaaggacccgaagcaggtcctgggatctgaagtggaactagagtgggacctaagaccaggatcctaatttggaccacccggggtttgtggagacctgctgacccatagtcgatgtttggatctggacccatacccagactcaaactgagaccttgactaagacccgaacccgaacccagaccaaatcctgtactctgtgacccgaaactggaagcgggaccggaagtggaccaggacctggg

SEQ ID NO: 67273 - DNA, 588 bp, Cannabis sativa
cgtttgaagaagagagtgtgtgtgctgttttttcggttttgtttctcagccttgggattagatttagatattttctttttctaattattaattcaccattgagtttaaaaaaattacgattacttgccattattttttttattttagttttataaatgatattcgtttggtgtggtggttatttgttttgttccatttttttttggctattaaatttcttaatatggtaattatttatattttagtagattctagaaatatatatatatatatatgagatgaggattgagatcttataatataaaataattagtattttttgctttagaatattttacactaataatacttcttataatataattttttaagtaatattattataagaggcactcagttggataaagagacataatattattatttacatcttagttgttcaagctattcttagttcggtagttatgcattttcttttagtctcttcgttaaagattgtcaatttattttatcttttttaagtaatgtttctattggtcatgttaaacggtctgctaacaaagccgcgcattgtatggcacgtggtgc

SEQ ID NO: 67274 - DNA, 920 bp, Cannabis sativa
agacactgtccttaaggatttacaaagtaatcccccaagattcaacaggtcttctgattccaataaaagaattaggaaaacaaaaatagcaaaataataataaataatccaacacttctcttaaagttatcgtatatatatgtgtatataaaagctagcaatgtatgtatattatgttcttcctataatgatacaaatatatatatagaagacagagtacgtacactaacattactattaacattagtggagaaaaaagtagatctttgcaagtttttaggaagcgcacttcaaatatatatatggatacgattttatcctgttatgatatttgtggatatacaatccgtgattatactgtagccgttagattgaaaagttacatgatcaaagggctgagattaacataggggtatttaggctaaaaattattggtaaccgttggcttttaaattaaaatattattaaattttaaaaaataaaaatgattgatgtattgtcaaattctttcatcaatcatcatttctctttttttcttttttttctttttgtttcagatgtatataataataataataataataataataacaataatttggaagtcaagcaacaaatgccaacttggcaatgaaaatatttataagactatctccaatggatggtgtatattttagattaaattaagcctaatttttgtatttatactctaatgcacaaagtgtaaattagctataaaagttaataatatcattaatacttaaatatataaacaattaattttatttatattattttaataacttataatttttattaacgaatagtattaatgagtgacaaataggtaattaaaaaatgtgatatttattgtgggctaaaatttggcacatgctatcttttgtgccaaatttggcaca

SEQ ID NO: 67275 - DNA, 909 bp, Cannabis sativa
tgagaaaggattccatggtgtttgagaagcagcgatcgtagcaacagtggccattggtgttgtggcagtgccatgatccgaggttgaagacgacatggacgtgagtcagagacttctgataccatgtaaataatggtaatggtgcagagcacaatttgagaaagagagaaagagagaagaatgaagcaaaagctatatcactattaatgtgagccactttatttatacatgagttattacaagcttcaactgttaaaaaaacagttgtaacagaatgtaactaacaaattaacactttaactaacacctaatgatagtttaacaaactaagtgctaggtagtgctaggtagtgctaggtgagatgttaacaggggtgaacatcggtcaatttgatcgggttacaaaatattttttctaacccaatgtaattgttgagttgtaaggatctaattataacccacctaattaagaaaaaaagtttaactcgttcaataattttatcagtttattcgaattaactcgtctaaactattataaatttttttattatcattattgctagtgaagagagaatgatcttccctggaagaaacaagcccaaaagagactaggacagaagccagtttatcaaagcagaccctaaggacttgctttaaggcatacaatgctttgtgtagtttgcatacaacttaaggatgattgggatccttaaaaccaggaggttgctgaatgtaaatatcttcttcgtaaaccatactactaatgcatgtaattaaaatattaaaataatgctcaaatcctgcccttgcataaagctttgttgtggcccaagctgccacaatttgaacaacgacaatgttccacaacttttttattgttagatcgatatcggttagtccgtattcttc

SEQ ID NO: 67276 - DNA, 877 bp, Cannabis sativa
gggctattctcgttataagaaaaattacgaggcagctgctgccgcaaaggcggttgccctcactaatgttagtgccttagaagttgatatcaagtgtttgaagagtaaggtcgatagtcttgagtcggagaagaggggctgggaccttactcgttcggctctagaattagagaaaaaggatctaagtgacaaggttgcttccttagagactagtttgtctgcggtgaatctggaaaaggccgccttgttgcaagagtgcgataccttccgttcaaaggccgagggaacgaaggacaaactctcttccttaagttacaaattgtctgaggccgaaaaggtgacagcccaggcccaaaaagctttggccgacgagaaagggtccctgactaaggagattaaagttctgacgagccaagttaagaaggcgttccttagtggaagttattagttggccttcaagctgtttaccgagtttagagagggtaaatctgctacttgggacctggacgagtttttcaagaagtattccaagttcaagaaggacgaggatcttgtggaatcttctacggagtcggatgaagctagtgacgatgaggatgccgacggggcctgaggagctgggagggaatttttatcctattttttattttatatttttatatcttttatatgcacgtgtggaacaattttaaagaacagtttctatttttacggtttatttttatttttatggttttgtaaggatttcgtgtttaattgatatttttaatttatttcccttactatcgttattcatacgtgtatggcttttcttgatgcgtctcgacacttggggatgcatatttaatggcattgccttagatgttggtggacttac

SEQ ID NO: 67277 - DNA, 1438 bp, Cannabis sativa
tgatgtgtaacccctcatgtatagttccctttaaatatctgaataggcgtttgcaagcttcccaatggacggttgtgggtgcatggataaactggctaagcttgtttacaatgaatgcaacatcaggccgagtaagtgtaagatattggagagcccccaaggtgcttcggtaaagggtttgatcagggagggaatggctcaccaatgttgagagatagagtatgagcagaagtggttgggctgggacttggtttgacaccttcaagtttgagtttagtaagcatgtccgaaatgtatttagattgagagaggtatagacctgtgtgatttcgaacaacttcaaccccaaggaagtaatgaagatggccaaggtcttttaatgaaaattcattgttcaaggagtggatgaactcggcaataatgtgtctgttgggaccagttactataatatcgtcaacatagacgagtaatatgatgagattgtctcctttgccatgcacaaacagggagggattagatttcgaacatgtaaaacctctatgaaacagtgtgcttttcagtcgatcattccaggcccgaggcgcttgcttcaagccataaatggctttatgcaacttgcatacatgattgggatagaggggatcttcgaaccccgggggttgcaccatataaacactgtttcttgtaatgtcccatttaagaaggatttggagacatcaagttgtttgatgtcccaatgataggagactgcaagtgtgattataatccgaactgtagcaggccgaactacaggactgaaggtttcttggaaatcaatgccaggtgtttgatgaaaacccttagccactaaccctgatttacacctatccaagctgccatcaacattcaatttaactctgtgaacccacttatttcccaccagattcatgttggattgatatggtacaagtgtccacgtaccattgcgtttgagagcatagtattcctcagtcatagatgcattccatttggggtcagcaagggcttgttttaaggtttttggctcggttgggagaagggattcaggaaggggatgtttagtggcagtgtagcctttgggtttgtgtataccggccttagctcttgtggtcatggaatgtgtattggtgatggaaggggatggggaaatgatattggtattggatataggtgcatcattaggtgcagtggctgggatagtagctgagacaggaggaatagcagtcgactgaggcaagggatttatttctggtgtgggagttgcagtagggagagatctgcagccttggtcacaggtagtggtagtgggcagtggctcagacatggaagaatttgcagcattagtatgtaatggaggagtagtaaagaatatagcagtaggtaaatgagaagaatgattggggagtacctgtgttgttgc

SEQ ID NO: 67278 - DNA, 590 bp, Cannabis sativa
gtgtttatatttgacaattttgcatcattttttaactctttatataatggtcttgcaaaccatgtttgactcatattcatccaaaatttaactagttttattcatttaaaaaagaatgattttttttgttttttgatattattcttttcgagaagcagaaagaaactgccatctcatgttgctattttaagtatttttgcaaagagtctaatcaataaaattaacctcaatttgaatgataaagcttcttgcatattcactatataatatataggaggtacttgttgaagtactttttatgtatgttgcaccataagtttttttggattaatttcctaatgtaatacagtataatcaactatgggttgggttggagattcaaatttcactacaatttcttttgagaaggattatgaagttaccaatgactcaattaagtgaacaaaatgtataaattctacatggtttctaaaaacgtctagaatcaaaatggtgggccaggaattaggaccacctcatctccttagaaagaaaaatgaaaatattgtgggactcattaatattttaagaaagaaaacaaaataaaatca

SEQ ID NO: 67279 - DNA, 500 bp, Cannabis sativa
agactcacaaaaacacttgaaccaagttgggttagccatgattctatctagtttctcaaaaaccatgttattttgacgcccattgcaccaagtaaactctcccccgaacattgtaatctccttgaagttgcagtaagagatggctcttcgaaagtcccgcaaaagattttcatttttcttcctcccggatccggactcccatagaaccccgtaaacctccaagaaaaacccaaaccattttctaccattgcatcgatgtgataaactgtgaaagactttacatccacttcaaacggttctttccacaaaagcgcaagaccaccgctcttccctttagccgccaccacaaagcagccctcaaaccccaacatcactctgattctttccatcgccatctctttaagtctagtttccgataagaaaatcatcccgggatgataatctttcacatgggaacaaagggcttttaatgtccaagggttcccaagcccttggacatt

SEQ ID NO: 67280 - DNA, 1943 bp, Cannabis sativa
cacacacacacatatatatatgatcactctatacactatatgtatgttattaacgcaccaatccactaattaatatatgtataccttttttctttcttcatttaatttaatttgttcatcactataaatattaatgattattggaagctagtgcatgtgaatacatcatcctcccactattatatatatgaatagtgttttctaactttttcatttcaataattgtcagaaatgtcgacaagtacttatatttgagcgtgagagagagagctatggagatggggaaatctactgtgaaaacaaaataagatccaaatctaaaaaaaaaaaaaaacagttatatggataaatcggagaagatgaagctaagacacacacatacatgccaaacaaattaagttgagatgaattgccggagaagatgactgaaaccagtgatttgaacgaaaaaagcaaagagattagggtgagagagagagagtattggctaatgcaaccaactctccaaaacaatataatacattccctatatattaatacatgataggttgtattaaaaattacaaatctcaaaaatcagatactagtcttaaaattcagatactagtaatcagtctcgaaggatagattgtttagatacttttacacgagtgatatttaggccttgagttaaaatagatcataggaaaaaaaacattttttagacatttactataaatgatattttaaaaattattaaaagaatatgtatattttttaaaatatacttttcttatttagacccttaaaatgagtggagcttaggcacggacttagaccacttatgcttaacacagtcctagtgatacctaactcacaacaggaatatcttcgatatgacccattgtactaataaaactttatacaatacaacctgaccccttatacagaggtccaaacaagccggcacactcatagcttattgctcaagaattaaaccttaatgtacgtcctcattattttttctaacaacccctaatcaataatcaacagtatcataagtttcaagtccattttataatcgtgcacaaactactatagtgtcttacaatatcttatagcaaaccatgatattaaacatataaccatagatgaacacgccttgattttgagtgatacattattatttgtacattttaatatttaattttatatatgttaatttaataaattacataaagttaatgaattattaaatactagatcaatatagtattgatcaccttaatatcaatgctcttttagggcaaaaagcaaactcatattcctaccaaagattttttttataattatgtttgtattgataagtattaactatattatttcacatatatgaaaattatgaatggttttgaatggggttttggggttggttaatgaatataggtccaaatttgatgagggagctttgttttcgtattagctagactttgaaacaaaatcttagtcattagaaataaagtgagtgatgctatatataactaagatcatatacagccccatatgtcaaacttaatcaccggcaccgcctatatacacacattgtcttatccatccatataggctgaaaaagtaaactatttctcctatgaatatctaccatctcaaaactaattggtggtgagtgaaatagctcatattcttatacatggtttaatatttttatatttaatccatgtcgaataatattgtccaatacactataatcaattcatacgtattatatatatgtataataatattgtagatatagtatacaattcatacggattattttttgagtgtacttatttttctgtgtgataataacagtaccataaattaaatttcttatcgatcggtaaagactacgtactagagattacaactccaattctatatattaaaaaatttcacaatcaata

SEQ ID NO: 67281 - DNA, 951 bp, Cannabis sativa
acaagctcctccggattgggagcataggtttgcggagatgcaagatcgaatccgccaacaagaagaagaaattctgagattaaggcacccaggtcttcctgtcgtgcctccacaacaagctcaggtcgttgtagctccagcagtgccaacagaacaacctgttgctgtcaaccgtatggagccgttatacgaaaggttccgtaagcaagcgcctccagtgtttctgggaggtcctgatgtgataaaggccgagcagtggctcactgtgattgagcgaattttgaattttataggggtggtcggtaatgatcgggtgacctgcaccactttttcagttctaggaggatgccctagtgtggtgggaattggtgtccctcacccaagatgtcactgtaatgacctgggaggaatctgagaattattcaacttcaagtattataatgaagcggtctgcagtgcaaagcaaaaagagttcaccgagttggtgcaaactaaggggatgtcggttactgagtataccataaagttcgaccgtttggctaaactcgtcgtgggtatcgtgccaacagatttcagtaagaaagaaatgtacctggccggtttgaatgtgaagattaggcatgatttggtgattactactaatgaagcaacatcatatgcagagatggttgaaaaagctctacgagccgagggtgcggtaaaattccttcaggagccccgagtgactccaaatgttggtgggacccccactcttcctactcctatttatggtagggatggtggtgattccaccactgatcaaaagaggaaagttaccctggcatctggtggctcgaggcagagcaagcagttctgagggaaccaaggcagaggtggacgccagggatattcttacccggagtgccaacattgtaagaaacatcatcagggagagtgcaaccgaaagacatg

SEQ ID NO: 67282 - DNA, 1093 bp, Cannabis sativa
acaggtccgggtcttggttcgggtttggctctgggtctgggtgtgggtttgttcccagtccatgtctaagttcgtgttccggtttgggtttgagtctcaggtcccagttcaagtttaggtcccagtttgggtttgggtctgacttcgagaccttgtcacagtctaattctaggtttcgggtcccaggtccgagttttgttcgtgggtcctgggtttggccacaattttttggtctgggtctgggtctgggtcccggtccatgtctgggtcaaggtcccaatctttgtttaggtcctaggtcacaggtcccagtccgggtccatttcctggtatgggttctggtatgagtttgggttgtttggggcctgttagagtcccaagttttggttctcatccctgtcctagtctgattctgattgagggtctgggatcgtgtcttgatcccggttcaaatgagggtctgagtacggatctccgtccgggtcttggattcaaacactgactacgagaaaggtcgaagcctcaagtccagattcggatctcagttttggatcccaatcttttctagtttgggtcctaggtctcgcgctgagtcctaagttttggtttgggttcgggctcggggttgtgtcgcggtagtcaagtcctaggttctaggtctaaggtcaggtcctgtgtctcgagtttggggtcgagttttaggtcttatttccggttctagggcccagtttcgggtacaagtcccccatctaggtctggatccttggtccaggtctgggtccaagttcgggcttggggcgtaggtcccccccatctaggtcatggttcgattctaaggtcccaggtctgagtctcaggtcctgggtcccagtcccaatctgagttcttgtcccagtctaggttcagggctcggtccttgtttgggtctgagccgtagttctaatcttggtccaggtccaagtctcgggttcaagtccaagtcgtgagttcgagttcgagttcttgtatgagtctaactctaggtctgggattgggtcttggtctgggtttgtgtcctagtttttgtccaagtccttgtttggttttgggtagg

SEQ ID NO: 67283 - DNA, 754 bp, Cannabis sativa
ccatggcttggctcttaagacaacagtagcagcggtatgtttgtttaataaacttttcctgttttcatttatttacttgtttatcttgttatcatcatcactagtgattgcgtggtagacatctgtttcaccaaaatggcatgttacatgttattgaagaattagttttttttattgagatttagtggaaacttatctagtgctatacatgcagatggtggtaataatttttttttatttagtaatattacaggtgtcacatatattaggtaactagagttttaaagtaaaaaattcttctagtttttcagttgtatctaatttcatgactgtgtttagtttcctatttttatatgcatacatagttaggcttagttatcttttattattcgcttgatttgtcaagaataattagtaactgatgaatgatctctttctaaattctttcaaatctttttaatctctataaactatatttaattctgtgctatctttctattctttcttctttcacccttggttaaattttgctatgttttttaagcttattaatgatagtaaagtatcactcctgagtttgcttggtttaaagtgttgtatctgattggctgtagtggcaattgtttttttttcttacgtatgcacacaaatttacaactataatttgtagcttattatgcaagactggtatgggctgcacagttagatcagcttattgcacaaaatttaatgactcactcaaaattttcttgaa

SEQ ID NO: 67284 - DNA, 882 bp, Cannabis sativa
atatggtctgatcgaaatagctatatacatggaaaaaaggtaaagacacctatccaaatgttgacacaatctgctgcctatttacaataatttcagagtgtcaactctgctgcaaaaccagcagctggttcacgtaccagtccaacacctgttataaagtggcagcctcctccagagaataaattcaaattaaatgtagatgcgactttggattcttcgaggagcaaaattggtattggtgttataattcggaattcgactggccaagtcgtgggagcaatgtctaaaccagcagtaggcaattttaagtcgcaggaaatggaggctaaagcgattcgttggtctctcgtgggcaaagcaatatcagattcctattgactatgtggaaactgattgcctaatgcttgttaatgctttgaatgggtgcatttcacaaaattcgggtttctttgatttggtttctgatgtaacttttcatttatcctctttctctaatgtttgtattagaattgttaggcccaattacttaagcccatatacttattgggctgacccacatattgtacatatatatatatctcttttctctgtacaaacataacctaatcaatacaaaagtcatttcagactttctttttcattttcgaacagagaggttttccctctcaaacataatatggtatcagtgtaataaatcagttcatcccaaaaaccccagccgttctccttcttcttctcctttcttccatggcgccaagaaccagaaatgctaccgtcgccgccgcctccgtcaatgagtcacctcctcttccactgccatctccgactgtcgccaatggtgaagctccgtccaccaccgctgttcataacgatgctccttcc

SEQ ID NO: 67285 - DNA, 942 bp, Cannabis sativa
  modified_base (682)..(683): a, c, t, g, unknown or other
gtatgtttgataaattagggtatgttgtcaaagttgaggaaggtgtaatgaaaattgcacaaggcacagaaactgtgttgagagaaaggttgagtaatggattgtattttttggacggaaagacaatatcaatttgtgcagcacctgttttagactcaacaaaacacagtcaaacaaggctatgacacctcagattggggcatgtgagtcagagaggacttgaggaaatgaacaggcaaggactgttcaaggagaagctaacaaaaagacttgaattctgtgatgaatgtgttttggggaaggcttgtagattgaagttcaacaaggcaaaacacaccaccacagaaaggttagcttatgtccattctgacctttgggggccatctaggattccaaccaaaggtggagcacactactttatgagtatacttgatgattgcagcaggaaagtctaggtgtatttgttaaaaaggaaagatgaggctctaggaacctttgatacatggaaaaggctactagaaaaccagaatgggaacaaaatcaaggtactaagaactgacaatggtcttgagtactgctcaaatgagtttaggggattgtgtgacacaatgggaatcaaaagacatagaattgtgatcaaaatccctcagcaaaatggtgttgctgagaggatgagtagaannttgattgagaaggttaggtgcatgcttctaggaactggtttagacaaattcttttggggagaagctcttaaaactgcttgttacctaatcaatagatcaccatctgttccaaacaacttcaagactccacaagagttatggacaggaaaaatcccaaatttagatcacttgaaagtgtttggatgtactgcatttgtgcatgttagacaagataagttgcaacctagagcattgggatgcatgtttctaggctaccctg

SEQ ID NO: 67286 - DNA, 885 bp, Cannabis sativa
ttttttttttttgtattttttcttttttttttaaagtttatagttttggccctttgattttatttttttctttttgcccccttaatatttaagtctacctccgtatataagtcaatatttataaattaatatataaatacatgttataaattttgcttattattattattatttaaaaaaaaacaaaaagacaaagtgaaggatgaataattatctttaagtatggagagtgcaccattaaaaaaatgtaaaacataaaaatcattggagtgctttttcttaggtactcatctttttatatgttttttcttttaacaaatattttcatatgttttgaaagtacacatatatattttacattatctagtaactaatttgtggtgctattaagaatattattatagattttgcgtcagcaaaaattaatagttgtatgtgatatttggctcaaaattcttcattccactaagacaataaataaataaataatttcttaataaatcaatatttccacaaaaaactaaaatgaggagacatatatggaatttaacttcttcttcccaattatttttattgattattgttttacttttctttttattaataattaaatgtttggtatatactttatcactcactctcaactcaactagtagtgaaatgctaaattaatgatggaaactaaagtttttgataatgtattatacgatagtattgttattaggtataagtatttgttttcaagaataattattaaattaaaatatataaaaaaaaattatgcaaaaaatataagattcaatattaatgacacttcacaattgataacgtcttgtaattgattaataatattttataataattattaaattaaattatgtgata

SEQ ID NO: 67287 - DNA, 777 bp, Cannabis sativa
  modified_base (689)..(712): a, c, t, g, unknown or other
ttctctctcaaattttccatcccaaaacccataccatatcggccgaagcaccacccacccacccaaatctcttcctcgtcgaaccacccacgcgatccctctcttccacgccgatccctttcttcctcgtcgaaccacccacgcacggcgatcaccacccacgcccatccatctacacccatctcaaccgaatcagacacgctgatccaccacgcacgccgaaccacaaaaactggcctaataatctttttgttcttatttgcagttgacagtgtactccgttttatgtctgcgagctcatgaggctgagtttttgagcaacgtcactggaggtgaggcacctctatttgtagatatggaagaattggttattggcagtgatggagagcctactcaggatagtttgcgcagccaggcttcgaagcttgcacagacgctaaaagaacaagcggaggaagctggaatcttcagagctgatacaccaccacactctccacaatcaggggcccgttctgctccaccgcctacatcaatgccccatcctacatctatgcctgactcagcatctattcccagtacttcacagcctcagcaaccaatatcttctaccatattggcaagattggagcgtgttgagaaggaacaactgttggaaatattttatcaggatttagatttactaacaagtnnnnnnnnnnnnnnnnnnnnnnnnaatttctaaaacaatgaaataaagggcagattgatattctgaaagggaagacagagataatcagt

SEQ ID NO: 67288 - DNA, 1079 bp, Cannabis sativa
  modified_base (188)..(192): a, c, t, g, unknown or other
ctcttgctaggtgtcaacacctagagctgccaccactctccactattaaaaattactaaattaccctttaggttataactgcgttctcaaaactaggggtaaaatagtcaaaaaccataaccccgcttaatcccgatattttatttcttccaataaatattctactaagaaataaggttctaaacttnnnnntgtgatcaaactagccatccattgtactttccgttgtcgccgagcgaaaattacaaaaattacataattcataaaatacctctagagtttaataaaatctccaaaattgagaaattataactctaatgcccatttctaataatgggacccataaataattaaagtcacaaataattataaaaatgtcaaaaattagtgctatttgcctttactaatccaaattactaaagcggtcattacgaataatcacagtaaaattaactcgataaaaaaaaacattacaaaaagataataatagatgaaatattaagagaaaaaaccccttatattgttaattgaatgagaaactcgagaataacaatgaacttgatgaaataaaataaataaataaaataccatcaactacaaccctaattttgttattactagcaaaacacacagaaaaaaccaggtagatgaaactcatcaatgtttatatataaaaggaaaaacacggaatggatgaatgaaaaaaataactcagatattatttgagttaaaaaaaaaaaagacatactgtaaacaagaggcattgggacggaacggtaggagaggatgatggaggtcgtgaagtgccgccgtcgacgatctggcaaccaaagagtctcaaataagagagaaacccaatcttagaaaaaaaatagaaactcccaatttttttttcttttttgaacaaaacaatattaaaattaacttgtattggctttttctctgaatgagcggagtgagtgagagagaaagaagaatagtgatgttggaactttgtatgaaatatgtaaaaatagaaaagtgaagtgtgtgagtaggagtcccacatgggatagaaacactacattttaagtgtatat

SEQ ID NO: 67289 - DNA, 566 bp, Cannabis sativa
ctctatttttgtaattttatagttgttttatatttatttttatgttgttgtttaggtgttctatagttgtttttatgtattttttggtacagttgtatttagtttatgcgtattttttatcgtgtatatttttagtttattctagataatatttttgttgtaaatatgtacatattttgttttgctatttttatgtttgttttagttatttttaagtggtttccataattttttctgttaaatagttatttttcagttattatttttattcatgtgcatttttatggtgtatatttttagtttattcctgatacttttttttattgtatgtgtgttattttgtaaatgcaaatacatacatttagtttattttttttttgacatattttgtttttttaattgacacgatgtgcagtattaaatattgacgtattaattatatattacctattatattatataccttattgttgatggtaagaactcgtcaatgaaagaacaagtacttaaaatggtatttaaagatcttgatagaaaaatgcttgaaatcaaaatctcacaacctt

SEQ ID NO: 67290 - DNA, 836 bp, Cannabis sativa
tggtaaaataatccccaacatgatcctcatggcttatctggaggtcttgctttgtgttggaggaagggtgttgatgctaagataatttttgcggactcaaaccttattgtagttgagatctcttcggacccctagggcaaaggtggttatttttggccatttatggaccgtcgtctttaagtggtagagaacaattatggtgtagagtggatactatgattgattctacaagggatcctatttttattgttggagatctcaatgggactctctcggatgctaaaacttttaactatttaaaatcgggtaacacttctctctattcctttgatctccaacagatggttaggggctcgggtttggttgaccttgggactaaaggccctctgtctacttgaaggaagaagtcttataattcctaaggtactccttgttgaaagaaagacaaacttgacagggccttgacttcgatagaatggtagatgttatttctcaaggtagtggtttctactcttctagctagcacttttgatcacaatcaaatcctcttggattcaaacggtgagggtgaccctatgaagatctttcaaatatgacaatatgagggctagagatcaccactccttttgggttgttaaaaaagcttggccttccatctctaaggggaatccaatggtaagactccacaagaagctcgttgaagttagaaaagccttatctagctagaaaaaatcttagttcagccacttaaagaaacaaattctttatgctcaagttaagttgttcgtgattgaggctaatccttccccgcctagggtcattggtgggctcagcga

SEQ ID NO: 67291 - DNA, 2029 bp, Cannabis sativa
gaaattagattgtatataaaatcagattcagtgaaaacgatagagagagagcgagagaatcgatcaatggcgaaagaagagaagagagcttgagtttgctccgctcttcttgattggttgtccagtgtacgattcttcttcgagtttacacaagtgacatggcgttttatcagcaacagtgtccacgtgtatagactctattaggccacgtgtagaaaagcaaggtctgtaaatgatagtggtcacgtgcgtcatgttgggaagagagatatttggaggtgtgaggtctgatattaaatttttgtttagattgattgcccctcctttcttactaaatttgcaccattgacccttccctttatggaatattttgtaatttctttacttgattttttttccctatacacaaaaatatcgtctgttgattttttctttaccagaaccagaatatgtggttctctattttcctttgccttttcttttctttgtcctctctttatggtgcaggcaaaaaaaaaatatatatatataaatatatcatacgtatatttttttctaaaaaaccaaagaattttttttaaataaataaatagatatattcaaattttaacatcaaaattccatgtccaatttaaggaaaaatttatgatccagagtttgagctcaaatatatataaggctactaattggtcagatggctcagattcatatttactactcttactattaatatacatgtaggagaattttttttttcttttttaaataaaataaaagtttatttgcgaaaaatttcatttattttttgattttatacattaattttttattttttattttttggtgaaattctatttagtttacattttttttataattttaaagtaaattaggcatcactattaaatattcattaaattattactatattaactttaaaattttacttttatagaagtataaatatatataatcgtcatgaattaaacggtaatatttaattaattctttaaataaaaaaaataaacttaaaaaaaaatttactaaaaaaatagtaaataaattgtataaaaattaaagtataaaaaatttcgtggtcaattactcataaaatatacatatttactttattttatgaataaagatatttttcgcttttgtcttcttctatatatatatatagtttaagtaatttacgtaaataacaaatctagagggatctctttgcattttgaactcattgatagatccaagattagtcagattctcattctaatataatatataatcaataacttcaataaaaagaattaagctttaattattagatgatagatcacatagaaaatatatctatcgtccattaattaatttagaaaaggttcaaatcatccacactaatacttactaatatttatattgaagaataacttatttttcataaactaattaatataataatattgttttatgataatgacactatctattcatggaaaagtatacaataataactgaacatatataccctactatatgaaaaaataaatcaaaggatctcaatgtctaaaatgaaaaattaaaatccaagtaaatactaataataaaaaacaataaaaattataaatataataattataaaaaacaaataaatatctttaaaagaaattctcgttcgcacattttaaaaggcatgtgatataaaacaagtgaaagtaataatcgaccacatacatatcccctacaacataaataataataataataattgaccacataagataagagtattgctgaataataatgaatgaaactagaaaacaaagaacagttgtggaagtaaagaaaaccaaaaagttatgagagatatggtaaatatgtatatagttattaaatattagtggtgtgtcaaagggaaatttgacaatatatgcttaaaaataaagagtacactaaaactatgctagcattctttatattatgaaaactatacttaaaacatttatcccttacaattttacccctaaaa

SEQ ID NO: 67292 - DNA, 830 bp, Cannabis sativa
gagggagactgacgggttgggtttgcaaggttgggaagtcgagtttcagggttcgtttgggtagaaggtgggcggaggtgaccttgtcaaagttgtgtgagaaggagaacggaagggatagggagtgcagttgggaaattaaggttacaaggaaaaatataaaagaaagagaagaagaggaaaaaattaaggaaaaaaaaaatttgtttattatttttcttattttagaattatttacttaatgttaaaatgattaaaattgtgtgaaataagaagaacatgacatatgtacatttttatacatgtcacctatcttacttggcacttaacatagcattttggatggaaaagtaaatatcaaagcgcgatgtttgtttggaaccaaacaattagtttgtagggttaagtgttacaaaacttatagttcaggtagtattattgttactatcctattttgaaatatatttgtattctgtgttaaatttttaaattactattatatacgttaaaatattaattgtatatataattttttaaaaaaatatatatgtgtggattagattagatcaattacttttatatgtcaattaacatgcaatccacacaagtgcgaattttagattttctaatccaatccatactgtatgaattaaattggattagatcgtacgaattagattagatattttataagatgattacctcacaatacatactttcgaaaatatttatgaaaatatgttaaatattttaatactgtcaatacttgagctctttctaataaatcggtaaatgtgtaccggaactcaactttttcttttgctactcac

SEQ ID NO: 67293 - DNA, 587 bp, Cannabis sativa
catttcgaaaagaaatctgctcagggaactcttgagataattccacttctatcaaaactcttgcaaagttaagtctctctttgttttttgtgaaatcatccaacattatcaacttacccacttgtcctatgatcatgaacaacgccggctcactaatatttgaaatccaattcatgaatttggacccaacttggagcagaagaaacattttttttttcttttttttttttttgatatcaactgtgggatcccaagctttcatgactatgagtttcttatcaaaaaataagaaacctctagccatgatatcaaaaaattgtgttttgcttttgagtgagaaaaaatctccacattaattaattatatacctttttttgtactaaatgaaaaaaactgagtacgaaaacttaataaatatttctacaatgcaaataaaaattgctcctggaagaatttaatgtaggcacactacaaaaaatagctacttttatagtgataactttttagtgatcacaacataaactttttgtgattaaaaatatgacttttagtcacaacaaaaagctacttgtaactaaaacatagta

SEQ ID NO: 67294 - DNA, 1023 bp, Cannabis sativa
atgtttgctttaattattttcttaatcaattgttattgtttgtgaaataaaaaatgtaaaacagatagaataaaaacacaaaaataaatgaagaattgatgtaactttattattgagaacaagagaaaagaaaaaaaaaatattgtatcataacattttgacttatttcatctaaaaatgattaaattatttattcagcaggattaatctttccataatttttaacattaaaaattaaaatttaaaagataaaagtataaacataaatttcaaatataaaaaaaagaatataaaattattttcatgttattgtgaagttttatttgcgttgttttgcaacatcttatctttaacttggaaatattatgttaaacaaatttattttcaagttgtagtaagtatgttataagttgtttacactatactatcaaaaaaatagaaggtactaatactttaaattactagtcaaattacttgccaatttttttgggtttttcttagtaaaaaaatttgatgttgattagtatgttttttttaattattttcttaatcaattgttgttgtttgtgaaataaaatatgtaaaaaaaatagaataaaaacacaaaaataatgaagaattgatgtaacttaatttattattgagaacaagagaaaaagaaaaaaaaatcttgtatcataacattttgactcatctcatctaaaaatgattaaattatttattcagcaggattaatcttgccataatttttaacattaaaaattaaaatttgaaagataaaagtataaacataaatttcaaatataaaaaaagaatataaaattattttcatgttattgtgaagttttatttgcgttgttttacaacatcttatctttaacttgaaaatattatgttaaaccaagttattttcaagttgtagtaaagtatgttatgacttgtttacagtatactatcgaaaaatagaatgtactaatactttaaacattttccttcataactaggttgttatttaatatttct

SEQ ID NO: 67295 - DNA, 925 bp, Cannabis sativa
acatattattttgtggggtaaataaagccaacacagacctccaccttgcattagataaaagattttgggttagagaaaaatggattatagataagacatgattgggacatattaaggtattaatagaataaaaattaattaataaattaatgaatgactagatagaaaatatgtctagagtaatcacatggaattgtcacccccacttatgataatatttgatatatcagactaatttgctaatttgtttttgtgtgagaaaattatcatggccctcaggcctatcatgtatgaaaacagtgtatggtattgaaagctagctataaccaatgcacttacattttgttgatcaacactatacagaccatttggactaaaaacaataatttgagactactagacttcttgaaaaattattaacaaatttgcaattatttgttgtgacaagtatatatataggaatggtaaagagatatcgtgctgggccgggttgagcccgactcggcccgattgacgttcctatatatatatatgtatattttactttttataattatttattattgttgattttttttataaaattatatgaaaaataataaataaaaattattttgaacatttaaaaagaaaaaagaaatatgaaattattagtattttttttttaaaataattattattgtaaaagaaaaaaaattcacattaaccaaacatagtaatcattataacattactgcacataaccaaacacagtaatgttgctttctttataattcccttcatcactctcccagccatgttaaacctattctcatgaaatgaaatctgcataccaaatgacccctttgtgttttttattgtgggttgttcagttgttggatttggaacgtgtttttagttggttcttattcttcggtgtgaaaat

SEQ ID NO: 67296 - DNA, 854 bp, Cannabis sativa
gtctaggtctgattcggagtccgggtcctggtccggttacggttctggatctaggtacaatttcagttatgattccaagtcaaagtcttagttccaatcaaaatcaacttctggttttggttccaattttggatcccagggtacgggttcgggtccacttttttgttagggactggttcaagtttgggtgtgggttctggtgcttgttagggttcgagtacagggctgggtcccaaatctagacaccgactatgggtttcttccaagccttgggtcctgattcggatcccaatctcgggtcccaatatggttcaatttctggtgcagggtaacgagctagttcctaggttcaagtttgggtatcggttgggtactaggtcccgttcctagttctttttcctaggtccctatcctgattcttggtccaggtcccgattattgtgtgggtttgggtcccggtttaggttttggttcatgtccttatctcggttcgggtttaggtctctgtttgggtttttatttgggttcgggttttggtttaggtcctcgtcctagttcggttctagtcatatttgctattctgagttttagtttgggtttgagtttgggtcggagttcgagtcctggtgtaagtttgggttcgggtccggatttcagtctaggtccaaattaggctccgagtgtgggttcgcctccagggtctttgtctagggtgggtccgagtcccaagttccaatactgatttaagtctggatccagttctgggtctaagtcctttgttctgatttttgtctgggttcgagtttgggtccatgtccgggtctaggtttggctctgattctaggtgtgggttt

SEQ ID NO: 67297 - DNA, 789 bp, Cannabis sativa
ttttttttaaattttttttttataatgagctagatttttttagattttttgcaatgagttagatttttcgatttttttgttaatttcctttccagttttcttgaagtatctcggtggatggtgagttagcttagattaagaattttttatctttttttattgatttgtattaaactctgattctggtcaataagagtttaatttcaaaaaaaaaaaaaacttctcaaaaaaaattactaattaaaagattatattattggctttcaaaaaaaattctatttatggattaactttgcgtttatttgtcgtatttttgtactaatatattcatattttttacatgtttattgtatttaaactcatattttttatgttgtatttaaattcatattttttgtaacgtgtgaggctcaatgtcatattttctcgtgatataaaataataatttttatctttgatgaattattaaagtatatataatttttttttttttgaagaaaagtatatataattttggatgtttggtataattagaaatattttcatagaaatattttgttaaacttgtggtttctttttacgtgtgttaaataattgtttgaactataatttgagtaatgtaaattattataatttttatgaaaattcacatatgattttataaaactacaatatacgtgatcatgaaaaaaaaatagactaaaaatatgtgtagtacatatttttcctatatttttctctcttttttgaaaaataatatttttatttttaacgaattattaaaatata

SEQ ID NO: 67298 - DNA, 794 bp, Cannabis sativa
ctggctccgcctactcagccactgatacacttgaagaggccagagatgtttcatgaatcacactacactccacctgaaaagacattgttgttgacgacacttttaggtattgttaagaaatggcatgagaagaaaacaatacaacatgagcttaaacaagaactgttcggacctggccatgagtgttatcggcaaggaagggagctgagatgaatcggaactaatgtcatgactatttggtgcaggtatagtggttaatatttaagttaataattatatttgtagatttttattaatataattttatgattcagttatttgcaggaacattcacttaatatcagtggtttgaataatacatatgtattttaaaatgctactttagtatcctcaatatcttataaagatcccaatagacgtacacggaatctcattgagcggttgaaggaaatacagcccgattaatggttgatttgtccctggaatcatgcgtaagtagatttataatttaatatatgtaaatatagatcgataagggagttcactatactttttaattatgtgtagtagtcaacactggatagtgataatcatccaggctgctactcagtcagtgcattcattgacccaaagaataagccaattgaaaatgaaattagaaattgtgtcacaacgtaagttatcatttttttttccttaatttaacttttcttactaattctttcactaattaacttctctttggtgtagtgctttggaaacctacatgacccaaaaaaatatacgaaaaaggg

SEQ ID NO: 67299 - DNA, 883 bp, Cannabis sativa
gaaaaagttcctactgaggagaacccagcaaatatgggaactaaggtggtgactctcaacaagttcaagcattgtatgaacctgttagcagttgacacaagatggtaaatggaaacttaatcaagcaatgagcctcaaagacagcaacaaataaatacagcaaaggcaaagacttttttagactgttaatatagataaaaattgttggataaatctccatactaactgtcacatggaaaatacattaaacaagttacaagaaaaaataaagtaagattttttacaagcctcaactgaccattataactcttggagtttcataggtttaaatcttttagctctttactatacaagaaataaataaaaccttctcaagactccaacaaactttcagcaagacaaggaaaactcaataatagttttctgactgttttctcagctcaaaacacaacacatcacagtcaacaacaacgctataaataaaggggtcaacctgcccatttcgtgtggcgtttttcagatcagccaaagagtgttgcagcagccatttcatgaagaatttacctcacaaaataagagagaaaaacagagagagttagagagttttattttgtaataaaaccagaaaaataaaagaagaaaagagagaaaaagcttgagatcacctaccgaaattgtggctaggaatctccaactccttgtactcagttttgacattgatagtgaagattcaagcaactttgaaggtcgcttgatggagacgtacctctgatttagagggaactccgaaatcatttctttgtgttcttttttttttgcctgctagtttctttcgggtctctctttaataactaacaaaatcattttagatctttgttgttac

SEQ ID NO: 67300 - DNA, 1845 bp, Cannabis sativa
tggagaagtagtcaaagtaatggggaaaaacaaggttttagttaaggtaagcattaagtggtctctgctaattttcttgttgtttggaacttcaattataagaggctttcattctgagctgcttatacctgaaaaccttagtttatttcctgctctttttcaggttcatccagaaggaaaatacgttgttgatattgataaaagcattgatatcacaaaaattacaccatcgactagagttgctctccgaaatgatagctatgttcttcatttggtcttgccaagtaaagtagatcctttagttaaccttatgaaagtcgaaaaggttccagattctacttatgatatgatcggtggacttgatcagcagatcaaagaaatcaaggaggtattttatatggattcttagtttctacattcctttctttccctctctatggtttctcttggttaatttgtttatttaatggatattttttttgacgtattatttgatggattgttaatgcacgaattgtaattttcttgtcaggtcattgaacttccaatcaaacatcctgaattgtttgagagtctcggaatagctcaaccaaaggtactgctggatttcatttatatcatctgataaatggtaaacattagagacattgacggttacttatgttcttctattatagggtgtccttctctatgggccccctggtacagggaaaacacttttggctagggctgtggctcatcatactgattgtaccttcatcagggtttctggttctgaattagttcagaagtacattggagaaggctctagaatggttagagaacttttcgtcatggcgaggtttgttttaatgttgttctttgactcttaagttgtatcttgttatctgttgtttaatgaactattttagccattttatttttgccatattgttatgccgctgttagaaggctgttgtattatcaaggttcttttggaaatattttattgtgactagaaaattattgacagaataattctaagcaatggtatcaaataagtcttgcaagcaaatcaatgtttactccaatattatgaggtttttctggaacatagttgaaatcctgatgttgcacttttgctggctgattagttgcatgctttactatcatgcttctattaccattaaatacatgttttgttttgtttcagggaacatgctccatctattatttttatggatgaaattgatagtattgggtctgctcgaatggaatctggaagtggcaatggagatagcgaggtgcagcggactatgttggagcttcttaaccagctggatgggtttgaagcatcaaacaagatcaaggtatgaaatggaaaactaatattcaactcaaaagatgtgtggttaacacaattagcggagagcagtattctcgtattgtgactttagaaaaacatttatctaaaatgccgctttgacaggttttgatggcaacaaatcgcattgatatacttgatcaagcactccttaggcccgggagaatcgacagaaagattgagtttcccaatcctaatggggaggtgagtcctgtacttctataggggtataggtgattattacttgttataggaattcactttatcaatcaatatagattgcctatattgcatggtaaaaagtaattctcttgtttgtttcccttgagcttaattgttttgcaatgttatttattcacatcttaggtttacaaattctgttcagctttatcctttgaaatcagtaattagtgaccttgatttggacactggcttatattatggttgtctgtttgaaatgaaaccaaatgcaatactcatta

SEQ ID NO: 67301 - DNA, 1344 bp, Cannabis sativa
tgtggatgaagcaatggaaatcacacaagacatagacgaaatgctgaagacaacctctcaatgtggccaaggaacatccaatttcaattagaccatgttgcactttacaagcaccacacaagggaacacaccaaataaacccacctacaccaaaccaatgggcgaggtgaaaacattgactgaaaaccggatccaacacaagagggagaagggcttatgcttccgatgtgatgacaaacggttcccgggacactgctgtaaactcaaagaaatgaatgtgttgatagtttttgacatgattgaggatttgagttgggattcaccttgaggacaaggtgaaagttttagggggcggtgttgataagccactagattaaactaggctttagtcttagttgttaattctctttgttttagttaaaagctgatgtgtattagtggctgaattgtattagttttaggggctgtggcaattattttagggcaccataaagtatataaggagaggcagtctcttaaaaaggtatggaaaaaattggtaagagttgagactcattggggagagccccaattctcttgaacaaattggaattggagagaacaagtctctcgaaagctcgtgatttgtaattttgtccatcaattttaataaagtttctgcaagagtttcagttatcctattctgtaattgcaagggttaatagaacttatcacaagtgtttaaagtatcaatcctacatttttctctcaaataagcagcagcattctgttggaaggataacagatttttctttgtagcataactcccttatcatgatttttttatgtgtgagaaggcaatctcataaggaaaaaaaaaaagtagccccaacaaatagaagaagccataactcaaagcccattatttgacactgcaaataaactattcaatctactccaaatgacagcataaacaccacatataagttaaaaaccagtttgaaggacccaaatatctgcaccttcactcataaataaattctaattcaaaggcaagaaattcaatgaaccttttgggagggaatacagcttctgacgatttctttgtgaacgtattctacttgacaactggggcattgcattgatgagatgcccaaatgtcactatggaattcttgtacttgttgtatctttctcctaaaccatttctatgcctgcaaagcaaagccaccaaattagtttttcatagctatatatctcaaaattttcctccctagttacgtatataaaaacgcttccaattatatatatgcagaacaatgtagaaaccatgtcgatcaaaaccagaatggtccattaatgtgtt

SEQ ID NO: 67302 - DNA, 889 bp, Cannabis sativa
accatttttttattgaagcatttatatatataaatattacaatacatattttaaactttgattctaagactctcaacacacacacttccatactctctcttggctacttgagttagcctctagtagttaaaattagtgacagacttaaaatttttattatatgggaattaattgttattaaaaaaaaaaattaagtctactttattttaatttatttatttttgtggagtttttttttttaaaattttttgtgctataattatcaaatgaaaagaaaaatatttaattttttcttaatgtaattttttgtattgggggctatagcccccactccattgtgagtgtgtatgtcactagttaagatgtccacaacttagcagcttgatggtttaagttttaaatttttggtacctattttctgaagtttgttaattttttattaactagcttcacatatggatcaacattttttcaaaacactgcttctcccactcttagggtaaatagtagtaaaagtacttgttttaagcttgtaattgtcataaatctaataatttttttagtgacataagtactcaatgttaataaaaactgaaattttcattagtttctcaaacagaacacatgcaaggcccagattctaaatcattgaatctaaatagaaacatgtagtatcagttacttataaattttattttaataaattcaaaacgaagtttgtactgacaaagttaaataaaatttacattttactaacattaaatacttgtatggttgtgccactaaaaaaattattgagtttacatcgattacaaactcaaaattttaagtatttatcatgcaattatttcgacacttttacaaggattaaaagtttattacaaggatg

SEQ ID NO: 67303 - DNA, 1132 bp, Cannabis sativa
ttttatcacacgtggcaaactaaacgatgacatagtaccatgtcaacgccacatgtataatttgaaaaaaataatttatttttttttcaatttagttttacgtaattttcttaatcattaattgattcttagtttaatgatttttgaaaaatacatatttttttttaaatttcaattatacacatgtcaccactactacatttatgggctttaaaggttatttttttccaccttttttataaaaagagaagttaaagggtgtgttcatacccgcataattgaaaaattgacatttagaggcagttcttttagtgaaaaccgtatgtatatatattgttaataccctttaaaggcgattttagaatcatgtgtttagggtgtaagttgagccatctatgacatcggttatttgaaaataaccgatgccatatcagtgcatgacacatggctattttatcatatggcgtttgttatgtttaaataaccaacgaaataggattatataaattaaccttattcagcattctccttcactttgtcttcttcttcctcaacatgaagcaagtacaacaaccaacaaccaccgtagaaataaacgccaagcaccatctaaaatccacatatgcccctattgttgcaccatttgagcaattttttttaaagaaaaaaaatcaatttttgatacctaaacacatataaccaaaaagttgttatttttctcctttttcactataaatcaaactcatagaaataaactagtggttataactccgaccactaattttagtggagaaaatgttgaatctcaacgtccattaaggtatcaatatgatttttacttattttagtagtgtacattactttattttttatttttagaaatttttttggaattgttttatattattaacatggttgttgtgtatgtgcacggtggtcaaaatttttacgagattgatcgtcgtattgcgcttataaagtaaaattttaaaacttaatatatagtttatatgtatgtattttgtgtattcttaaatatgtgtgtatatatattttgtattgtatgtattgtgtattttatttatgtaaatattgtaattgtactgtatatattctaagtaatatatatgta

SEQ ID NO: 67304 - DNA, 589 bp, Cannabis sativa
aaaaaaaaataataaaaataaaactttaggtggtgtggggatttctcttagattaactaaggtgcagataattttgtgcagataattttttttttttttaaaaaaaaaatcattttggaggttaaaattttaaatacaagtaattaattaattacaaggcagaggagagaaggtgatgaagataatttaattttcccatcttaaatatttaggtgataagcttcactactttcctataaataatataggggatccagctaattagaaagtaatttatatatttaaattaagaatagtgtgtttgggtgttgagatttgggaatggaattcaagtcgagagggtcatcatcagatgaagttgtgtcattgagtttgccccttttgattggtgatgataaagaagatcagaagcagaagaaggtgaaggaatatgggtcaccaccccaaacaacaaccaatactactccatccagatcttcattccatacccatacccatacccatacccccaataatgctttatcaggttcttcttcttcctcttctttcatcccctattaaaatttatatttaatttcaagattatgat

SEQ ID NO: 67305 - DNA, 773 bp, Cannabis sativa
caaaatttctttaagtgaaatttgccaaaataaactcacttaatttatactatacgaccatatttatagttgttttgcatttatgatctttttgtgaccatacaaaattattttgctaataaaaaatttgataaaagcgatttttacaaaacaaattaattaatgttaattcaacaatcgaagaagctgaaaaaacactcacaagaaatcagaaccggcaatcttggtctcagcatctctaacacattgtagaaccacaggtttaccctgatcatccctgtaagctccctgaccaaccaaaataatcaaatcaaaaaatggttaaacaattaaaacagaaaaaagattgaataggaagcaataccactccaagattgatctttttaagagttgggtcttgaagaaaagcttcagtgacaccaacaatggggtccttaggagaaggcttaacatggtcccaccaatcaccaactgctgctctgcctctggttgaagtagaaacgcaccgttttgtcaacttcatcatcatcatcatcatcatcatcgtaatattactttgattaatttagatttaactatacataatcaatcagtgataacatcatcaatttcttgttcttgttaatctttatatatggtttgttgtgttgatgttccagtgggctggtttcatagtattggatttttgtcgagtaaagtgaagcacctagtttcaaaaaggcttaatatattactattacccaatacaaaataggtttgactatctacatgtc

SEQ ID NO: 67306 - DNA, 721 bp, Cannabis sativa
tgggagttgattgagtgacttacttctcccatccatactttcatcgtgttttatggccccagcgtagcgctttaacacatttctggtggttcctccgatatgaggcccaccgaagatcatggtcactctcccatctgaccgtagtggtaattcaggcacctgttatgagagtgctcctccagggggtactccgagtacttgttcttcgggcataccgcctagtcctccctgaggtaaagggcctcctgccgaaggcaggtttagatggggtaatttgttcttgatccattcatacatatgatctaatcggattaggtactcgatttcatcttttaggtttttgcactgattggtgttgtgaccaatgtcgttgtgatactcacaccttttattgggatccttctgggagctatccctatacagtggaggaggcttccggtaatgcgtattctgtcgggtggaaaaatattcacgttcctgcatatccatgagctccttatattgagtgtattgaggggtatactcccttcgctgtcgcttatcctcaggccgggtactgccctttgaagaccttttgctccgggagctcttaggaggtcttgctaggttggtggcaggtgcggattgggacagggtttggacactcatccccgagggattgcccatgggtgccccaaagtgtgatgatgcaggagccagggcgaggctttgattatatcct

SEQ ID NO: 67307 - DNA, 9260 bp, Cannabis sativa
  modified_base (244)..(245): a, c, t, g, unknown or other
  modified_base (8101)..(8116): a, c, t, g, unknown or other
cacgtaaaaagtcttcatctcgctttcttacagctcattattacaatcctattttactagttgccgaaaaactcggtcaacaaaaactaaaacaaaatgtggtttagcgatctgtaaataagactgcccattgagttgttagaccgttctattttatgtcagattatatttttaatgagcttaatgctcctttcggtttgatttctattgtaatggatgaactttttttttttttttttctttnnattcaagcgtttatatattacacaatacataatttggtactcgaacctaagacctccaacacacacgcaccctcctatggccacttgagctaccctcaagtggttatggatgaacgtttcacttgaataaaataccatttctatttcaaaaaaaaaaaaaaacaaaacaaaacaaaatctggttaaaaaaaaaattataagtaaatatatgatgagagtaataataatgacacgtgtgttcatttgattggtgaagtgaagaaacagcagggaaagtaacaggaggaaatagagtgcttcacatagacgacgcacctgtgccacaagacaagcctatttctctttcaactcaatcatccaatattgagctccatccactcgtatctcgctatctctccctctctctactctctcagatcgctctcttcggagctcggatcttcatcttcttcgccaatggctgccgtattcgaaaccctaactgttcctcgctgttctgctctgccttcccgcgctctctctccgattacaacctcttcggcttcttcactcgccgcccgccgggccttgccgcaggtcagaggcctcaagctcacccccactcgctctctaggatcggtcagttccgctcctagttcgaaaattactcgtcgcggtggactcgtcgtctgcgaggctcaggataccgctgttggtggtcagtattctatgctttacattttattccagtgatttctcagaattcctgtttttgtattttacactagctcttttatccaggaaattaggaaatgataaattctcctcacatatcttttgtatattacagtttttcatttcccaattttgatctagatactggactttttaagtgttaaaaatattcaggcaaaatatgcatttttatattaataattgttaggattgaaattaaatttttaattttgtaaacacttagaaatttgcatttgcatacatacattttcgatcatatcatatgtacgtgtgtactatcaatgaaagcaaggttagaaccaaagtaataggcatattttgaggaacatgtcttagagattagttacattctttttgaaaacttcagcggctcctgtaaccgacgcatcgtggaagtcccttgtgcttgactctgaattccctgtggtcgttgaattctgggcaccctggtgcgggccttgccgtatgattcaccctatagttgatgaattggcaaaacaatatgctggaaaggtcaaattcttcaaagtaaacactgatgagagccctacaatcgctactcagtatggtattcgaagcatcccaactgttattatgttcaagaatggtgagaagaaagaggcaattattggcgctgttcccaaatccactttaaccacaagtatagagaaattcttgtagaagtggtaagaatgcctttgtcaaaactcgaatttaagtatgtacttgtagtttttgcttcgatctttttattccagattctcaactctagctgttttgcataataaacgcctctcttgtacagttatttgattcaacttttttctgtcttcgtaaaatgctagctattagataatttgtcgattaaacgctatttctaaattattatgttaaaataatatatctctttaccaactacactacttatgttatgttcatgtataaattgatgactttagtaacttagtaaagctcttgagcctgtttgaatcttgtgaattagtgaatttggggtaacattattgtgaatgttgactgactctttacatggaggaaaaaatattaatcttaagctaatgtagaataaaggagatcagattggatagctgttgaaagtggagcagaagatggggattgtttgggtgaagttttattctatgacgaaaaaccaatgatctttctggtcttcagacaaattcagaaacagcttaaaagagtataaagctgaccactagggtgctgcatattatggagtgattaaactgatatttgctcaagacttcaattgcattgacaggaaaggctggacttttagtttttccaaacacgtttagacttcaaatctggactttactattaattcaaagatgtttattagtgtttataaaatttccacaaaatctctagttaaattccagtatttctctgagtttgtgcaactctaactcatttgctcaattcagaaactctctaatttggaccttcacattggcaaccatgtgtactacttgtcctctgtctggatggttcattttggaaaatcggcatatacataagtcatagatgatttattagaaccccagattagttgactgagcaccatttattagcacttacacttcccaaccttcctttcaaccgagctaatatttctcgtctatatcaagtaaatgcaaaatttctaagcaatgtttctagaatgagatgatgccgtagtgtatgctgcttctaatttagtgtgatgtatttcaattttctccatcaaagttcaaagattggcaaaagacaaccagtatataattattttacgttccttgcagaaacaatggtataaatatgtgcacgtgtttgtaaatgtcaaaatgatcaattcaacataagacatggttcaaacttcgaagattcattgaagaattcccatgtcatagtcaggggtttgctgtcttgtttctagtcgaatttactaatccgtaatagtcacaacaggatactatgaccctggccaaacccaatttagcactctttttcattctccaatggtacaaagaatattttatattgtctcttaggatttctcttcttatatctttagtcattttttctctggccaggctcgtcgaccctcccttcgtttgggcgtggcttggtcaggatctgtggtttcgctatcgcgattaggttttagctactgcgattagttttgtctttgtgacacaattttgagtgttttttgtttaggttactacgattagtcttatctatgtgatatgattttgttttatttcatttcattgttagtttgtcttctttgttcttcgatgcctcccagtcagattgttgttagtgattgagaataacaagttctttacaactgaaaaagttgttagtagtgtagttatgtaccttgcataataattgagtgctcaaactaagggttgaatggacatgctacaacagatctactgttgtatcttttgagcagtagataaaactaaatataggtattcttaaggttaattgtgatgctctaatatttttcatttgactttatttaatttcttttgtcaaatgattcgggaatcagacaatcaattaattagctcatttttttatttttatcttacttgtgtttctaataagggagatgttttgattaggttgtagactattaataaaattgcacgattttttttttttttaaaaaaaaattaatatcttctcatttatttatatattttgtttctttataaaatgataattaagaataattttatttaataaattaattataattattaaataaaatattcttagcaattatttttttatattctaattattattatatttgtaacaaaaaatttcaattacaattcattcatcatgttaaaaatatagaatttatttctttttatacttcaatgcagtttttttgtttacaatattacgagaattcacatagcaactaatggagcaacttaaatcacaactagaattcataacaattcacataaaaactaccagagcaacctaaattataaacttttaaaaaataaataaaaaataatatttaggataattctcctaaaagtaaataaaatacttattatttatttttttgttaaggcataggctagggtttcacaaaaactttatgagagaaaagagtgcctaagatatattaatgtcattttgaattacattataaatatacttcgggtagccagaccaccaaatataatcacctgacattgaaaaagcaagcttagctaaaaagtgtgcaacattattggccatttaaggacaaaaactaaaagagatataccaaaagaatcaaaatgagcaaggatagcttcaatgacacatcctaaataagattgatcaacatggcgtgaattgatagcacaaaccacattggcacaaactcaatgatcaccccttgatatccaagtcaaacacacaacaaagtgctagagtagactgccaaggcttcaacaacaaccgattccaacatccctctccacaattaggtactggacactaagatagtaccatgagtctcatactactccacccactccagcctttttcgcaacaagatgaaggcttgcatcatagctcaactttaacacacccgacactggtttctctcaatgacatacccccgacgactctctcacaatattgaaaacaatagcatgataatcattagtgttgattaagatttttggcaactattaattagagttgttttaattattataagaagtttaatacgaagaatttttacgtggttggggcattaatgagctttagtccacgagtcactattattaatgcaataactttttacaaacatttttttacaatctgtttttctaatcccttaactgaatatagttgagggtatttatagcctcataaagatagtgaaaaggttaccattatcataattatatgagtatcacttgcacaatttcctaaatttggataatagggcagtctggctattttgtataacacgtagacttgctataggtatttggtgagatagacttttagtttctgctgatgatttgactgttcattttgcaactgtcataagggatattgaatagtgtgaaattagagaatgatgggtttaaacctctgatacgtatttttaaggtaatttgcagatgtttcttccatactgtatttaatgcgtttatagtgactttggtccggactcgcggagtctagatccattccttttttcttaccacatctccaggtagatttgactctcggagttgggatagcgcagcttgctctcccgaagggacttctcgaccgcgcctaatgatttaccttataattttaggaaattttaacataattattcctagagcatcgatctcagcaccatgtggccagctcttgacttgtcacatattttaggagaaattatgggcaacaattagcaccaagagaagcttaagaatgtaccacgaggatagtatcaaactttatacatgactcacaaaggattgacacatttgtaaccaatattcaagcttatttacccaacatggccaaattaaaatctcgtaaatgatgaaactcaagacccacatgatgcttatgaagacacaaattcttccaactcagctaactcactccacacgtttgagactatcccgaactccactagtattaactcatcattccttccaatttattatatgtatcaataggaagcaagaaaattggcatagaaaaagaaggcagagtttgagcaacggtctttaacaacacctcttttcctgcttttgacaacaatctacctttccaaccataaattctcttttgaatcttatctttcaaaaagccaggaatatcatttttattacgatccattttacaaggaaggccaagatacaaactatttgccgacgcctccatcatcccaacagatcacacatcttagttttggtaggctgagaagtgttcattttaaagaagattgtcgacttagaataattaacacattgacccgaagctcgttcgaaaacttgcaacaaataaagaatgtttcgagcctccatttcaatagctttacaataaatataactatcattagcaaaaaaaacatataaaaaataacaagagcactattacatacacgacacccatgaagagccccccttcttcaaatttctcaataagtgaagagaaaccttcaacacaaagaaagaataaattaggggataacaaattactttggcagatacctcttcctagagcaataggccctatctccctaccaccataagtgatcaagtaagtgacggtataaatcaatgaataaaccaagtccaccacacgaatatgaaatttatcatcataacactagctaagaaaggaccactcagacattatttttttgtctaacatattcatttttatctttttgctcacatactcggatccaaacctggacctagacccagccccgaacacagaccctagaccttggaccccgactccaaccccggacccggaccctaaaactcaacccaaactccggaccaagaccagaacccgggctcaaacctcgaacccgaacctcaacctagaccccgctcgaacccggaccctagacctaaactctagcatgggttaggagttcgggtccaagttggggtctgaggtttggggtccagtccacgagaggtgggatgggttgtggtatgttgtagaatattgattttttcttttttcttaaataaaatctaaaaattgttttaaaaaattaacatgagtcaaacacgagtaaatttttaaaatgacaaaaaattattttctattctcacttttgaaaatacaactctaaaaattaaaaactaaaattacagccaaacaatctcttaatatttgagactataatttaataatgtgattggatgcttccatcatgtatcctatatttcggtatctaagaattttttttagtttttttttagttgtatacgttataattatttaaaatattttgtaaaaaatttaagaaatttggaataatttgcaatataaaaagtagtattaaaatattttatttcacacgcatatataaattaagaaagtcacgagcacatcactataccttatttttaaagtgttgaatttttttgaatttctcaaaattttgcagcatgtcttaaataactataacgtacataattataaaaataaaaataaaaattagactaattttgtttagatgctaaaataaatatgagctgaatgaacatctttttagaggtgcaccatggaagtttccattatttgtagtagtgtgcgctatataaataataatatttgttaatagttttcgttttcttcaatcaaacaatttgtttccattctctgataacttttctttccctccaaacatatattgcaaaatgacttaataaaatacaaatgcatgccaagttgatcattaaatcaatattggtaagcctgattaattaaaaaaattgaccaacaatgagaaatacaaatcaaattaaaagggctattgtttttctatgcatatttaattgatcaattagaactatatatattaacctacatacatataatgaaatcaatgttaaaatatatatttattaattttgtatattaaccctacctcacttatataaatatttagttcaattatatatgctttcgaaaaaaaaacaattatataatttagttcaattatgacttatgatagtcacagtttctagtagcaaagactttctttaaactaagcatctagaatatgtatatgtatcaagatccatcctcaatacaacaattactataatccaaattaaattatcaatatttataatctgctcgggctaatgaggaaagaaaaatctctgatatcgagtcatatatatttgtttcattgggcgctgtataatctgtagttataaactatgtagttagtcagcttgatgataaacattatacgatctagttatataaatatacatttaagtcgttttcttctggatggtcagttgatcatgatgggtagctacctattgtattacaaacgtatactattattattattattattnnnnnnnnnnnnnnnnttattattattattattaacatgtgtcaaatttattgctacaacttttaacatgtgttaaatttaacacattttttagtacacaatttgaatagtaatttttcttaaatatgctaaaattattgaaaaaaaaaaaacttattttcagtcacaacaaaacttatgaccaaaagtaaaaaagttgaagctaattataaatcatcatttttatgttgtgactaaaaagtctctgataaaaaattttagtcacaaaaattacaattgtttgtaactaaatatatttttagtcacaatacttattatgactaaaactaaattagtaacaacttgtatttaaaattaaaacttatattttagtcacaagtaatattttattgtgactaaaagttacatttagtcacaaaaaaatatattgtgactaaaaagttgtcacactatatgtagtaatttttttgtagtgaatataataatatactacttttttaacactattaaaaatgctcataacaagatctaaagaaaaaactaatttaaccaaacaatggcaacaaaatttttagagccaatacaatgctgaaaattaagtaccctaacaccaagtctggtcttagactagggctcactcctattaggggccaaataaaaaaaaaagatttaataaatatacattatcttttttaatgattttaaaaatatctattgttataaaaagaatcaaaaaaaaatatatatatattttttaaggcgtaaattaactagggccaactttgtctaacactttctaattctataatagcgtaaattcttgtaatcgtactaaattcagccaaaagcaaatttatccaaggccataataactctttgacaatcattctaaacctctactataaaaaatctcagccttaaacatagttgaagaccatggaaatgttagagataaatattacatgatggaagataaataaaaatatattacaattcaattataaaataatacaaagattataaaaagttgaatattacatatttgttataacaatatatactgccaccatattctataggggtgttcatccgatccaatccgtacttttttggtcaaacaacatccaatccgcactaagtgcggatttcatattttggat

SEQ ID NO: 67308 - DNA, 2524 bp, Cannabis sativa
tatggcaaacattaatgccaacactgtacatatgttttgattttaagttgttgtattaataattttgtataagggtcaagtggaaaaagaaaataaactggtaaaggagtcattgcatgtagatattgaattttgtttgagattgagagcagtgttgatgagttgtcctgttgaagattagtgctgtttagatttagacttggcaattatactgaccattttgtgatccctttggtttgggtgactaaaaaatataaggatttttttacggattgtaattcgaatccgaggggtacaacagccttgaaatggctgagaaactttattgatgaatccatatcaacacaagacaatcacaccaagaagactttgcttctgatattacaaagaaagctcaccaatgaactctttaaaaccctccaaaactctctatcactcggtccacatcagcatttgacaacacaatttggctgatctaatcaccacaagaaacttgcaatgattaacagaatttgaatttttgatgactttttcagcttcttataatttaatcatatatagttctaaatttttaatgaggtaattataaattttatgagtttttatattatctgtgcaaaaacatgcataattcaagaaaaagttagaagatattagagtactaggtaaaggtcaccaagtatttttaaggtaaccaaatgggtattaattgtaacaaaataagggttgtaacccaactcaacacataatgtaatgggtagggtttggttacaactaaaatttaatatgaatgagttaaaatttaatatgtcaatcttattgggttagcctactaaaatattctcaattcggtcaactcaacccatgaaaagcggctatgttgatgcgacctccgaaattgagtaatccatctattagtggttgagatctctagggaggcacttcatgtgggacttatgggtatttgttttggtccaagatataccaatatagttcctcttgctatatagccaagaatgttcttcattataagaattctagattttggaatggggtgtctccctaatggctattctatacaaacaacaacaaaagagtaaatactggcaatatctcatatttacacactattggcattgtttgccataaaaatttggagcaacaaatttggccagtgaaaatgtcatatataggcgtccaccctcgtggcgatacattcaagaaagaaactagattgatgaagacatcctctctacatggaagtgtgaggcctcccataggatgatcaaatcgaattcattcttctgcttgataaagaatctcttgaaatgataaggctcgttaaagtaggatatatagatcagaaatctcttcattttcatttcatctccaacatagcctcttgagacatcagctgctcggttagcatttgaagaagtgtttgacactagcaatgccaggcaaacaaaatctcattgttataattagaagaaaagtggaaaagatatcgaaagtgaagaaataagaatgttgcagacttgacttgctatactaaaccaaatttcatgtttatagtaatgtagtataatgcaagagagaaatgtgaagtgaatggttgtacactaatttaagatcaacaacataaatgatcactgtcaatatattcaacaaaataaaaagaaaacataaaagatcagtatatatttcaaagaaaattaaaccaatcagatatttactatttatgataaaaaatagttgttgattataaatttttgctgagagtacatggataatagtgtttacaattacatagtatttttctgtccaaagaaatgattcatcgaaataatgactcactattgatatcaatacatctgagatcgccaaatgtagttcagattcgggagttttgaaattaatttgagatgatttattgaattgtatgtgtaatgcatttatctcgttctagctgtaaagatcgttatttttgaactgtaaaacaaaagatataaattagttaggaaatagtaaatattagttagtgaatgaattagagtaacatatactaagttatgtgatatatataatgcataaaactagaatatgtaaactacctatttctcagcttattattacctctaattaggaattgatttattgacgattgcgaccactttttcaccgagttctaaaagttagtagttgaggtagtctgtcgtaattggacatgacgaccatagcctgttggtttactcgacctctaagagtgttttggaggctatgttcgactaccgagaaaatcttcagaggcttgtctgcttctcctcacgggttgatgtcgccagttaaataccagatcagtcaattctttaccacaagtctgtaaaatcacaaaccaagacttgtcatcaatctgagttatgctggaatcaaagggaggattgatgtcgcctgttatctcattgttcctaaaatcacaaagaaaaaaaaaaccaaaatgaaaaaaaaaaaaaaactagttaaa

SEQ ID NO: 67309 - DNA, 957 bp, Cannabis sativa
aataatacaaggatgacttgaaaggcataaacattccaaaaattgtttaaattatttatcaaagcacacatcaccatcaattttacttcaaaggccaaacaatgcaacttctatctaattcaaatcatcaaacctctaaccctagtcaagcatgtataacaaagtcaaaatagtcacatttacaaatcatactcaattttccaacaagcgccaaagcttagcaaaagaacaattagaccaatcacacggttattaactattgacctcgcttttagccaacgacagtgagtcttaattgtaagcgataagtgatataatttagatataatatgaaaagataaataaagaacacagagtttttaaagaggttcgaccccgagcagttcagtaatagcctactccccttgatttgtattgacttaattaagaacaaagattacatagattcttctcttaaagctcttacaatgacatctctgaatatgctctcttagataatttttagtcgacccttgcccaatgagaatagatcactatttatagggctatgtgcttgagggaagatttcccttttgtttacaatgtctataattggtaagattacacattacatatatggaatacactgattgagggatttggacagcttgccatatctctgtgatacgatcccagattcatagggattgcttttgtgcttcacgatgcaaatgctgaagttgctaagtggtgatatgctgttcggattgtccactgctcggctgggaggacttcgtccgtgcaggtatatgtggtgttctgctgggaacatctccttcgggcagatatggagaatcacttacacgtgtcaccagcatgaaatgtcacgtcagagtgtgaaaattgggataacattataatttagtctcaagatgaaacaacaaatggcatttatttatttcaaaggtttaagttgca

SEQ ID NO: 67310 - DNA, 548 bp, Cannabis sativa
tatttccattgaagttgttggtctcagtaacagaccatcactgatagtccctttcaagtattgaagttatttgacaaggactgtaacttatgagcagtatgttcagtatgagaaacgatgggaacatgtggttgaggcacaggtggaatattatttacttgaagcaatgatgacagagatggtacacctgaatagggggaaggaaaagtagtagagattttgtgatgaagagactcaacacatggaaaactaagtttattaaacactacatctctagaaatatggagcatgttttccttagacatgcatttgaagcccttatgagacatgttgtacccaagaaatacacatggggtggacctgtattggagtttattttttttttataaggtcttaggttaggatagcataagcaactaaaaacttttggcgtagtgtaatctagtgtagtgtgaaaaagcttctcaataggagacacattgtgtatagttacagtgggcactctattgattaggtacactgtagttttgaaagcttcatcccaaaag

SEQ ID NO: 67311 - DNA, 508 bp, Cannabis sativa
tatagggttttcatgttgattatcttcctaataaacacaaaaggaactggtatcagaaaatcatcatgggctgtacttcatataaatatactattgaagcagctaatttagcagttgctgaatataacaaacttcaggtacatttgttttgcttcattaatataatgagtttattatttattgatatttgtttgtatcgattttttatatgtatatgtagggtgttaatttggagattagggagattataaatgtcataattagaggattcgattattattatcttacgttggaatgtacggatggaaagtattatgaagttcaagtcttaaaaatgggtcccaaagttgatttggacatgtttaggcctgctaaacattatccaaggccaaagacaacaacaacaactacatcagaagaaaaagaagtagaagcagcagcctagaacaatggctgtgttggaagtcttttgtttttggttgctttttggagtgtaggaacttatcac

SEQ ID NO: 67312 - DNA, 1006 bp, Cannabis sativa
tttttatttatatatttttgaagaacatgtttgtcttttttatttttaattaataaaaatataattaatataaagtaagttaaggaaagggaaaggtattccttatgaaaatgggcgaaaacctttccttttgttttctccttaatttgtgtgggccccactaatttatcccattccaaaatttagtaaacaaatgaataggaatcaatcacgtacaattgattcccattcccctttagtaaacatgccataaataaacaaatgtaagaaaatgactcccttacgattaattctcattacttattagtaaacatgccaataattcttttatcgtttacctctaaatatgggccaattttttaacatgttacaaaatcggtacaagcccaagcggtacgagcacgatttggtacgaaaaaaatatgtgcttaggctcggtatgaaaaaaaatgggcttaggcacgacacgacaagctcaaaagaatgacacataagcacgaatagattagtttgaaagcatgacacattaaaaagtcaaataatttgataataataacaatgataaatatttagttatccattacatgataataagattcaaattataataattataattatttttatatgatattatgtaactgttattgaagaaatatataaaagtaatctatatgggcttgtttggtacgccgtataacggtcgtattgtattaaataataaataacactatgtttagataaaacaatgtattgtattaattattacgaccaaattttttaatacaatgtatgttgtattatttaatacataataaacaatccgtattagtttgtattataatatttacaaaggatttgggatcacaccaatccgacccgaacctagacccggactcgagacccggacctggacccaaacccgaacccgaacccggacccggacccggaccccagaccccgagtcaccttactatggtagatgctctttctttccccattactt

SEQ ID NO: 67313 - DNA, 2628 bp, Cannabis sativa
ttataatttttcccaacaaaatttgtttcgaagctactcgtttttagtgttagggttttgggtaccgagtttcaatcaggtacacccaaaattcaaactaaaatagaaggctaattataatttttgcatcctaaattttggcatgtactaaattatgccctttaaaattttctggccataaattccctaaactattgagattattggatttaagaatttttgtccaatttcattcaatttaaataatttcgtgattgcctatgtatactaaatcatgctctccaaatttgatatctaccaaatcacactcctcgaattttgacatgtacaaaaccatacctcctaaactttcatccatgttagacttcctttactaaaattagacaaaagtttttaaatgtaagaatcttaatattttaaaaggaatttttaacagctttaaaaaaatttaaacaacatgatttagtatcaaaatttaaaaatcaaaaatcttaattaatcaaaataaaatctaccccttgacttttcacataaatagcaataaaggctagctaagtagacataatatatctcagtcatgcatgtcagtctatatattataatactattatctatctactacttcttatattaaatttaatataaagttgtgaacaagatctatacaaataaatactaaacttgttgagccaattgagttcacataacataaaagtttaagaaaaaaaataagatgaccatggaagagagcttattattaaagaataatattcatgaagaacaaagagacattaatggtgatattgagattgaaaataagattgttgtgacattatggaattggaaggttttttttgaagaagtgaagagattagggttcttaggaggacctcttgtgatagtggttttatctcaatttctattacaagttatttcaattatgatggttggtcaccttggtgagctcgctctttcaagctcagccatagccatctcactttccggggtcactggttttagtgttcttgtaagttttttcttttctctttttgaaaattctaatctcgttgttactaaaataaaattatgcagattcatgaaaagggtatttttttatataatgtatttttttaaatgatcaatatcaattggttaacacaaaatttggtttttttttttgataattaacacaaaatttggttcaaatttatgttttagatatgtgtgaattccatgaatcgaagattcttttttctttgtttaatagatatttctctttacttgtgaaacttgtgctattatattaatgaataataaaattaaacgtgtgaatccctctttttgagagagatctaattttggtcaaccaagaaattttattattgataataattatcatttatatgcacacataaattatgcatattaatgacatgacataaattatacacaaatttaacacaattatgtaattaaaaatttaaaccaatcatcctgaaattctctacatcatgttaggattttaaatatgtaattttgtacaataaactaagatagtgtttggtttgagttaataaaatagaatgaataaaaaaaataataatttttacttcattccattattttgttacattttatggaattaaaatagtcaaggagagaaataaatgagttaaaaaatattaaattatcgaaaataatattttattatgttgtttaataaattatttagaaaaaaaataggaataatttttttacataactagaaaaagaaaacaaaatactaaaatttgactaaattgtcattattaaaaagtataataggtttttcatttatagattttttaaaggcatatttttttaattaataaaataaaaataaaatagttaagaaagaaaaatgtatttcttataaaattaggggaaaatatttctctttttttctcattaatttaagtgggttccactagtttcttccattacaatatttagtaaacaaagagaatcaatatcatacaattgattattgttccccttaaataaacatatgctaatgcaagataagaaaatttttaaataaattttttattaatttttttatatattttaaatttaattctattcctttctcattcttatatttttattcttcgtacccaaacatgccttaaaaggtttatttattattattattagggtaaataacattttagaccctgtgttttgtaaaagttaccaattgaactctgtgttttgtcaaatgacaaaatggaccctgtattttctaaaatagtataaataggaccctgaattgattttaaaagattaattataattcgatctaaaagtgctatgacaaaactgcttatattttttgtatatgttcgtattaggaattatcttcaagttggttgtattaaaaagaaagttgtttaaaattaagccagggtcctatttttaccattttagaaaatatagggttcattttgtcatttaacaaaacacatggtccaatctgtaacttttgcaaaatataaggtccaaaatgatatttaccttattattatttgtatatttttttacacagatgggtatggcaagtggactagagaccatatgtggtcaagc

SEQ ID NO: 67314 - DNA, 1493 bp, Cannabis sativa
  modified_base (235)..(253): a, c, t, g, unknown or other
cctcttatatgacccgcctcatgacaaagaatagatttttgccaatcatttcaattttttttctccacatgttcccacttaggcactattaatcttctgcatggccattttgtaggcagtttaactacccactaaattttcagagggaagagcatgtaagaacctatataaggttcattttggccacccttcatttccacagtggctatttcctctctctctctctccctctctnnnnnnnnnnnnnnnnnnntctctctctctctctctaaattcctcttgagaaaaaggaaaaagaagactcctcatcttctcttgcaaccagatgcccctaaggtctccaactcttgagattttcaattcgtttcgataatccaagctccagaagcatcctatgtggacttcattagtagttaagctttaaaatcccatttccatttgttttcttgaatctaccattgttgttatattttttattctcacgttagattgtaatcttttttgcattatgattcacatgatatctttaggatacataatgtattatttcctaatgaaaaagattcgattttgagcttcgttttgattcttgctctttgagtcacgaagaacacaaagaacacattaaagtttctgaaaaaatatatttttcgatccatagaacaccttggtcagcctatggggtctgcttgtgaccctagctagcacatggtaccattttggggagctgggcagttttgggcttcagcctggaaccctggtcagttctttctttgatcagggaccctggccagcacatgctaatcccttgggaccctggccgacacacaacttaaatcctaaggtaatggcaagtttttgatcatcttttgactctagcaaggactttacgatggccttataatcttgttcaaccctcgtccagtacttggttcccttaggacttttgtatggaacttcttagggtgattttatcttattcaattaacaacttaagactcaatttccatctatgttcttgcacttggaactcgtactctgctaattttcaactttttaaaatagaacttccaggctagtatctttaggtttagttaaccactatttcatctaaatcttgtcactttgtctagttgctcaccttcccttgtcttttatatgtagatgaatctacgtgactttggggaggggaaaatcgaatagacgaagattttctcagtctttctttcaaggccaccatccagctggttcttcgagtagttcctcgagtgatcttgaggttagcagtgcttccacagagcctaaagtccagcatcactgctattcgaagcgaataggcaatgaattttactggagattcgtttgggagttgaaccaagagtggaggccattactccctagttcatggacctatgttgtttaagaaggagtacccgatacattgcccactagtcgggaaacttcactagctagagatctccctaccatagaga

SEQ ID NO: 67315 - DNA, 677 bp, Cannabis sativa
ggaacattgggttcagcaggtacaccttaaccgattttcaacaccagcaggctcaaaacaacccgaaactgtttggtgcagatcatgttcatgttgcaggtcatgggcatatagatcattgtctctgtcaggacctgaaacagaactaggggagtcaaaattagcagctgaagagtgagcacgggggctgctagaggatgctgcatgagaagcttcaggtgatgtatcagtggaagaagagtcgactggtgtggataatggagtggggtaatgagtgggaagggtggaccaggaagtagagtgaattaggacaggttgtggagtggtataatttttcagaaaacccattttgaaggggaattccagttcgttaaaaactacatctcgagagatgtagatgcggccagtgggactaaggcatttatagcctttgtaggagtcactataaccaagattgacgcatttgatagagtggaactagaatttgtgggattggtaaggacgaaggcacggaaaacacgctgcaccaaacgttttcaaaaaagcataatctagttttcgagcaaatagtatttcatagggtgatttctagtgcagcaagggtgtgggaagcctattgattaaatagactgaggtgtgaaaagcatcacactaatatttgaggggcatacttgctt

SEQ ID NO: 67316 - DNA, 1489 bp, Cannabis sativa
  modified_base (1034)..(1037): a, c, t, g, unknown or other
acgttgtcgaagttgcctattctccaactccactaataaaacatatctggttgggtcataaaaatcctcactcttaggcacgtaggtggcagagttataggcattctcactcctcctttccgagatttgatcaccattatcatcgttcctccttgcacgtggtgtttcagatgtgttgggtctttaagatcccatgggttctttgctggggagatgggttgtttcttcaggatgattattgttgtgttgatcatcatcacccattgaatatgggtagattgtgtttataaggagggatttcttctgagtttttatcaccaacactctcaatgaaagcaccaaactattaacgcagagttttgttaaccaaattaatagcttttttgcaataaatgcactatagaaataaatatataataaatataaaatgacaccaaatattttacgtagttttgtagtcaaaatctacatactccacgagtccttattattagggatatcttctgggatacagagtacactaacaatatttgaataataggattttctctctcaattttacagtcccttttccaatggattctacccctaattatatgaatataggttgacaattattcttttgggattgatttatttacaactattgataaaatgtggacaatccccacgtttcatttaatcatacataggataatatctaataactatccaactgatctttattcttatccattagatggttatgctgacttggaaggttgtgtctcgtcaaacatgagttttccttcttgtccatcttaataggattaaatgctaagtgttggaaataatttatctcgttatatcccttcattggtataagtaatacgagatgatcattatgctataaataacacgaggcggttaagtgtcataagttcttctctttttaagagggttaaggtctctgactgtctcgtcttgcacattttactactctgtttgtcctgaggtatacatgtgtctcgtcaataccagtttaatagttattnnnnttgtctcgcataagactaagcagttaacgagtttgaacattttctatcaaacttacatttaattgaaacaagttatttaaattgcatttaatgatacatcattattatactctctgatttgattcacattctttctgtaagacacgtgtcaacttctgatacatagccaaatttcgagtataacaattagtaaaataggaaaaagacacattgttttatttaaatgaaataaagtggcaaaaatcaaatccataggtttcctagagttgactttttccctagggttgattttgatcccaactatctttattttggcccatctcttgtaaagctaaccctaagtgaaggctatataaataaggtgatgagagaaagcttcctaatgctagaaaaccctaattctatgtcaaaaaagctcttttcttcttgtttctctaattcaaaaattacat

SEQ ID NO: 67317 - DNA, 640 bp, Cannabis sativa
attacaacctcttagtcaattttctgaaatcaaatactgaaatatttttctttcaaattttttccatagcagtattcattaaagttacaatatcatccttataaatttttaaaaaattctgaatagtttacatgtatcgaaaacaaagttcctaatattcctttttaccacgcgtatgttcaaaaaacttcaaacttattttcggcactgtactattcgaaatttttttaaaatttacagggattatgttgtaagcataacaaacaccgttgtaaaaaaaattgaaaaaaagtattttgacatatatttttggacgtgaaagttgacaaagagattgtaataggagattaacggtagcaattctctaagtttcttattgtgagaaattcttaaatatttgttgtagggagaaatttatgttacctaatcaaacaactgaaagaataaaaaaaacaagtgagcaactgagttacatccaaccaatttacatacaaccaatttaagtcaaagaaaacaaattaagaaaatggaaaataaaaaatactacaagcatgtttggtattgttttcaaaaaaatgttttagaaaaatgagaacaaaaatagtttttaaagttttcttaaaacaatattgaccaaaag

SEQ ID NO: 67318 - DNA, 834 bp, Cannabis sativa
tcaacaggtctgatagtgtgaagaaggaagtactctaggagaggttctttttacactgtgagaatctgaaagacgtgtacaagttaggtttgtgctcatttgtggatgtagcgttactgagccgtgagggtaacacttacgtttcttctggcatacctattaaagatctcaatttccttttctagattccttggggaagtactcatttgctagacttatgctcacccttcaaaatggcatgtgaaacaaaaagtaaattatgacaagaagttaagtttagatgttcaacacgagtgcaaatacataacgtatggcttcgcacctgcaatatagtattaggcgtacgaggccattttagaggttgggaggaagtgcggtacgaatcaagggattcagtttctaaggatgcttagttggatcaacaagggtgagattgggaagaaggagctcagtgcattatttttgaaatgggtatgatcttttcttttatgtttagagcaattattcaagagaaatgtttggaataaatgctaactcatttttcttttatcttttctaaatcttagtcagtaacttgcagtaatgaatggactatttcctcacccggatgaggacgagtattccaggaccatcacttatgatgatctggagatctttattgaagttggcttggatggcacacagccaagcaaaaaaaaagcagcgaaacatgtcaaaaatgctcctatccccgatccagaccctcagcccattgcatcagagccttaatacactgcatcatctttaggccttggtggtgctaagtacaacgatttggtggagaggttggacaag

SEQ ID NO: 67319 - DNA, 722 bp, Cannabis sativa
  modified_base (252)..(254): a, c, t, g, unknown or other
  modified_base (657)..(678): a, c, t, g, unknown or other
gataatcaacaataaagtttacttgcacatagatttgtggaatatcttttccaatacattggcaaagtatactagtatgagatgcattggttatacattggtctggaccgaaattgacagtggaaatgatatcataaacttactgtcatatcttttctaagtgaatgtcacttagttgatcttaatcctaaggtggttaatttctagcttaaatgtactatatgttgggatatattttaccaggatctagannnactaacaagtatatttcattaacaccctaaatatgaattctctaatacgataaaattaaacacataagagtttaaaaaccttacattgatgcagcagaaaaataatgactccttctgctcagatctctaacccttgttccaatctagggcagagtaataacaagatcagagcctggatctctttctctcctttgggttggttaccaccgtcttccgcactatgactgagtactttacttgctatgtgtgggcatgatactctatcactatgggccaaataggtgaagaacaataaaggatgctcgaaatcactatagaaggtatctctcatctactagtttttgaagaatgaaaactaggtttagttaggttgaagtgaattgttggatgagatgagagcatnnnnnnnnnnnnnnnnnnnnnnaactagggtttaggtttgaattatatggattaaaaagaataaaa

SEQ ID NO: 67320 - DNA, 1353 bp, Cannabis sativa
agtattaccaatagttgaaaaaaagagtttatgttctgtaaagtaaatttgtaccgaacaaacatatgcaacctctaatccaaagtttgtaaaactgagtgacctaaaatcaaatttcatatcactcaggggggtagtagggcataccgcacgaacaaatgtaaacagaccaaatttaacaaagttaaaagctaagtatgtattcaaatgtgaatataaagtgttcggatcccaaagaaaagctcaaaaataaaagataagggcctggggatgggccttaagtgtctccccttaaaaaaaatatatatacaagtaaattgtcttaaagaggggagaaggattaaatatgtaaggagaaaaagaaaaataataataataatgatagtggtagtggaaagccggtttaatcaatccgaggcggaagacgagtacctctgagctcctccagcaaggcatcaagtctcttcttcttctcctagaagcggatgaggacctcctcaggcttgggatagaagtcaagcttaaggttctgaccgttagtctaccaggccatgaagacactgtcgtcaaaacatttgttgcagtgctggcaggtaacgggggccatgagctcatcactttttgctttcttttgagcctgctccctgaagtcacacagctctttcacctcaacagtcaggttggctgtcgttttcaaatcagcttggtgcagcttctctaaggactttagcatggcaatcagttcctcaactacctctttggcctctctaagctcacgccttgacttggtcatagcctcatccctggccttcagggcttcgtcctttgccttcaactccgccttggcctttaacgcctcctagtgactccgctccatctgagcctccttttgttgagcctcctcccgaatagctttcctctcggccgccaagtctctcagactcttcatggcctcatccatggccccaaatttggacatgatgtactaatggtcaattaaagtctttgagaggcgaccagtctctgcagcaatctggcaatacaagaaaaatgtgtgagtacgggaggacaggcgccataaaataaaacccaggaacaccaacagatagacttaccacagtcatggcagcactaatatcctgaatctggtagattgagttcgtggaagcacaggttgcatatctcttggccgggagttgggtcaaattggagacgaagtggcttgtcatatctgagacaaaaagagtgagggtaggcccgatgaagcggttgaaccagtccgtcagggggtccatattcagatcccaggcgtcccaaagtactcactgcgtgtggaattgtcatgggcctccc

SEQ ID NO: 67321 - DNA, 1251 bp, Cannabis sativa
tcagctaaagtgcaagcaaaattgtagagtttaaacgtatagatgataatgatgcgatacatgattacatctctattggatatatatatacatgattgatttactgttaacagtaagatcataattattttttttttctttttttgttattacgttagattttttttttttttttaagcattataatctcacatgtttgttaattaatgtaacaaacaaagactccccaatattgtatacgttaattttttaaaaaaaattaaaaattaaaaataaacaaacatattttttatattaattaactttgtaatcatattaatatatatacactaatttaacaaaaaaataaaaacaaataaaaacaaattataaaatgacttgagtaccaattactggtgtttgatcttgtggtaccgtgttttttttttttattattttgtatagatgttgacacactaaggtggtgtttggttggaaagaaggaaaacaaaggaatataaatgagaatgagaatagtaataagaatgaaatcaaagtatttaatttttcttatcttgcataggtatggtatttctttccattttaaaatggaatagtcatttcatcaaaatgataaaaaaattatttttttggaatgtgaaattccaatactcaaataaaaattacgatgaaatgaaattctaatactttaaaatacttttctactattttggtgggataactattttatttcgaaatagaatgaaataccattccaatgtaagataaaacaaaattattaattttattttttatcaattttttaatgcattttaattttattctattttccttattttttttttctgtattttctttcctcctaaccaaatgtgctcactagtatttttttgttatacaatgaacaaatttttattgaaaaatatcagtgttgagtacatccaaaagaaaagatggaaaattctccatccaaactagctcaccatccaccttgagtgcatgcacaactaattcataagcaatcttattgaccgattgacgagcatgaatcaggaaaaattggacagtaaactaaaaatatactctaaaagaaaccaagatcattacaaagagaagctctcttagcaaaagcagagaataccgctaaacaatcaaatgagaaatgcaactaaatgaccttatttttaactttatagatagctaatgtcccttttttaaaataataaagcaaatgtcattttttacttttta

SEQ ID NO: 67322 - DNA, 758 bp, Cannabis sativa
tatatatatatacatatgaaaattttaaatatatatatgtatgatatggtcaagtgagaatatatatattgaagatcaagtacttattttattttatttttcaaaatttagatttttaattgaccaaaaatttggctgcaagttcacacttttaattgacggcgagtagaccgacaccattgaagcccaaattccctttcgtctccctcggtgcgatggaaacttccaaaaagataattggacagagaagactttagttcgtgtatgttagaatttggaataaggtgaaggaggttctatctcaaaatcaattggcaatgaaggagcagctcatgcatcttatatattctattatctttgcatacattagcaatgtgagattctctaacatccccctcaagatggtgactattttatatagtcaccatcttggacaactcgatcataagcgactcttttttttgctcactattcctaatcacaagtcgctcttttgttctactttttggatcggtatttttggattttttggtagtacttttttttttggttcactatccccggatcacataagtggcatttttttgactatttggctcttggatcagtttttttttttggatttttggtggctatttttttgctctacttcgatcagttttttttttggagggggttgaaagagattttttttttgttgttttgctctaataccatgttagaatttggggataagatgaatggggttccatctcaaa

SEQ ID NO: 67323 - DNA, 735 bp, Cannabis sativa
tcactactacttctcataataattgtagtattattaaagatattctttctctttaccataaagctactggtcaatcagttaacttctccaaatcttccatccttttttcgcccaacactactgcttctgacagagaccttttctataacaaccttggcattgagaataagccttttgtttcaaagtatttgggagttccccagtgctttgggcgatccaagaaatcttcctttcactatcttcttcagagggccagtcctaagcttcaagtttggagtcataaatttttttcaaaggctggtaaggagactcttattaaagcggttatccaagcaattccttcgtatgccatgtcatgttttcgactccctgtctccatttgtaaggaccttgataaacttattgctcacttttggtgtgggtcaactcgtaacaaggctaagacaaattggaaaagttggacctccctttgtgtttctaagtttcatgggggtttaggcattcgaaactttgttcttcataatcaagcccttcttgaaaaacaagcttggcgtatatttacgaatcctaactcccttgtttctagacttctcaaggccaaatattttaaacataatgatttcctttcagctactaagggtcatactcctttctactcttggagtagtattttatggggtcgggacttactttctcaggggctcatttggaaaattggtaatggtaaatcggttt

SEQ ID NO: 67324 - DNA, 1328 bp, Cannabis sativa
aaactaccaattcaaaattcaaagcaagattcatcatttcattacagcttccaaatcctacaaaatcatgaacatataacatccacaagtagggggttctaaatatgacaaaccttccgacgggtgcaaaatgtcgattagatgatgtggcaccacctgcacccacaagaacaaaaagttaaaaggttgtataatctcaactttagcatctggaaataattttacagcaaccataaggtcaatattcatggcttaaaacataatcttgaaaaagaaacatatacaataagataaaaggacctttctgtcactttcaggaggcttggcagatccaacatcgagacccctatacacctgtgacaaatataaaaaaaataacataacaaaattatctcatttgttataagattagtagttgttggaattaattttggtggactagtataaacatattaagcattgttagacaaccatatttgtgttggcaagataatgatattattagagaccataatgggatggtgccatttttctaatttagatagtctccttggacacactctacaaacttatgtgactagcccattgagtctcatacactctacaaactttcttaccatcatcttcatctaacaatttggctaacaattttcatggaagaagatggcttttactcaaggtcaaagcagccatggtggaggtgtacatctatttactcttcttttagctatagtatactaaactaaaacatcaaatgcatgttattattgatgagattgttaaatctaaatgtaattaatatctgctataattctcatcttagttttaaaagtagttgcatatgtatgtatgcaagccatgaatgaagcataagcatattgggaaagttattggcttaactcaacctaacaaaactggcttgttaaggttggattgccctcactttattaagtgaaatatatatcaccaatcaatgtgagactctaataagcaccctcatgcaaaaactaggcccactctaaaactatattagaaaagttattgagcttaactggcttgttaagaaaagattgccctcacctgaatcaaatcaagtatatatcaccagccaattctaataaagcataggcaatatgatgacttagtccttcaaaatcaataatttgaaaaccaattcaaatttctaaacaatcaagacctcttaaaaaatgtagctaaactacacaaatggaaatgaatcttataaaaaaaaacatgttggtaatttaaactaacttgttttcaaccttaagaatgtttagctgaagaaatgaatttcattcattcat

SEQ ID NO: 67325 - DNA, 983 bp, Cannabis sativa
gattaaaagctgcccagtcagcctattgtctgtaaaatgaaaaataattcaaagtttaaagaccgcttggccggtcacgatatcttagaaaaaggccttatggcctagtaagatatatataacaaagttagataaaaagagaagtatttaaatagctggatccctggctctcggttcaggtcttatgggccattaggagttggaggatatgttgtctgagcggaaggaatatcaacattctagcaagaggtagaagcagtcacctcgggttcaccataagccacttgtgaagcgcagtactcgagatacatgtctttggcttcgcccaagtaatcgaaatttgcctaagggttagccttccaaaaatcataaaagatctcaagaacggctgtctctaaggcatgaactttctcttctagcctcgccacctcagctgtaagcgcctcctccttagccttcttctcttcttccagccaatggaagacagtccgaagaactcccatttcctcttgaaggctattcacttccaccaacagagtgccaaaattgtagcttcaagctggtcggaggcctcgaggtccttagtcaactcgactattttcctctcagcagtaaaacgtttcttattgacttcgcccagctccatccgaacagctccaagtaccaccctggtgtcatcagcatccttcctagccaagtccacccctgccctcatggtgttagacattttggaggcagtagatttagctcgggaataggtgtaagccaacatcaaaccagcctacacagagaaaaaactttaaagtctaaaccaagtaaagaagaattcaaggaaactatcaacaaacgcttaccctggtgaattccctcaaaactcctcccatcagcaactcaaggaagactcgttatcagcactggccagctgctcacttacctcaagaaccaaccggttcatgtaatgggcgagcatctctttgcctttc

SEQ ID NO: 67326 - DNA, 558 bp, Cannabis sativa
ttattatttttgctttctattatttattttatttaattgctttattttgcctcaatgtcattggctagaaggaaggttaatattttggtgctttcactgagagaaaaaaacataagcttttgtcttaaagtcttgacaagttaacaggatggttgtaactcgtgggggaattcaaactaatccagtcgcctcaatagtgacaaacctaagcgtacaaactcctagaaatcaatagatccaccaaggacaaaccccggataagttaatacacaaccaccgacgatgggccatggagtgacttcccctctgcttgggttcactctaggcatgtaagaaactgggaatacgagtacagcagccgaacaaatcactctcggcactgaaatcccatccaccacaaacactcaaaggccagttagagatgatactgagcttcagaacctgcaagctgtgctaggacttatgcaaggccacaataacatgttgcacaatgataagcaagatctccgaacagctatcaatatttcctttgatgagcaaagacatcaattcatagaa

SEQ ID NO: 67327 - DNA, 975 bp, Cannabis sativa
atgggaattaaacttttgaacatatagtaatgattatatttcactgtgctgacaacaccataatgatgaacaaaatatatatatttatgtattttctggacttaatagaatttataccttaaatataatcatgaaataaatattttgaaccatgcaatataaaaacaatttctgatcttttattaattagaaaatatgattatattaaagtgggttttatttacggtgcaaaacccaacaccatagacttcggaataagagcttgcaactaattgatccacatatgtgtacatggagagaataactactttcatccatctcgccatttatacgtagaagtaaccaccttgctaataccatcgtaggaaaagagtattgcgaggagaattgtatctatacttagtattttttcctacaaagacggaaaagaaggacaacttgtacttagtgagaaacaacctccatagtcagcataaccgtttaaggataaagataaaagagtagttgcgtagttattaaatattatcccatgtacataaaaatgaaacgtggggaatgttcacgtttcatgagtagttatgaatgattagatcctaaagaaaataaatatcaccctatacaactataaataggggaagaatctagggtaaaagggatgacaaatttaatagaaaaagttatctattatattgattgagagaattatactatgtatcaagattatcattcctaataagatggacacattgattatgtagattttaactacaaaaccacgttaaaatatttgctgttcatttattattatcattaattctgtagtatatttattacgtaaaaggttcatatattaagttaacaaaaatgtgcgttaacaataagtataatacataataagcttagttgcctagtttataataaataattattgattagatctcattaatctcttatttaacttggattaaataatta

SEQ ID NO: 67328 - DNA, 796 bp, Cannabis sativa
  modified_base (77)..(106): a, c, t, g, unknown or other
ttattttattatatataaataatagtttattattttattaaatataaataaaattcacccatgaatttctcataaannnnnnnnnnnnnnnnnnnnnnnnnnnnnntatagaatagatatatatattttgaaagcaactatcaaaaatacaatttgtacatatacattttcaaaaaaattaatttttggtcccataaaattaataatttctttatttatacccctatatatttttattttatctcaaaatttatattttctcatgtttatcccatatttttgtaaagtgcaagacacctcaacaatggtgttttgcaccttacaaatcaaatcacttgagagagatatgatgatcaagcacatacattctctataacaaccctcctcactcattacaaacgtaataatcatctaaatttctctctagatcatcacctaagaagtaatacataaatccttatatagaaaactcaatatgagagatacccgagttagttaattgaaatttaactacctcgaaagctgactgcacaaacctgctccatctggcagttcactagatgtgactagcagtagcagtacaccaagttactaaaatctccaacaatattttagtcatttggcaaaagatatccttgtattcctttaaagctttgaccattccatctgttgtgcctctgaaaatagaggaattttagtgctcttcaatgttcagcaagtttaggcaatgcctaaacttttctcttactacactcttcgtgaacatatcagttgaattctaggtgtgaatcttctt

SEQ ID NO: 67329 - DNA, 867 bp, Cannabis sativa
  modified_base (292)..(294): a, c, t, g, unknown or other
gacaattaatactaattaacattataccatacaacttgccttaccatgaaataatacaaaatccaaattccaccacatcacatgatatgatatctattacgtatacatatataatattagttaatatatattatctatcttaacaaaatattagtatcaacaaaagatacgttgattgcaaaccatatatttgttgttgatactaaaattcctacctgggtctacttttattcaaattaaattaagtaatggacttcaaacttttattttttattttttatatataaatatnnntatatatatatatatatttaagaacactcaatttctctagctttattttttataatacattattattttgtttatatatatcaattttaattttattcaacaatataataataatgatattgaataataaacagcaaagtatttttaaaaaagttgttattaactactaatattatggacacactagccatagtaaagtaatgatgtggattttatatatatatatatgtatatattaaaacaaagtaccatatctcattaaatcaaatcaaaggagaatatcaaaccaatctactttcatcccgagtcgccttattactgataatattatgagagcgtttgaggtcatgcactatctcaaaaaaaagcgtaaaggcaaagaaagctagatgacgctcaaactggatcttagtaaagcttataatcgtgtggagtgggattttcttcgagctataatgagtaaaataggatttgatgtgtgtttcattgatcttgttattgctacggttagctctctgaggtataaaataattcatggcggacatgagctgggtccgattgttcctgagaggg

SEQ ID NO: 67330 - DNA, 1085 bp, Cannabis sativa
caaagaacaccagaagttaatatattagtgttcaattttcgatactctactgattctctttcatttcgattatctttactttcttaattttctcaggggacacgaaacaaacagttcgtgaagttaaatatcggaccagagtaaatttaaaagcagagagaaatcaatgttagcacaatgatcttaattttctcgcatattctcggtaaccaaacagcttccaatgagcttacttaacaatcattaagtctgtaaaatcagagcgcataaactcgaaaaatcttctcataataaacgaagttttagaaaatcaaatccatctaagaaacagcattacctcatcatgtcaatttcaagtgaaatcaatatcaacacagtgatcttaacatttcattttccgcaatcaaatttctgttttctcgcattttctcggtaaccgaacttagacactcgtaatgtatataaacaaagtgtgagcagaaaatcaaattcatgtaagaagcagagcagcgttacctctccatctagactgagctcggaaatcggagacaaatccaaagtttcgatggagctctgttcagaaacgaggtcaaaagcctgaaattcagcatccaaattcttggcagtgttctgagcaaaaaaagagaagtagaattattagataggaaattgaagattgaaggaatgagataagagtaatggttttgggattagcgtggtttggtaaccttcttgaatttgggaatggcggaagcggagagaggcttggaattggatcgcacagcattttgcatttctctcattttggcgggaaaagaattttacagatacgcctttggggccttcggggtcggaatttatatacgccatcactttacgttgacatatatttgatatatttgtaagttttttgcattttttttttggaaaattttagaaaaaaatcaaaaaaatatatggaaaaaacataattaattacttatttgactgatattttccattccttggggtctcatggtgatggttaattattttactgatattttccattctttggggtctcatggtgatgatattcttgataa

SEQ ID NO: 67331 - DNA, 913 bp, Cannabis sativa
  modified_base (28)..(42): a, c, t, g, unknown or other
agtgttactctttaaaattacttgaggnnnnnnnnnnnnnnnttaaccagaatttatctagaaatatacatgatatagtgcaaactcacctctttaaaattttccgaaatttttttcaaagtttttgatcaaacctttctgacgagaaagggatcaaactattatatctctttgattagaaaactttctgacaagaaaggaaaatcaaaagttataaattagatataactcataacttttgtgtgaagttgaatattaacaggtcgcactgtatggaaaagtattaaacgaggcatcaatatgtcttgataaaagtacttaaacattgtgtatgaatagataatctaactattcatgaaagcaatcaaaaatatacaaagtgataagatcattaaaagtatattcaagtttgcttgaaacagattataactgttattgcgaggcagaattgataaactgctcgtgcgtatagtagtctagtaactactcaatattaaaggaatatacgagcaatggaaatttcctaaagtactttgtatgagatcagatatgattgtttaaatttcaagcaaacaattatgtattaaagttcaaacataaaagtacaaggcattaaataaagataagaaccaggttagtcgtccaacctggaaaatttgtctttacacacaaaaaaaaggtgccacaaggggcaaacaattgtcttggtcctagggccattttcttacataaaagataaataaaaaccaagcctacattgtaggagacttggatggatctttttcttctaccgcctcggcctcttcctcctccttcctagtcttctcgtaataagcaaaaatttcctcctcgtcttcctccaagaagcttctgtccatgtctggatttcccatcaaggctcgataaatggtac

SEQ ID NO: 67332 - DNA, 604 bp, Cannabis sativa
aactattgtaatttattgattcccaatttttagggtatagttaagaattttagtctgtcattattatttgattttatttcccttttaagagatcctggtacatgttaaatacatggttttgtatgagaaataatatataagaaattaccttctttgttgacttggtattagagctgacgcacaaccctaaaccctaatcgtagcttgcctttctctaattccattccaccatgtctgatagcagcgagtcaaacaccacaaaaatcaatccctctgttaccactattgttccaaccaaatctaccactgttgaatcccactcgtccaaattactactattcgcttgaatggtgacaactttctgagatggtatcaatcggttaagatgtatatgagaggtcgaggacagatggggtatttgaatggtgagaagaaggctccagcaaaggtagatccaacctacaacacttaggatcctgaaaattctataattatggcatgccttattaattccatggaggatatcaactcgaattatatgtgctatcctacagcaaaggaactatgagacaatgttatcgagatgtattttgatctcaaaaac

SEQ ID NO: 67333 - DNA, 2000 bp, Cannabis sativa
atccaagccttgcgtagttcaattgaaatgatttccatgtttggtcaagtggttaatgattgtaaggcgttatttaaaaaacttaaaaatattatcttttttattaggcgatcagctaataaagtggctcataagtttgctagagcttctttattctatcttgattgcaatttcaatttggggtctgtcccagttgatttattaccttctttggtagctgaatttaatggttaataaaatgacgattttccattcaaaaaattagaaataaataaaaattaacaaatatatataaaacaatattaaacgtattttattaataaaataaacaaacaaatatttattataataccaattctaaattttaaatgcatcaatattaataatcatacacaacaaaaacaactattcccttaaattttttcttaaattttcatactcaatcataccctcacaaattcactttttttcttcctaaaaagaaaaaagaaataatttgtattaattgtttaacattttaatgtaaaaataaaagtaaactaacattttttgattaaaaaaagtcgttgaaatgaaaaaaaaaaaaaaaaaaaagagttattgtacctgaaaatatggaatcttcttccttctagtgatgctgaaggagatgggtgttctccttacctgaaaaaaagagagttattgtaccaacaaagaaaaaaaaaaagaagaaaaagaagaagaaaatctaagactgagagaatgttagggttaaaggtctgatgataatgtgttatggcttgagactaaaaatagtagctttatttattttacctaaagctttttatctcagtttttaaccaaaaaactgagatatataaaaggtccgtcctaaacaaattaaaaggttttggttaaacccttttatcttgatttttagcaaaaaattaggataaaagagtttaactaaaacttgtttgggtcccgctattgttttatcctactttaagggagaaaaagagatttttaactaatcagccaaataagacccttgatatatacatttataatttagagtctgtttgactggtcaataaaatttcaatcttgaactcattttttactatcgattttttttttaatgttcaaccaacaggacccttgtctaaaaaatattatatgttgtttttgaggtgctaagtctaaaagtgggataaaagattgcaacatatattttatcccactttttacttttgttaaggataaaaataaaagtatcatttcttgttaacacccaagttgatattccgggctagggttttaatttttaaatacgtcttagtacaaattgttcaaatttgcacttatatatgtgtaagacttatcacaacatgctaggcaccaaaattagaatcataacacttcctatttgaggtacttcggcacccgttgcccaggtcaacctgatgatgcacccagcgcccctctcaacctggggcgcttccaactgcttttgtgaagatgtttctcaaacattttttttgtcttcattcaaaatgaggaaacaagtgttttcaaaaaaaaaaaaacagatcaacttagaggccactattagcgcctaagttaacatatttccaacaacgattctgacgaagtcttttgggcatattattgaaattaaaaaatgagtgtgttcgggaagcaaatggagccatcaagtgactagaattaagactaattaaaatttataaatacaattaattaataaaaaagaaataaagatattattgtgggttcgtttttagactaggaagtgtgtgcccaaaggtccaacatatatataaatgagagttcttcgatcgagtagtgaacagtattatctataacacttcttataaatatatatataatatttccaccgaaacatactgatcacaataaattaatttataattttaataaactttttcataaatgtgtatctctgcaactgcatacgtacttacccttagcttttt

SEQ ID NO: 67334 - DNA, 849 bp, Cannabis sativa
agaagatagagagagagagagaaataagcgggagttagggttatggttagaggttttaaacctgtggttttatatgtaataataacactatagagcaccctcttatttgtcaatattaagtatcgggtgccatataatttaatataatagtttttataaagtatcgttaaccaatcacaacgtgtcgcaaaggtgttaggcaccactagtacctaatagcaatgcttaagaatattacttctattcaacatctattgaatattgtattggaaaaaaaaaaacaagatgctctagtaagattatgagtaatcatgttaacagatcgtttaataaaaaataaaaaaatattatttgaagatacaagaagtttacgacaatcttctataataactcgaaacgaaaaaaaacataggtaataaatttcgaatacgttcgactgctatcaagcaatttgacttcaacaccactttttgacatgctaaatttggagtgcctataccaaaaaaaaaatgccgacttatgtatgacaccaaggagagtgctacgatccagtagtgtattttagcaattctcgtaataataataggtaaatactattttggatcttgtgttttgcaaaagttatagattggaccctctgttttattaaatgacaaaatagacattgtattttccaaaatggtaaaaataggaccctgagcttaattttcgacaacttttttttaatataaccaacttgaagacaattcctaatacgaatagatacagaaaatgtaagcagttttgtgatttaaaaccttatatttcgacatgatttaaaatgtaagcaccttttatttgttttgacat

SEQ ID NO: 67335 - DNA, 654 bp, Cannabis sativa
aaggcatatgacaagatggaatggtctttcataaagagagttcttgaggcaaatggttttgatgagaaatgttgtaggttaatcttgagttgcatatgtggagtctcctactctgttctcctcaacggaagtccgcttaaaaagttctctcctcaacgtggtctccgtcaaggcgatccattgtccccatttattttccttctatgtcaagaagttctttcaaagattcttcttagggaggaaaacagaggaaagattcatgggatcaagatctcaaggaatgcccccccgataactcatttgatgtttgctgacgataccattctcttctgtcgagcaaatgaaggagaggctaaggaaatgttaaactatctggccaggtacgaatcttggtctggccaagtatgcagcaaaccaaaatctaatgttcttttctccaggaacttacacagccacaagaaagaagccatcctaaattgcttagatatcaatcaagctagtggggatgaaagatatttgggaaatcctttcatttttaaaagaagaagaaaagatgattattcaaggttgaaagagagtctcatgcgaagattagaaggatggaagacaaaatttctctcatactcgggtagactggttttgatcaagtccatt

SEQ ID NO: 67336 - DNA, 862 bp, Cannabis sativa
tgtttgggccgagatgatcccattttgattcgaggtgacggaggcataaggacccccattttgtctgaggtgatggaggcatgaggcccctttttgggctgagattatgatgagccgagatgacacgatggtgaggctccacttttggtctaagatgatatgttgaaatccttagggctaagatgatgcatgttgatgcttctagggccaaggtgatgtatattaaggcctccatgaccaaggtgatgcatgttgagacccctagggccgaggtgattgccatgcttcgacctctctaagtaaaacgtgtacaactttctcataaaaacttcaaatgagttgattcaaaatgcattttaaaagaagagaaaaatatctgaaacttttatgcgttgacgctttccaaaatttgaacaaaacatggtcatatttaggtttgaagtttggtctgaggtgatgaggaagtgttgtgaggagatgcctcctttttggtcctaggtgaggagatgcttcttcttttggtccaagatgaggagatgcctcttttttatcattgtctttgttatttttgtaaaattagggtataacattttctcctaaaagtatgcttataacacaatgagtaatacttttgaatttcttctaagaattgcaaaatagatttagaataaccctccaattttgacttcatggacttggagaaaatatgatgaagttgatatagatggtgatgaacatttgaaatatagagccttgatctaaataaatttgaggtttgggataaaaaagtgttggtggggttataagcttaggaaaccccattagggccgagcttatcttctcttccttttttttttttttt

SEQ ID NO: 67337 - DNA, 1136 bp, Cannabis sativa
tatatgcagtggcaaatttaagatttaaaataaggaggcataatttttttttttctgtaagacattggtaaaagtaaacttaaaaagaaaaataaaagtgttcttggtagaatttgaactcttgacatctatcatatatatatatatgcaatctagctttcacaattacactaaaactaatattatatctataaataacatattttattacaaatatatgtcataactaaagtccatttacattaatttcttcctatctttttcagagagcaattgtcattttgcttctatgtaggttccactataaatatgtgacatcttaaggtgtatcttaacatttctttttattatatatataattatacttatcaaaattaaaatgttccaataaaattatttacgtagaactaatgcctttaaaatttatgcattacttgtacatttaaattcactctctctaaccaatttatttgaactcaatttcaagcatatgagtgataaacaaaaacactgatgacctttttaatgaatgattcaataaaaatgaataaaataagtcttattatatcaatacggaaaagcaaactaattattaaaagctttcttagatgtttttgcttgaagcataagctttccatttcgagtgatttgccatttaattaaaagctccattacattaacacacttatctattattcttgttaaccacaaaatgtgtacgtaggaatgtcctttcacaacatatattatacgtacaagctcaacaaaatatccattacatatactcaagtttaaactccctaactcttatggttatgatcaactaaaaaatcaataccaatttttctagtatatcaatctaataagtagtactccttagcaggatcgagctgagttaaggcgggttaaacccacgcttagatcccaccaactcaaagccccataaaaatatcatgtatttctttcattagaacccaatattatattttttgttctataacccacaaatttacttcatatataagattatcgtactttatatctaaatctctttgttgaccgagattttcggcaactaataaaatatgaatataataatgagctgtaagaaagcgagatgaagactttttacgtgg

SEQ ID NO: 67338 - DNA, 850 bp, Cannabis sativa
cttaggcaattttttctattcttcaagaatttccaatagaattaggactttgcattcccttgttcttgtgtagggaaattttgaaaattaagcactcaaagaaaaagaggaaaaacttatcatttttcactcatcttttatccttttctttaagaacttgcaattttcatgcatttcttgtggaactaagattaattcgattcaaatcttaattttattatgaaatactattctaaaattagaggagaaaagaagaagagaaaagatctttaatttttttcttatcatttatctttttctttttaaatctctaatttttccttaatcttagtagccttaggaatcaatgttaactttcgaaaaatcttatttctatttctataggaatttcgaattcatgttgaaaggagaatagaaaagatatatttttatctttttcttatcatttaccttttcctatgaggatttgaatatagaagactcccattgatctaggattaggagatcaaactcatctataattaagagaggctttaataaaattttaactcttcctctttgaatctctcacactcaagactttgaaaaggtccttgaaatttcatcttcatcaagccttcaattgctcttcacccttcaaggtagaaaaaatatatttttttctttctttattcagcaacacttttttttcaaattttttttcttcttctcctcatttgatgagcttgcttcaaggattctaaaactcctaaacaaccattgaattcttaattccatggcctccaaaattcaaatacaatatccttgtgagttaaaaaatttcttccttttcaaattgcttgaacttctc

SEQ ID NO: 67339 - DNA, 520 bp, Cannabis sativa
acatggcactttactggtttttatggttctccttatattgattctagagttttcacttggaccctcctaaatcgcttatatgacactgctcctcttttgccttggctggttattggtgattttaacgactatttatctataaatgattgtaattccacttcttctcctccctcccatgctatgcatcattttcataattttttgcacactcgaaacatgacccctctttctcactcgggaaataagttcacttggcgccatggtacaatttttgagcgtcttgactggtgcactatttcctcctcttggaacagccttttcccccacgcttccctcactcatttggggttttatggatctgaccatcgagccttaaaactccaatttgaggacactgcttccaagtatcacaaacattctcgctttcacctggaaaattttcttattaatgacccttcttttcctgctctgctccgggattcctggtgccttcctccctcgtcatctccttcccctttac

SEQ ID NO: 67340 - DNA, 1428 bp, Cannabis sativa
  modified_base (1363)..(1366): a, c, t, g, unknown or other
acagctattggccattagcgaggggaatctgccgatgatggacgaacactaataattggacgctattaatggttattagcaggagatttgagtttgccgctaataaccaccaatagcagtgggtaatagcaacagatgcccaccgctaatgatgtatgttagtttcgttaatcaaaattgacacacattattagcagcaagcatccgccgctagtaattaaatatttcaaaatatatttaaaaatgaaatctattaaatataaatataaaaattaataataaattataaacaatataattatattagtaataaattatataaaaattaaatttaatttaattaattttaaatattataatttaccactaaatgataaatacaatattcattactattataatgtctcaaattaaactaaataaataaaatatactttatatttgtagtgtttaaattattaacaaatataaactaattattccataaaatcatcattaaggtcttgaagaaaaaagtcttaatacgcattattattattgggaggtcccgctagctagctgtggcggagaaggaacatatggttgatctgacgataaaccaagtgtaagtttctctaattgagcttgattgagtattggggtcaaaaaatttattactcctgcaaagaacatgcaaatattctaaaatttgagtttagggtttagggtttgaggagactacaaaggggttccatatacgaactggtttccctgttgcggactagactattattgctgctacggagaatgtcggtgttgatgtgttgtggaggagtggcataactctaagaagacaaactaccaagattttacgattgactgtacatttgaataaagttatcaaactgtgagtaatataaattggcaaattatttagctatcagactactccttaatgtgtcaagtatagttataaacatgtctgccacagtgatacattttattagggggcagaagaggcgcaactgactgactttgattgtattattttttttcttcccctttgatcttataacccacacctctttgatagtcaagtctttcaccaagaacttttctaagtacgtcgaattgaaaactactatcagattcaatatcagatgtatcactctgagattatcttttgagtcgtttcctatcaagctccctacacagttctccctatctaattaaaaatcattataacatataattaatataatattttatttacttacaaaatcttctgcattgacttcgttgacaaaactactagacagtttttttgtatgagccaccctccaaacatcgactatgttggattaaaaatcctatgtgggcacannnntataatgtatatgctattataaagtgtgatacaaaattaagtgaccaattatgttatgggta

SEQ ID NO: 67341 - DNA, 843 bp, Cannabis sativa
attaatatattttagtgtctcaagattagttttggagtgaatttgctttaattttgacttggtctgtgtatataagttgagagtgatgttgatgcttttaaatagttatttggattgattattgaattttaaaatagccagataattaatatttataatgataattcattaagtacataaacaaataaatatttaataatataatatattttatttgtaacaacactccatgtaaggttctatggtgtagtggttagcactctggactttgaatccagcgacctgggttcgactcccggtaggacctttatttattctaatttttgtttaataacatttgctgtcgaaatagtttatgagtttctggaaaatattttcttgactaaaaaattaatacatttttattttctaatatttcattactttaatttccattctctcgattaaatttaagactccctcttcaaactagatttggcctatctatttatctatgtataatagtttttatttttatttttgttgattgaataatttatatggaatttagcattaacccacaagtagggatagcaatctcaatcagacacaatagcacaattcaaaattcgtatgaaataaatgagtttaagtttactttaaatgagtttatgttatttttaagttgacacggttaacttgtttattaaacgggtcattttcgagttgacacattaatctaaaaaaatatgataatgatttatataagagtatatatacctcttaaatttattatatttattacatagaaattatatttttttagttaataaaatatagcataaacatgttaaattgcctata

SEQ ID NO: 67342 - DNA, 901 bp, Cannabis sativa
acttaatcttgcataacttgttatcgaattttgcctatgcgattaatttctacaacttggtgtgatgaaaattttctaagtataaatatgcaaaaattttcaaaaattttgaaaactagggaattcattagatattcaatagtataatatatggttacaccccttatacttaggaaatttaagattatctaataacctgttgtattttaatgttacaatattactatgtttaatgttaataatatgcatgtatttattttttttaaagaaagttgtaacttcattagattacaaagaagttctcttacaacattacatttcttaaatattacattgcagattctctctttatcaaccctactacattcttagatacattatgtgtcatattatttacattcctatttacataataaagagaagcattagggaaatataataaagtaaacttaatacattcaataatatcagaaagaggtgaataattcttgcaatctatattaattctatttgccataccttttgtgtctgtttcaacacaagcaattggcaaatttataccagtccagaaaattcttcaacgtcaatgctccagcaatgtaggaattatagacatgaggaataggaatagcatagttagcaataatgtttccttgataattttaaccacaactcctactgcaattttttatttcctttcaacaatagagatcggtcaatgttataagtcaggtaaatgtgcatgtggggattacttagttatttttggtttttaataacctattaggtagtgtttgtttgggaggaataaaaatataggaatatgaatgagaatgggaattggaattggtatagggatggaatagaataaatttaaaatgcataaaaaaattattaaatt

SEQ ID NO: 67343 - DNA, 2240 bp, Cannabis sativa
aataatattttattattttattgaatataaataaaaagtcaccatgaatttctcataaaccaagaaatttagttatataggcacactttatatagaatagatatatccatacaacaagttacctatttattttgtatttttaaacaaaaaaattaataatttattgtatttaacgattaatcattagattaaaatctaaaggtaagtaattttgatcacactactatacgaggaccttacataaattatacatccgtcatttatatatcaattaattacattgaaagaaaaaataaactagaaatatacatataacaatagattgaatttttttctttcatactataccaaaaaataaaatttaaatatcaatccaaattaaactaaaaaaatgaaacaataacctcaaaaaaaaaatcgtgttttatataaaatttcctaacaataacgttgaaattgtgactagtgaaacaagaaaaaaaaattataataattagattgtacagtagtctaggcataggtatcacatagtaagtagatcctatcatgtaaaactttatgatttgtttacaaaatatacgatcaatttgaaccattttggttaggtgttttctattaattttatctagttggtgaaggaatgcagagaaggaaaaagtgcagatgaaacgatgatgaagaagataccatattttacaagaggagagcatagacatgcgagtagcataccatctttatcttattctacagtacagactatgacatttaactgtcatctaccacttgctacttccattcaacaaaaactacaatgttaactaaaataattgtccttaacttcttactaaaataaaaatatatataaaaagaaaattaaaaataataatgaaaattcaaaacttcagtgctggggagtaagagaaggaaatgatggaatggagtgtaatatcaacttccggccaggcctccggccaggtgatccaaagtggcaatgaggagaagagaccctcttactgttgggagaagaagttttgacagcactattaggagagccatcccccacaagaatttctggcatttcttcatctggaatagtctgcacatgtttctccaatttcggttgagaagatcggagaatacttggtttaccatgcatctgactgtacaatccagaagaggaggatgtcccagtaactagggaggatcttggcggtttgcctttcgatgagaatggtagttgaaccaaagatctgcggcattaagaataacaattaagcatctcataacacacaatatcaactgattcagctaataataaaaagaaaacatagatctgacctggatatccttaatggtgtaattggatgagaagagcctggatttggatcttcattgttatgaatttccatcttctgtacaggtgcaaccaaactcttttcacatgcttctgcttcttcttcatcttgttcttctgaacctgtcataagagaacctgtattttggaagaaattacaaccatggaaacatagttaagagctgagacgtgataatgagtatcttatcaaaccatgaatgatgtagaaactcaccatcctttctaccaaatgcattcttacacccttcacaccggcagctaatggagcagccgactccacccttcaaaagaaaaccatttatgaatcagattatatacaagaactaagaactgaaagcatacagaacatcctaaaggtagaaacctgatagcactcgcagtacttcttaaggcaactagatttcttgcagttgcatcctcttttatgtcgggctgaagctggggttttgcttgattcatcctgcaagtgaaagtaaaagtcagaatgtgttgaaacttggcagtgaggtagagtaaggcagactcattttctaaccccatagtcaggtgcaggatcagagcccctaattactttaggagcaaatgcaagtgggttgcgagactcaatctgttttcgagtagcaagaacagtatcttcgtgaataggtttgttgaagcattcttgacaagaacacggttctatgcagtacacaccagctgcaaagcattcacagtaactgcagtatgaataaaaaataattagttcagtctcattcttctatgatagtgatataccccaactacggtccttaaaacaatggcagacattagacaaaggtagagaataattgaagtataagaccatggaaagaaagaactgagtaaa

SEQ ID NO: 67344 - DNA, 941 bp, Cannabis sativa
  modified_base (316)..(340): a, c, t, g, unknown or other
aaaaaaaaaattgcaccagccgggaatcgaacccgggtctgtaccgtggcagggtactattctaccactagaccactggtgcaattttgttgtagtatctgaaattataaaacattaataaattatgtaaaaaatttaaatttgaaaataactttgataatgaatgaattaatttttatttattcaaatcgaaatgttacgtacgtttttacttgaaacatcttagctgactaaataaacagaaatattctttaattatgatcatcaataatattcttctatgacatggtgttacactattattattattattatnnnnnnnnnnnnnnnnnnnnnnnnnattattattattattatatatcttcaattttatctttatttatgtaatgtatgcatgttattctgccagtactagaaacagtattagaaaccaataactcgatcacactccaaattctttatgcagagacagagtattattattaatactgtgttcgtcgatctattacattgtatagtgtataggtatggttgtagccgttatacagttatagtagtggttttggagctcgatacaaaaaccatataaataaatccaaacgacaatagttcatagcatggaatatgtataaaacgacaatttgcttcaagacaataaaacagtcttatctgttttcctttgttcttttttttgcttagagacaacaaaatagtcttaatggtaagttagttttttgtacagggaatacatttatttagtatatgagtattgctcatcagtagtgcctaccaacaccttttatagaggtgtcgccttgagattatttaaccttatcttttaaaaattattacattaaaatatatagaactcgataacaatattacaccaataaccacattatacattggaggctagacggtgtcttttagcatttatcacc

SEQ ID NO: 67345 - DNA, 1048 bp, Cannabis sativa
ggcgttaatgacaaaagccataaggcttgttcgagtactgccaatccaaattgtccaattatcgaaatcaagagaccacactttataacctagccaattaaacaacaaattcaccaatttttagagagactacacttgaaaaacaaatgagtgaggatgactttcaatttccatatcacaaactaggcaaaagaaagctctcaattagagtatgaaacctgggaaggatctcgtgtaagcaagtgagaattaagtcttaacagcctaccaaaccataaatatatgcttcgaaatgctcattctacactagacagcgttctggtaagtcacttgggtttgctgcaataaactattgtaaagcttagaagctttaaacttaccattccttctccagtagcttgaatacaattcttgctgaatgtttgcctcaagtaacataatttcctccaatatcagtttgtattttgttaagtcatagctccaaaatttagaacctttgagatatattgaatcaaaccacttgacccataacagatcatgtttttccattatcgactatacatacttagcaagaatagctttgttccacttaagtccttcctgaaaacccccaccataagcctttggaagataaattttctcccatacttaaattttatttttgacactataaagtgttgggattttatgccctaagtaaaacttatttcaatataatcttgtttactaattaattattcatgagtggcaccacactgattgtgaagtgccttccagatatcacaggcgtagacaaaagtctcatatctttccctaatctcttcattgaataaaatcagcaagatatagtttgcacgtcaattattttcttgccttgtgcaaaggcattcctagttgcatgacctgattattcacatacttctagccatagatcttgttcggctactaattcatataaaatctctttgagaagtagaagttcaatgtctgctctccagtcagatgtgaaatcaccatcaaatatagttaccatattgtagggataatt

SEQ ID NO: 67346 - DNA, 1060 bp, Cannabis sativa
aaaaaaaaaaaaaaaaaaaaagagttgtagaatagtgatagagagagaagaaagaaattaatgtgatatattaagagagagaaatggagtagaatcccaaaagttgatttgattatattattatattttaatattttaacttattataaaataataaaatctaatactattttcaaattttataatatatttaatttattttcaaattttataatatatttaatttattttattgtaaaagtaaaagaataaagttgacaattactacttttatgatttttgagagggggtatatacatattgtgtgttaattgtatttattatttaatttttaataaataattagataggagttaaaaaatcacatgaggcaattgccaattgcctgtaggttcgcatgtgatgataaagatctttgtatgaaataaaaatatgtaaataaattattgttatttaaaaagcatgtatgattgtctatgcaatataaattcgtaaattatatgttgtaatagactcttgaaaagtcttttattatattataaatgattgaagaacaattttttttgtttgttgagaaatattaaatgtatatagtttattcataagtagagaagtcctgaaatacttcatatgtaagaattatagatgtatgatcatttgatatgaaaattatgattatacaataaaaatataacaaatatatggttttggagtactatcattatcataaatgaatatttatgttatcattaatgtgttatgttcatattacttacaattttaaacttcgatatgaacaacattgtatataaatacacatgaatgattaataagttagataaatattgatgttacaagaaccctttattcataatttaatagtgttcacatacactctagaagagaatagttaaatatatggtcatagataatataccgtgatattttaaaagtgataacaataatcttattatatatattatcaccaaaactattatagatcatatgtgcatgaaggggagttatattcatgttgcattctttttcccttagttcaggt

SEQ ID NO: 67347 - DNA, 1124 bp, Cannabis sativa
caagaattctggatagagctcaagataatggagaaattcacggcataaagatctcaagaaatgcccatgccgtgtctcatttaatgtttgcggatgacactctcctattcaccagagctaatacggttgaagctggaaacatcggcgtgtgtttgaagaagtttgaggactggtcgggtcaattatgcagcaaacagaaatcgggcatactattctctagaaactgtgttaaatctcttcgggagaatatcgaaaagaagatgggtattagtactatcaatgaagccgaaaaatacttgggcaacccttttattttttcgagaaagaagaagaaggatttcgagttcttaaggacaaagcttatgcaacgtttggaagggtcgaaaatgcgctctctatcctttgcggggagaatggttgctgtaaaagccattgcttcagccattccctcgtattcgatgtccacctatcaactccctatcacttcttgtcgagagcttgatgttattatcagaaaattttggtggagtgggaggttggataagcagagatttctggcgactgtttcttgggactcactgtgtcggcctaaggtctcgggaggcctgggttttagacgaatggaagataccaatcaagcctttttggccaagttcgcctggtgtattgcttcgggtatttcacgaccgtggactgatgctttcaaagcaaaatatttccctcgggattcgttttggtctgtcaaaaggaaaaattcagattcttttgtgtggaaagggattctcaatgctaggcaagtgattatgaaaggatcttgtacggtgatagcttccggggcctcgattgatatttggcatcaaccttggatcccttggctaaactatgaagagttcagagatcttatggagtcaattcgagacaaagcactaggtttgaggacagtggcagatttactaattaacagaacggggcaatggaattctaactatctctgctttctctttggagccgaggtaggaaagaaaatcagcaccattcaattagccactgagattagtgatgatcttctcatatggaaagaggccaataatggtatgttttctgttaaacaagcttatatggtg

SEQ ID NO: 67348 - DNA, 714 bp, Cannabis sativa
aaattggttgatatattaaattttgtttaaaatgaaagtttgattatttttgttaactaatacataaaaaagaaacttaaaaattatatttttcaaatcatttgtttttgtagcagcaaaaaaatatatgcttcccacgtactaaaatgattatcataaaaaatagattataatagtacaatttttgagtcaaaattataaatagtgtggctgaacaaactttttaaatttttttataagaaaaaaagaagtataatgtaatgctaaataattattattgtagtaaaaaaatattttttaaacttataaaagaaatagagagtatttttttaatatttaatattaaaaatatataggtataaagttgaaaaaaaaaagttttgaaaagaatagtaacacgtagtcatttcactattgaaaatataagaaaaaaaatacatctttttatattgaaaaagacaacaaaaaatggaaaagaaatctaaaaaaggtgattagtaagttttgtatttaagaaaaacaaaccaaaataacttaaaaaagaaaaaaaaaaagaaaaaaaaaaaagaaatcatgtcgttagagattcaatagtattgtattaataataataggctaattaataatttttccttcaaaattttgacatataccaaatcatgctccttgaacttttttggccgctaaaaattccccctgaactattgagattgt

SEQ ID NO: 67349 - DNA, 577 bp, Cannabis sativa
ttcttgttcttcaggtttgctttctaaaaccccttttgctcattctgtgtttttttttctctgttcaattcagattgaatgctaataggtaaatttctctgtttggttactggttacttattttgtggttaaaaatgttaaaggctttgaaatgattctttagttgttaatgtttgaggaaacacttccaatagattgcatttttagatgtatagctttatgaattatttatgtcatgtttcaaataatcacttatatgaaaattacatgtgaagaattaagtgtgcattttgtaacaattatttagataattttttttactattaaaaatgaaaatattttcaaaaaatatgtatgaccaaacaaaacatttattttttaattttaaaaataagaatcaaaattttaaattttgaaaaaaaaaaaatactttcataatttatttaaataatttttaatcttattatgtactttgtttttaatcaatatttacttcattttctctcactttactttctctcctcaaacaataataataaaaaaaaagaattaccccatatactattttttaattttt

SEQ ID NO: 67350 - DNA, 749 bp, Cannabis sativa
aaattcttgtttggatcccacgccctcatgatcactggccgattgttgaagaaagtgtatccaccagacaaaatctcatcacggtctgcaatggaattgaatctgaccaagaaaatgccataggagattattcctaccttgtcaactctgtccttccacacccttctaacataaccatctaaaattgacattgggggattggccccaagcacataacatacaatagagggtgtccaatactcaacttcttcctgtatatcttcactagtaattttcactttttgttttgaggtggaaccagaaaaacgtgactctaagtttcgaattatgctaccagatctcagtacaggggggattacattcgtacctcttgcaacctcagctgctgagagttgctgagcctctcgaaattgcttcatttccaccagttgtgcgaaatcctgccttatactgtcccttcgtgcatccttttgccctttttgaatctcataatcatgcccagtaccctgttcctcgtcaccagtttcagaatcttccgagaagatgatcggttcaatccctaaaacctcatccatagacttggttttcttcacttccgaagaggatccaggcccacgctttttcttcttcttcgccggagtccttggcttgccctgcttcgtcgccctcgtcttcgccatagcaacagcttgaaaagctgagggaaagcttatgcggcaagggtattactggccaacattgcgacaaga

SEQ ID NO: 67351 - DNA, 731 bp, Cannabis sativa
  modified_base (180)..(190): a, c, t, g, unknown or other
  modified_base (216)..(217): a, c, t, g, unknown or other
tagattccgtatctatgattagtgcttccactcaattatactaccatgttcccaagatataagtattgggttgatccattcagtcaattttatcgaacaagttaaagagcacaaatagtacagttaagctagaacctaaccatatcaagattaatatctattgatctaagatcaactaannnnnnnnnnnttagaaagatataacagtaagtttannatatcttatccaagttcaatatcgatccagtctgatgtataccccatacattcgatactagtatactttatacaaatacattggaaatgtcataccacatatcaatgtgtaagtaaacttttatcgctgattatcacgtcagtgtaaatctaatgcactgataaatcatgagacttaaactttgaagatataaccacaattactttccattgtgatgacatcactataatcacgaataactacatgttctggatttatcaaaaaattgtatatgaaaccataaacatgaaaataacatgtaaacttaaatgatttctaatcttttattgatagaaaataagattacattgaaataggttttatttagggcataaaatcccaacatcttttccattgtcaatatcggtcaaatgtgatgtatacccaatacattcgatactagtatactttggtaatgccctagaaaggacattctacatattattgtgttagtaaactttatcgctaattatca

SEQ ID NO: 67352 - DNA, 563 bp, Cannabis sativa
ggaaattagacaaaggacaattattagagctgagagcagggcaacgccaagatttactaacagtagtaaagaaagaagggtcagtaagccaatgattttcaaacctaaatcttttatttctcgccctactcatgctatcatcaacaagaactaattttaaaaccctatgatccgatccataaaaactaaggtgatggagaatggcttggggatactggtgaagccacttgtcattggcaataccccagtccagccgttcataggttgaactgtgtttccaagtgaacttattacccacaatcattttagcaagtttataggacttcatagcgaaagggatggaatgagcttgaatccaaaagggagagtacctaagctggttaggcagaagggtattaaggccagctgggtttgcactagtgaaaagacagtgatcaaaattccatggctggccctcgatcactctcctcatgtcgccttcacatccaaactcagccataaacatcccattgccatactcagagaaggtaataggagtacgagtggtccaggcatttctcata

SEQ ID NO: 67353 - DNA, 675 bp, Cannabis sativa
tttttttttttatatatatttcctggtttgcaattcacgagaatggtgtaactccattcttaaaacactaagaaaccattttctagctaatatatattctataatacttctctactctctccctcaaaatgtttgaccaaaattttacttatattttacctcatacttctaaattacatcattagccttgctattataatatgtttacacttttaaatcttattcctctagcatagctaaccaccatattctagttgggccgaacttttgacacgaaataaaatcaacacgagctcaaaaagtatgagcacgacacgaaacaaaaaaaatataaacttagacacaatacaacatgaaaaatatgagctcaagaacgacacaacaagctcgaaaatataacacataaacacgaatagattagttcgaaaaacatgacacattaaaaaatctaataatatgataataataacagtgataaatatttatttatcaattaaaataatagtaatatttaaattatataattatatttttatatgattgtgtgtaacaattattaaaaaataatataaaagtaattaaaaatataaaatacaggtacattttagtatttagctcatcaattgttataaaaatataaaaatatggaaaacgaatttgagctcgtataagaaa

SEQ ID NO: 67354 - DNA, 3330 bp, Cannabis sativa
aaaaaaaaaaaaaaaatttgctatgatctatataggctatgatctatatagttccggattttttttttttttttttttttttttgattaatcttaaaataagcaattgatttagcaaaagccacaaagaacaatttaacggaaaaatattgtacgaggaaaggtggacttgaaactacgggggaacaaaagtctcttttctattcaatttttcttacaatcattattgagttcttcaaggtacaaaaatgggccccaaaaacctaggaaacctgtctttactttaatcttccaaaacttactcgcatacaagtttatattaagtgttgagtgtataaacctgagagaagcaaaatctttgagatgagtcaatggatctcatcatgttcagctattgtagatgataattatgaataaaagaaatcttctaccaaatagaagagaatctaaataactaactatagtatatgcccgaaaagaaacacttttagtgtcagcattcaattcgaacagcaccactctctgaagaaatgaacttaggctttcttactacttgctccaaacactgaatgacgtctccaacctgaaaatcatcccagtcccggatcacgagcccgcattcattccccttcttcactgtatcaacatcctgcttttctcgcttgagagatgtgcaggacccttcaaacaaaatttccccacttctcagaagccgcatgattgatgatctggttacataaccatccagcactcggcatccagcaattctcacatctgctcccttagccttgctccttcctttgagctcaaagatattcagcacctcagcctccccagcaacatgggtttcagaagttccaggggccttttctactatcaaatttccaacatcctccaaaaggcgataaattacacggtgcagaaatatctaatcaacagaaatgatacaaacacatgatcaaatatttatgatttatgtagaacaaattatttactccaacactagcagataactgtaactgacagcaatgaaatattagtaccttaatgctggcttgagtagcttccaacgttatagagctagctggacttttaacattgaaaccaactatgcaagcaccacatgcttttgccaagtctaaatctgactgagaaatagggccaacgcctacatgtactacattcacaaaaacctggagaatgaagatgaagaataagcaagtgcataatttaatctcaatgacaaaggaatcttcatatttgaaaacttaaagggcacacaggacatggtgttatgattatatcccatacctgaggactattcaggctccttaatgcatctgtaacagcctggacagtcccctgaacatctgcttttactattactggcatctcaacccacttaggtgcctcttctgatgaatcaggaatttctgctctcccctcactaatcttcataagcctatctttctcaaattttcttttcctcccagcactaagcattctagctcgctcctcacactccacaacgacaatatcatcgccagccattggcagtcccttcagtccttcaatttcaactggcattgcaggttttgccttctcagtcaacatcccggacatatctctaatagctctaatcctaccccactctgagcccacaaccacatgctggccacaaagcaaagtccccgctttcactatggcagtggccaatggaccccttcctctgtccagtcttgcctctaccacataagcttgagcaggtccatcaacacgggcttttagatccatcatctctgcctgaagaagaagacactcctccaagtcatctaatccagttttcttcgctgctgaaacttgaaccacctgaacatctccccccatatcctctagtagcaggccctctgaggctagctggagtttaactctctctgggtctgcagctggtttatcacacttattaatagcaacaacaattggtaccttggctgcctttgcatgggccacagcttcaagagtttgaggcatcaccccatcatcagcagctacaactagcacaactatatctgtgactgcagcacctcttgctctcattgcactaaatgctgcatgaccaggcgtgtcaaggaacgtaatggctgctcctgattgcatggccaccacaaaagcacctagatgctgagttatgcccccagcttccctagcagccacagaagtttgacgtaaagaatctaaaagagaagttttcccatggtcaacatgacccataacagtaacaactggaggccgaggaagaatttcttcaccttcagtagaatgaagcctcctcacattgatcccaacttcctgaaaaattaaaacacaagattccttaaggattaagtggcccacacaaaatttgcaataaataaatatctttcaacgtaatgaaaataaaacattagatcccaaataaccatccagaaccagctcaagtacactaggagcaatttggtcgtgcttaatgtagtacaatactacactgtggttcagcaagttaggcaaggataaacctactcaattaaataaccgttttttctgttttcaaaactacttataagatccccctccccaacacacgattaaaataagggtggtatgcaattctgtcactattatccgatttaaatgcccagaatgaataaaaagttatctttttaatagaatagactcagattttactcgctattaaccttaagagagtaataattgtgtcattgttatttatagaaaatgctatccaaaatgtataaaacaaactataaaaactgaatgagaacaagcatcctatttcataaaggaatatttgtattctgcatctttgacaatagaaaaagttttccacaaccctttatttacacacacccagcccagtgcagcttctcctctttcgattttgttccctgagcaacgagaaaaaaataactcctttgcaagtaacattccccatttatataggttttacctatgagatttacctggcacatgatattcaatgctaatttcaattttaagcacgtttgaggatatggtaatggtaaaactagaatcaccaaaatattaaaccatttttttagtacaaaagtttccagagctgaaagttaaaataccattgctaccagctccgctacatcaacgctgagtggatcaaactctgagtcaaccttttccccaacatttacaaggataccttgcagagtggataatgactctccagtacgcttggaaagctccagaattgtcatgccctcaaatatatctattgttttatccagcaaagctttggtgg

SEQ ID NO: 67355 - DNA, 1265 bp, Cannabis sativa
aatgaaatggaatggaaaggaatcgatttgcattccattcatttgttcggttgcattccactattgttggtagaatgattattccattttaaatttcattctatttttattctcattcccattcttattcctgtattacagattctcaaaacgtttcgttctaaagatccatgaggctgtccaaaatcaattttcattcaatttctttgtttagttgcattttcattctattctattcctattcctattcccgttcctattcttattcctgcacttttattcctcccaaccaaacgtaacctaagatcttagctataattgattggagtttgtgatcatgatcttgtactactttaatacaagtggctcataatgtgttctatttgctataatcacaaagacagaaaatccacatgactaactagagaggtctttgctcattcaaaaggaattgtgaatattttcaagttgaaagtataggtcacctgccactcctcaaagccttgcaagctctcagaatttaacttcttgaccgcgattacagtactgcttccgtttttacctgaggccttctcatcaagccaccctttgtagacttttccaaaaccaccttctccaagcactgtatctgctctgaagttttttgttgcagtcttcagttctgcaaaagagaatgtcctcaagtttggggagggaaggatctgcccattcgggtaattctcgtcatagctcaccacagagaacctgctattcctagagattgtacttcctccagaagatgtggtattactggttgtttgggataatcctgttcaataagaaaatcccacaaattttgatattccaagtccttagtaggataatatcagattactacaacaaaaaaaggtcaataaacagtcctaaaatcaaagtgttttgtaaattcaatgtggttattttgctactttaacatggcaaatttcccctaaaatcatgtcaaaaaaagcttaaaagatatcatttttttaagccaaatgcacacaaaaatacaatatcaaattcctttcaactagtcataggcaaatgttcaaaatcaaggaagctataacataaagaaaaattcaacaaaacccagatgaaaaaattgagcaaatcaatagaataaggtgaagaaacaagagaaaaatgattttttttacctgtggtgagataaccagtagtacttggtatagaagggttcttctcagattgagtagaacaccagcaatttcccatctttctct

SEQ ID NO: 67356 - DNA, 814 bp, Cannabis sativa
tgattgggactctcacccactcgtggagataaccattctttatgagttctcgatttcatccttcaagtaatctcatttattcatagtgtgtctgatgtcaccatggtactcacaccccttactaggatctcttttatgcttacctcccttgtacattgaagggggaatgttgtaatggattgtgttgcacgcggccttgtagacattctcttgagtgtggatcaaatttgtatattcagaatattaggcatcatatccttttctgcctttcttcaaagcttcactttcactttgagtatttccccttctcttgctccaggattggttcacacctgactttggaacttttgcttgttatttcatatggatctagtgagagtgacactgcatccagtctgtgccattccaaaactggagaaactcatttgtggaggctcataccctggggtagcgagttcgtagatgattggagttgtgtattgggttctgggaggtagaatagacaaaatcatgagttgttgtgtggaactattgaaattgattggggtttaagagccaccataaagactcaagtttaagcctcttctagactataaaacattggtccttgccaaaaagtctaataaagtgtcaaacttttgtctttgcatttcgttccaaaataaggatcatgtcgaagtccccgactgcaggcccactaacttcatgtcatcgttaactttcatcttggttgttacctccatcatccactagaaagaagctttgaggctctccctgacttaatgcttgatttggtcaacaagatgacctccat

SEQ ID NO: 67357 - DNA, 754 bp, Cannabis sativa
tagatccaaaacataggctaaaaatagcctaacaataatattgctaaaaaatacagaataaaacaactaaaaaatcaagatcctgtcagttaacatcgcacattaatcgcgtaatattgttaaaatcgcacaacctataccatatgccatacatcgcacaaacatcgcataatgtcgcctaaaagtcgctaaacatacccaaaaagtactaacctaggtgaaatttgcaaaatatcgcatataaatcgcataatgtcgcacaataatctaaagacccagaacctatacagactcgtattacgtcgcacaaaatcgcacatggaatcgcataaaatcgcacaataatctaaaaacccaaaaaacagctattgcttgaacccatattcttcccacagttttattgcacaatttatcccaaataacatacaaaatagcaactttcaattcaataccagattcaaccacaaatgtatgcattttaaaggagaaattcaaagaaaaattccaaaaaaactaacctggattgctgcgattggggttggtgggattcgagtgggtctgcttgttcactcgggtcgattgggttgagagggcgtccgttgatggggtcgattgaagtgggtctcgttgttcgctcgagaggttcgtccgagcgaggggtcgacagggccgtgtggttcgaatggaggggctgggttgattggggggtcgtctggttcgaatggaggggctggttcgagcttgctggttcaaa

SEQ ID NO: 67358 - DNA, 1522 bp, Cannabis sativa
atataatgtttacaataataagaataaagtttaaatattagtttaatgtgcataaaaaaaataaatagattgtttgaattttatttgacattatactttattcaaacttttcaaaattaagacaatatttactataactatgatataagtggttatataaaaataatttactttataatttttccatataaagaaaatagaaaatgtttgtcttcataataaattctaacactataaacaaatgtaattcgtaatttatatatgtgtataaattgattcaattataataattaaatgctaaatattaaatatttaattatgattatagaatgttatgttttaatctattaaattatattggttgttgaatctaaaatatatgtatgaaacacttatacataaaaaaaattatagtagagataattgttttgtcacagaacactaagtggatcattgattttattagagttagtctcacattgttaatgtataaaaataaattgtcatatataagaggaatgagctactcctctcattgcaaattgattttgagatggaaccctattcatcttattcttaaattctattatgatattagagccacttgtgatccattgtgagcccaaagtgtcaccggtctaaaaaagtcatttgtgatccgttatgagttaaagtgctgccggtccaaacagatactttcggtgtctctcctttaacctccatttgggacttttcggccaatttgtgccagtttctagtgttgggtctttgacttgtttcaaaatccacaaattttccgacgtgtacacccacaaattttccaatatttagccttgtggggttctttcaaatgttacgttcggccctgtggtctcctacaggtcgtttgtttagagttagtcccacattactaatgtgtgaaaataaattgtcatatataagaaaaatggactactcctcccattgtcaattaattttgagatagaattctattcatcttattctaaattctaataaatttatcataaaaaatgagttcatagttattcaaatgtactcgttttcactcgattatatattagtatattgttatctttgtttcaaactctactccacatactaaattgaaaggatccattaaaatgaaaagattttctcctgtgaagctggttttttttgtcttctttctctctttgttggcttgccatggcagcttcccaccaagccttcattgacgacatgcaggtccagtcctcctccacttactgtcgtaagcctgtgcatgaggtgtggcgctttgtctcgacgttttgatcacaacgttgggctgttattagagttaatcccacattgttaatatttataaataaaataccatatttaagattaataagttactcttcccattatcaattggtttcattatataaaaaaaagggctatttacaaaaatatgggaaaataaaaataagttttgatatatatggcataaaaacttaattacactaaatatgacattttt

SEQ ID NO: 67359 - DNA, 673 bp, Cannabis sativa
aatttttaattaggttaaactaatataattagcctaatacaattatttaaataaggcaaattaaccttcacaattggggtagttcatgtgagagatcggactgagttcagaatatcgtacctactattatgacctcctaataactctcacacaaaattcaaaagagaagaatttaacctttaaataaataattttttattaattaaataagcccaatactaattgagcctatcaaggtgatcattttatttttagcaacttaatccatttaattatcaaaagttaaataggctcctatatgcatctcagcccaatagcaaatatctaggctcacataaacattgatttggatgagtcctatcatgttacaaggttcatgacagagatgaaagaaaattgaaaaattacacgttacaaattatttaattaatttattgaccactaactatgattaatttggatcatatgatccatcaacaacttaatcatagccatttaaatcaattaaataataagtttattaaaaaaaattaaattaataaacaaacaaacatgtaacaattgtgaattgagatatttaataataaaaaaagtatcacgtatataacctttagatcaaaattttaagattggtaaaataactcaaaatatatttttcaaaattttaaatttg

SEQ ID NO: 67360 - DNA, 968 bp, Cannabis sativa
cccttttaagggggtgcattgtagaatcaccctaaaaataatttgttctttctcaaaaaaaaaaaattatttattaaaatatcatgataatttaaaaaatgaaacacttaaatttatttatttattaatttgaataaacactttaaataatacttatgttttttttttttttttttttgtgaataaacttagcaactttattaactagcaatcgttaataacaatagaacgcacttcgttagaacaattctccaattgaagcacacgaccaggagagaaacaagaatccctggctaaaacatgagccagcttgtttgcagatcgtttgacaaaacataactcaacattatttaaagataagagaagagtatgaacatcatgaactaatagaccaaaagaggatgacaaagtaatttgactatcagtttcaaaaatcaattgtccccacaatatcggtcaatccaacttaaagcttcttttatgccaataaattcatctatttcaggttgcacctgccattttggcataaagatccctgccatgttctacgttgcctccattcattgataactactcgacgccatggatactcgaacgaacccagaaccaagaaccagtaactaacgccagaaaccaataaatcaaaatcaatgagagaaactatagaaccatgtcaaaagacaagactaatgggaaaatctaattaatttcaacacatgaaactaaaaattctaaccccataaaacattaataggaattaacctaataacagtaaaataaaaataaaagaacaaaaaaataaaaccaactaataacagtaattggaatttaaaactaataacactaataacaagaaccaactaattagaatttaaaaacaaatcttccaaatcgactgaacccaatcgcatataacactaataacaagaaccaattaattggaatataatacttctcttcagtttgac

SEQ ID NO: 67361 - DNA, 800 bp, Cannabis sativa
gaattgatcaaatttttaaggaaaaacctcgacatttttgcttggtcgtatgaagatagtgggaatcgatccatgagtaatttcttgcgcccttaatatagatccaaacttccatccaatacaacataaatggaggctactggataaagagcaagcacaagcattgaaagatgaagttgaaaaactgcgcacaaataacttcatcatcgaggcattttaccttgtatgggtttctaatcctttattcgtacccaagccgaacaaaaagtgaagagtttgcatcaatttcactaacctcagtaaggcacgtccaaggaattttttttcacttccaaggatcgatcagcttgtggacgtcacagctagtcatgagatcctaagcttcatggatgcctattcaggttacaatcagatcgagatgtattaacctgacaaggaacacacaagtttcctaatagatgtaggcctgtattgttacaaggtgatgcccttcaggattaaaaatataagagaaacctaccaatgtcttgtcaataagatgtttaaggacctaatcggccataacatggaagtctacgtggacgacatgttagtcaagtctaaaaaggctaagggcacataaaggacctaaacgattgctttaaagtcctttgagaatacaacatgaagctcaaccccctcaattttggagtcaactgaggtcttaactgtaaccaagttcaagcattgcttgaacttgatcaaccttaaaagttagtatactaagattcctagaacaccaaccatgatggatgcattct

SEQ ID NO: 67362 - DNA, 1044 bp, Cannabis sativa
acccaaattcagtctactaaaattaaaacccgttttttaggttttaggtcgggtgagtttcgggtataaatatgcccttcaaaataataactattttacactcgtataaaataaaagaatctcgtgtacaataaactatcttaaatttattttcagcgtattaaatttgtccaaatctcttaaaattttcttaaataactacaacgtaaacaactataaaaaaatataataaacaattttctcagataatgaaagagataagaggtcaatcagtaatttttttttaaaggatgcattgcaaaaacatcttaaaccgtataaataatataaaggttttaggttttgagggcattttagcaaaataataatggctaattctttagtgcaatcctaatcctaaaaagggatgcagtttactttagatattgatatatagaaaagttataggcttaatttttttttttaatggaagaagctatagctttaatttttttatataatgatatttaatgtagctatttaggattcggtatttttttttttttttttttttttggaaattctcaattattttgagtgttaaaagttaaatttcatatagtttgttgttctgttttttatttctttttaataagttatttgaaatttgattcgataatctaaataatttaaaatggtagatatatttaatgagatattctagagaattatcaaacaaaaataataatactattgtagatatatttgttgaattacatattttagggagatttactaattttttttacaattatacgtttcatttttaacatttttaattttacaaatcatattgtctataaataatactttattagccttttcaaataattatactttttttttcttaactctaattatttctgtgcttgaaggaaaaaattcagatgaatcaattggtcacaacatttcgataaaaattaaaatcccataaaaatggatccccaaaaggagacttaccttatttctaagtccattacctcatgaataaaaatctttgtgaaa

SEQ ID NO: 67363 - DNA, 778 bp, Cannabis sativa
atttactaacaagtatttactaacaagtatgttatttaactgtatgttatttaactttatgttatttaacttcctgttatttaacttcctaaatttaacttcctaaatatgaacttcctaaatatgaacttctaaaacgatatgaaataaaaacatataaagtataagaaaccttacattctcatccaatgtatttaacctagtttacattctgtgagataactagccagaaactttgagagcttcttcctttactagttttgaattcacctctcttgttcttcataatttttcgagccaacagtgaaagagtatgtaaagaccactttattttaatataagaattagtagataattaggatttaatttgaaattagaattttaactatgatttgtgaatttatagtgatatatttgaattttaagtgtgttatttatgttatagatgaaattttatgtttttcatattttatgtccggtaaaagtggaacgcgacatttggccgttagagtcacatcttcatatggtttagtatcttaataatagcggggtaacttagatagacattgagaatgtttggaatattggtagttttagatttgaccaaaatgccctttggtggcaaagtcacttcttgttgaagaaaggggcaaaatggtcttttgctctaagttgatttttgtcctttagtgagtaagttattaattaggatatattaatctaattttaatgatattattaatgtaaacacttgagatttttattaattattcaaaaa

SEQ ID NO: 67364 - DNA, 1052 bp, Cannabis sativa
agtcgtgcaacagactctttaaaccatattttcgatgtgctgaatttcttaaaattttaccagaaatcttaaataactacaatgtatatgtccataaaaaaattggactaaatatttttttagataccaaaacaaataaaagtgcattgatgtattcattttaagagggtgtattgtaaaatgtttagtgaataaattacatgaacataagcaattatcaaattttcaccatgaaatgataggaattaaatttttttggaaattttacattgtacccactaaaaaggcttgtattgatgcattattatttgttttgacagagaatttttttaagagacatcttgcaaaatttaaaaaaatttaacacattaaaaataaagttcaaaaagtttgttatacgcgtaatttttttaatttatactaatgtaaaataaactgtttaaacattgctttataaattatactaaagtttttaaaatttactaaatattttaaataattataatcaacatgactattataataaaataaagtgaaaaaaatcttaatgctgacaaaataagaggtgcatgttaaaagtgtgaatggtagatcaacccaaattttttgtacacaaaaattagacatttctcgaaactttttacagagcaattggattagaagcaactagaatgtattcgatatgtcgtttggccaaggctcgcgatgtctctagattggtcgtccatttaactgccgaaacccccagaaattactagaaatttcaccttaattcttataaatatactcactaaacccctcagactcgatcacttcagaaatatcgattcttcatttcaagtaatcaaataactcaacatttctctgtttcagcgtcctttccaagtaaagattagtaaagatgtcgctcattcctagcttctttggtggccgacgaagcaacgttttcgaccctttctctctcgacgtttgggatccattcaaggatttccccttatctaactcatcttttccaaaactatctcaggaaaactccgcttttgtcaatgccc

SEQ ID NO: 67365 - DNA, 1303 bp, Cannabis sativa
agagagagagagagaagagtgagatcaagagagaccgagatggaaggagaggtggaaagattgagagatacagaccgacattgagagagactgagatggagatggagaggagggagagaaggtggagagattgagagagaggagtgagatcaagagagactgagatggagggagtgaggtagatagagagagagagggagagagagagagggagggagagggtaggaacaaggtagagagagtgagtttcaaaatttgaaatgagatttgagcgtgcaaatattggggttttatattaatagaggaatccccgacggtttaaaatcttcgggatgccctttaaaatcctgtttctttttttggcttgtaactcttttaaaccatcaggaaaagtacgcaagtgtttaaaactatcgggaatagtccactatagctgacgattttaaacacttaattttattagcaatagtctttaagaaaaagcaaccgacgagaatagtagtttttgtagtagtgtaaattattacatttgttacaattaacttggacactaaactattacaattaacataacaatttaaatacttccactagctactagctaacaaagtaatatcatcttattaaatattttcaacaattctgcttagtggatgagttttgatcaattaaattaagaagaaaagagttgcagcagtcaataaggtcaggaaatatcatccttgccggaaacagccaccagagccacctcggctccatcaagtaggactctcctcggcacacacttctcacattggccttggcacatccctcagctgactcttctaggataagtaatctcaattttatgtcctgtacagttcaatatatacagttatttatatagaaacaaaatcaaaaacactcctacgtaattagaaggcatataaacataaccccaaattaattatgttcatatcatagctacctgttcacgtgtcattttagtcccaattagaccaggtgtaacaattgttatgccaatagttgaaccaagttcatttctaagagtctcacaaaagtttatcaaagctgccttgcttgcctatatatttatatatataaagatccataatgagaaagatatatatatgatatagttttcacatagagaaagagaatatagaaaagagtgtgatatatgatataggttaattaggatctttgtccctgaactttgacatgtatcaaattatgccccctgaacttttaaggtcattaaaaatgcccactgaactaataagattgttgaatttaaggactt

SEQ ID NO: 67366 - DNA, 854 bp, Cannabis sativa
gtgacgaagttgctcattcacatttggactgaaaaaaactgacgacttagacagattaatttgttggcctgatgcagtttcaaattgacgaagcaaggacaaaacactaccagcagcaccaacatttgcttgacaaaaaacataactatcatcagcgaacaacaaatgagagaccatgggtgcaccttgagcaacacggcaaccttgaagtaaacgctcccttgcaaaccgagatatcaaggcagagaaaccttcagcacagataatgaacaagtaagtggaaagcggatcaccttgtcagatgccatgagatggagtaatcggtcccatgacatgaccgttatgaaaaatagagtatcggacactagtaacacaagccataatcaaattgacccatctttgatcaaagcccatttgaagcataactgcttttaaatatccccattcgacacgatcataggctttactcatgtcaagctttagagccatgaggcctttcttaccatgaacctttctcttaagatagtgcataatttcgaaagcgatcataatgttgtctgaaatcaaacgaccaggaataaaagcactctgagtgggagaaatgatgtgatcgataagaagcttcatacggtttgcaaggacttttgcaatcaccttgtaaacaacattacacaaagcaatcagacgaagatcactcatagtacttggagacttcttttttggaaccagtaccaagtttgtatcattcaggtgacaaggaaaagagcccgaagcaaagaaattacaagtagcagaaaccaaatctgaaccaacgatattccagtgcttttgaaaaaaaccaggccccattccat

SEQ ID NO: 67367 - DNA, 668 bp, Cannabis sativa
ctcaagctcaagcatttacttttctagttagagaccaacgtcttggggctgatgtgggatccactaaaggacctaccagtttaggtaatatctaatgcattcaccgacaggggaagttatttttggaggagaaactatgcaattttgggatgtacgagctctctggtgagaacctctaaggggtcccaacgatttggacttgggtaggctgaaaaaagacatacaaccttggcaagaacgatgttatgcagaatatatgactcatgctcctttagtttctgttaatattgtgggtggtgtagctactgatatcaacgccctaaattatgtcattcctagaagttagctacttctcattttgttctagggttcttcctattcgtaggtcatttatggcacgcgcgaagggcttgtgcagctgcagtgggatttgaaaaaggaactggttgtgatttagaacctgttctttccatgactcctcttaattaagactgtagacccaatgcttgaagtaggaatttgcttgtagtaggaatcaatttgattccaccctacttattaagtaagttagtaagttggggagtaatatttttaaagtgttctttttttgtttctttttatatctattcttttttttttctggatcggctaagtggaatagcagatcc

SEQ ID NO: 67368 - DNA, 795 bp, Cannabis sativa
  modified_base (440)..(443): a, c, t, g, unknown or other
agggggagagaaagaaggatggaaaaattcctttctcctttcttagtaaaattcgtgtctaccgttctcacgacttatattttctcatgcttttttaaataggagtcatgctctaaaaaaatatatgtattatacttatacaattttgaaaaagtaagtttgattttttagttctatactttgttcgtgctgacttatttttttaaattagttagttcgtttttaaatttgagttgaaattcgtgttttatttttctattttttataattaataaattatatgtatattttatagtttcaattatatttatacaattttttaataatattttcgaaacttttataaggatagtagtacctattcgataagtattaaattaaaagtgtgtgactgtttttgattggttcaagtcatttaatttttattttttatttaaaannnnatttaaatatatcaataaaaaataacatgtggataatgacacttaatggtcatatacttacgcaagtttcaaaaatgtaacttaggtattaatacaataaaaaattgagtttaagtatttatctacaaataagagttaaacttaaatatttacgccgcaaattacttttatatttaaattttattattattttaacttgtttataactgacaaatacatatatattattataataatcatatttttcgagtttatcgtatgtcatgcccttcaggttaatctatttctacttacgtgtcatgtcgttcgtacttctcgtgtcgtgtcatgttttttttaatttttaattttt

SEQ ID NO: 67369 - DNA, 854 bp, Cannabis sativa
gatgaagtcactttggtggaattggatgggctttcaaaaaacgtggaaaaggtgggctctggtgttcaggcccacgatacatcatgagtgtcttaagttggaactatcgtgggcttgggaacccatgggccactaagttcttagaagatatatgccttcaaaagaagcccaattatctgtttttgtgtgaaactctttgtaagaaagagatggtggatcgaatcaaacataagcttcactttgaagcttgcttttcagtcgatgcaaatggaaggaaaggtgggatttctctgttctggaaacattctgatgatgctcgtgttcttggctactctgataatcatattgatatagaaatccacacaagaggtcaaccaatctggtgccttaccggtttctacggtgaaccaaatcggagactccgcaaacaacctcgacatttgattcgtgtgctttctcaagaatcgactttaccgtggtgtattactggcgatttcaacaacatagccaatcaagaagacaagagagggggtcggccatacccttcttcacaacttactggatttcaatctgctcttgacgactacaatctcatcgacttggacctttaaaaaaaaataatagaatacactaataaaaatttatatcctcttaataataataattactaatattcggaataaactttaaaaaaaaatcttattttatagagccattcaaaattgcttcataacaatatttgataagaaacaatcaagaaaatattatataaaaaacaaatgaaaagcttcaccgattgttcaaaccagtatttccctttggattttgtcgaaattttgaaaacgctctgtatt

SEQ ID NO: 67370 - DNA, 874 bp, Cannabis sativa
  modified_base (42)..(43): a, c, t, g, unknown or other
gaaccatgtaacataaaatgatttttgatcttttattaattnntaaatctgattatattgaaatatgttttatttagggtataaaatccaaacaaagagatgtagaagtactcagcaagtgacacgtcagagtccttgccacaaaaagcttcatctccccaagatttgaaacgctcttcatggcctaaaaggactaaaactaaaggaatacatgacaatctaagagaaagactctattgaaaggccactgccaagaagcaggcatcgtcgctgatttctcctcagaataaggaagcacatagctcacgctaccttgcgtccaggaaatgctgactaagaggaggtaggagcttgataaagaaatcacagattttcgacaaaggatatcgttggcggcttccaaagagtgaaagtgggatgaacacaattttgatgatgaatcacctttctcaagtgaaattcaggctgaatcatgccaccttgcaaaataataaagatgaagagggtcgctagataggcaaggtgcgaatgccttgcagtgacgctctgaggacaacatacaagtggttcaagcgactaacactctaatcgatttcctcatagaaccagttcaccgaagaattcttggctcaacaccatgcctccctcatctcccattcacttgcatggaacccatgcacacgtgaaaatttcatgtggctcacttttgaaactcatggcttgctactgtaaccctttggggttcgtggctcgtcattcaagggcaaaaactcatcagatcgatgaggccatgatttactctttaaattcaagctcactcatgaatgaaggtattgtggacttttgatgttacaatttttgacaaaaaaattta

SEQ ID NO: 67371 - DNA, 1150 bp, Cannabis sativa
  modified_base (177)..(179): a, c, t, g, unknown or other
aactaagcggtctttacactgaattatatagagatctctatatgttccacgatagagataggctatgaaattatccattgttataatcctaataatgaatgatcctttatagatgatctacattgagtagagacaaatttacctttacacctgtcaatgtattttatccttaaaacnnntagctacctataaatgatatttctgtaaactaatatgactactgaaatgattacttaaccatttatctctattaagccatgtttgaaagaaaccatcattttacttttatgtcctaatagaagctatagattctatatttatggttagcgcttccactcaattgaactaccatgtccttaatctatatgtcatgagaagaaccattggtcgactttaacgaacaaattaaagaacataaataatacaactgaacaagaacctaaccatctcatgattgagatcattttatctaagatcactagatgatattaaattagaaaggtattacagtaagtttattatatcttatccatgttcaatattggtcccttccaatgcatacacaagacatccaacccatgcttactttaatcaatgtcgtagaaaggacatagcacttatccaagctgcaagtaaactacattgtagattatcctataaattaaaccctgtgtgattgataaatcgtagaaatacatttaatcacataatcttgattacattctactgtgttgacaacacaataaacaagaatattaatgtaataaggatttggatgaatttataaattaaataaatgatcacatgaaccaaataacacattaaatatgtaatgaaataaatatgtttctttcttgataaatgaatattaaagattacattgaaataggattttattttggggcagaaaatccaacaaactcccacttgcactaacatgaaacaatcaacatatttcaattaatcctagattcgttcggtgcttttcaaatgtagtaactataaaaattttggtgaatggatcagctaagttgtctttgaaatcaactttctctaccagtatgtcccctctcaccacatattctttgatgatgtggtacttcctctcaatgtttttgcttttcttgtgtctttgatgctctttactgtt

SEQ ID NO: 67372 - DNA, 807 bp, Cannabis sativa
cgcggctaatgatagtgcgattccgaacgtgacaatcagagagaaaaccgcagagattagggagagagagatcgattgagatggattctgttatgtttttcagtttggaaagtatgagattttccattttaagcttatttatatgttttttggattcccatattttttcatttaattaatttctttccatatctttttcatttatttttttctgccataaaaaagtaaatggcaacaaaaaatcccatatttatgaaaaatcctcttttttattttagttttacaaccttggctatgtacgtttaaatcttcataaaatagctgatttaatacaattcacacgatccaatctaattcaatttaattcgtaaaatatagatatctacacttgtacagattgaattagatttgaaaatttaaatccacacatgtgcagattagatgttgattgacatgtaaaactaatcgatccaatccaatccaatccacacatatttataaaaatattaaaaagttatatatacaaataatattttaatgtaaagaagatagtaatttaaaagtctcatacatataatacaattatatttcaaaatttaatagatcaaatgtagattctattcttatatataatttttttctatatacaatttaaaataaaattaaatatttctttatacatacaatttttttttcttcctttgaattttctatttgctattttatttattataatgtgttgttggagacataaaataactattattcattataccgttgttgatagttatgtgaaaaaaatatttt

SEQ ID NO: 67373 - DNA, 1679 bp, Cannabis sativa
tatcaagtcatgtctcacacccttatcacaattctaaagatttcaagtccaaaatttgtcattaagaaagttgcgatttttccgcatattatccaaaaacgatccaacggacgagatttaaactctaaaaattgacgattttcatcaagagtcaattttagccattaagatcatcatcaatggtcaagatcaactcaaagtgattttttttcttcatattttttgtatatttttattaatattttaatgggacctcttttcctataaaaagagagtttctctagttcatgtttagccttctactaagtccccataaggttatagcatctctctctctctctctccactttctctctctagaaatttgagctatttccttagtcaattctcttgtaattatcgtgagaaataaaaactcaaagtagatgtaactccattaccattgcgacatagagagtgaactactataaattttgtgtctctctttaatattgacttaactcattattcatcttgccaatctagcgagctagtgttggccattctccagcgtcaataatctccactattggttgagtgtgttactcaaggaagagtagtttctcacgagttaagaaactaatatgtagttcacactataccaaagtggctttgttaatagacctagtgaatggcaaaaagaccaaaaggtatgtcgaacgttcttaacacatatttctagaaatatatcattaagagtgatatagtgtattgaaaccacttaagctagtgtctataaagtcatatataatagaaggcctggaaataaatctaggaccaactatgtgagataattgattcatgatggaatcatacaaacttttatgtgaaaagataatagatccatttataaacatttgagagaaagttgaggcacttcacataagtgagacatctagagagatgagactaaaattcctcgcataatagattcaccaatgatagatacctgatttgttaccccactgagtaagaaattcaatgcgtaagaacacgttattgataaatggatagtttcaattctaacaaaataataggtcccatctaaggatggttagtgttggttgctacgaatttaagggttaaccgaaaggtttaatgaaattcaatttttgagaaacaagcatctctaaaagttgcatttatgttataagaattttacttatatgaacttagaggtgatgccgcctctcatgggagtagagttttctccttggatagttcatgaatggactagcacaaggccataatagtgctaagcatgtaaaagttggagtaacacaatgaaagtgtgtggatgttcacttgaacgcaataccactaatcttatcattaaggacttggaggttcaatgcatatgagtagtgattagcaccgataaggctttgtagtgcttctactaaagtaatattcaactcgaaagagatattgttttatgcaccaaacattgtctatttagagatgggaaaggcataagtatttaatcaagtggggagattgttggaattggttaaatacttaaggttaaaatatgaagattagtatagactaatcaatgggatatgtttaacctaataatgcaagttaaaatacaaaaacacattaagagaatgtgtactttaaacttgtatttgtaagac

SEQ ID NO: 67374 - DNA, 1754 bp, Cannabis sativa
  modified_base (1329)..(1333): a, c, t, g, unknown or other
caacaaatagttctcttacaaatctctaaaactcttcgagtcagtgtcaaaccctaattgaattaaagttctattttctatttccatatctaacaacaactacacaattacatatttataatttttcaccctcttcacaaattactaataaatccctataccatttcatagtctaacattaaaattatcttatactatataatctgtacatatattttgggagtgactatgtcttctatcctttgtcgacctaatgaaaaatctcgttccatttttggtatatacaaatacgttctaagttatgtcaaaattataaataaaaaaaataagttctaactcatttttttagtaatagcgtacatataatacctgtacaaagaatctcccctgcaattctggaaattttttaattaatttattataccgtgttttccatgatggttctttgtctcggcctatggatgttttggctaaaaccgtgaattagtgaaggaatttcgtcaggctttggtgataactcggagtcggtgctgaaggattcttgagtgtgtagagttattcctcctgagcctaaggatttcaatttctatgtggacgctgctgtccgtgggaacgatgcctatatcgttgttgttgtgtttgacaaggatgggggatttgtggatgctctttctgcaaaggctgctattgaatctgcccttgaagctgaatgcctggccttgtgtcatgcattttcgctgtgttcaaagtggggctgcagggaggcaaacttcttttcagattgtcttcagttaattgctgctattcataagaatgctatcccggtttggcaactttgttctctttttttgcatttgtttaacagtctttcttttgtggctcatggttgtgtgttttggctgtcccgttcagctaactcggtggcccacaatgtggcggcttgggctgcgtcccacaatgtttgccgcccctgctggaaagggaagtagcaccctttgttgctacttaactttttgttttttgctggtttttttaatgaagtttctgctatcaaaaaaaaaaagattaataaattttgtatataatcactacaaaaaactgttacttttagtgataactttttagtcacaacataatgttttttgtgactaaatatgatttttagtcacaacaaaatattacttgtgactaaaatatagtttttagttacaagttatcactaatttagttttagtcacaacaagtattgtgactaaaatacatttaatcacaacaaattataattttcgtgactaataactttagctacggactttttagtcacaacannnnnatgataatttataattagtcataattttttttttactttaatcataagtttttttgtgaccaaaagtaacaaattttgtagtgaagactcctatttgatttatctacacttgtgaaatagataatttaaattctaatttaatcagtgtaatatataaaataattataatatatatcctcatatgaaaaaaaatcaaaattataagtatctacataaaaacataatctagctgtgagttaatattattacttaataatgattgatataatttaatattgataagtttgttttagatagagttactatttacataaagttagtttctcttatgttttttactgtgtttgtaacctacattctgttaggattattgctcatgtaactaatgttgggttttatcccctaaataaaactcatttca

SEQ ID NO: 67375 - DNA, 682 bp, Cannabis sativa
aaaagtaagtacacttcacttagcatggaacgactcattaaaaataaaatataattcccagggtatgtttataactcggctggctgccttctgtgagacacaaacgtacgaactgctaacttatgtattaatgagaaatcatgtcggtgcacgtgtgcatgacgaggcctcaagctcgttgcgtggatgagaaatgataacactaaaaaaacttagcgtatattatacgatatagaaactgagtattgatagtatggcgagtcaagataccagacagtgaggcgtttttcttgctagaagaaaatatgcatgcgaggaagatcatctcaacagcagaaaatatagttatcacagttaaaacagtattagtctcgagaagccaaacgacaagcaactgctcgctatcaaagttaacttggctccattctcagtgaggcatccctatgagataaggcttaccatatatttttaatagcgcgttcatcttggcccaataaaagcgggatattcacaactgtgtaaaagcctcatttatttaccttgatttgtaatcaaatcccctgattagagggaataatcgatgtaacaattattgccaacttttgtaaattactgtccactatgtaattataaatagtggctgacaagatcaagaaacgggacgaaaaacaactcatatgaa

SEQ ID NO: 67376 - DNA, 1989 bp, Cannabis sativa
  modified_base (232)..(239): a, c, t, g, unknown or other
tatacaatgcattcaatttcattctatcttccccactcaaacatcttgaaaactattcctcaaccaatactctctctctctctctcacacgcacagccacacacagccttttcatttaagcttccaaaagctctcctacccacttttgcaaagaccatttttttcattctcttcgaaaaataatcagttaagtctattcttgtgagagattttacagagagagagagagagnnnnnnnnagagagagagagagagagtagtagtcgctgtagaagaactgaagaagcaggaagaaagaaaaggcaaaagggcattgttcattaatgggctgctctgcttcaaaaaatagtgttattctccccaaaaaaccagaaaaagggtcttcttcatcggtatcaaatccttctgtttccgcatcggagtcctccattgcttcctctccagtccctagagctctctctctgccaacccctttggttcaccaccctgccattagaaaaggcgatactcaccatttggtctctcttacctccaccacttatggctatggctccctccttgaccataccacacccgaaaacccgaccatgaaaccgaacgatactcttcttaagaagcctaaaaaggcgtcgttgaattcccagaagagagctttggctacggaccacgacaaagacctttcgattatccctctgtcacctgactcagtcattaacacatgggaactcatgcacggtctcgacgaagactccgttttcaactccgccaatctcgaccgtccgatcaaattccagaccaaacccagttcgtgtaggtacaccaactttgatgggtcggggaagaaacggatcaactcgttcgagtcaacgagatattccgaaacaacgacgtcttcgtcttcaacaacgacgacgacgactacttcttcttcctcttcttctgcttcgtccttgtcgtcttccataacgaaacccctttggcagcacttatctgaagaaaatctcttatcgaatatggatcccaatgtgggattaacttatagaagagccttatcttcgcggcaattgggttacaaacactccaaaaccaggtcactcggttcgagtccattctcttcgttttcttcttcttccaacagtgtttggttcaaaataccaagagcagaggacaaaatcgtaatttactttacaagcttgagagggataaggaagacatatgaggattgttgctctgtacggatgatattcagaggcttcagagttccagtcgacgaaagagacatatccatggattcagagctcaaaaacgagcttcaaagagctctaggaggaaaagttttgactttgcctcaagttttcataaggggaaagcacattggagggtcagatgagatcaaacaacttcatgaagttggagaattggctcagctcttaaatgggttccccatattggatcacggaatggtctgcaatggctgcggtggtgtaaggtttcttccttgcccgagctgtaatggcagccggaaagtgtttgaagaagaccaaggagagttgagaagatgctctgattgtaatgagaatggcttgatacgatgcccaggttgttgctcatgaattatgtgtcactgaaattgacatttttattttgaggtaatttgtattttttttttacatatatatgcaataaatttactttttattttaattattttgtttggttaagcttttcatttgcttgtagttagaactattttataaaataaagaactataagataatataaattttcacttatttttagtgttggcagaactatcatattcatatcaatatattttttttattaaaagtattttttaaaatgattggatatcaataaaaaaaattatgagtaaatcaggaataaattattttaatttttaaaataaattctcaaaagttattttgagaaaaattgcaagttctattctaactttttccaaaaagactt

SEQ ID NO: 67377 - DNA, 722 bp, Cannabis sativa
aggtaaatttgattaattgatgaataaaagaggcatttttcaacttaccccttaatctaaggtatagagcccgtttggtgaagaaatgggtcatggatgggcttcattggagagagatacaattgggcttacacacaaaagctcatgattattctaatgtgatgtaatatgagctgctaagttgaccatggacttcttacaaaaatactgtaaaatgagaaaaaaattgtaaaatatagtgatatagaattttatacatttttattatattaattttataacaataatgtgtttaaagttttaaaattgtaaaaatattgtatttcaataaaataaaaaaaaataattaaaaataaccctagaacaatttagcaaacaacctaaaaacaactataaaataataaaaatataactacaaagtaatagaaaaataacaaaatattgacttaattacaataagcaaaataatgtcaactcatcaatatatttttgtattacaatttttttttacatagttttaacaatttaatttatctttttgtaccgttgcattattttttttttttttcatagaatttgtttttacaactttattttttcaactttttttttctttttaagtttatgatagttaaaaaataactataaactgaaaaacaatataaaaataagatttttaaagcctgcaaaagacctaccacgagtactaagcatcaacatca

SEQ ID NO: 67378 - DNA, 591 bp, Cannabis sativa
tgatttgtaaatatacaaattccagttcatgtacaattcacaaattccctaataatgaaattatccaactactaaattccttattaagatcaacaagatccttttcttcttgttcgttaaaatccttttaacaaagtttgtttttttcttttttttttttaatttatagaatacagaaaaaatgtaaaaaaataaaaatataatcaaacataaaaatataattttttttaccaaaaataacagtttatgtagttttacattaaaattctaataatgtataaaattaattacttgtttataataaactataataattgcacattttgtgaaaatttaaaattctcacttacaattatcttgatatatgaaactttactggatgaataatgtgaaaatccataactgaacagatccatcccttaataatatcgagattaaaatgtaaaaagcacaataatcatattttaaaaatattcccaaaatatgttacttttgagtgaattattaataattatatgctgaataaccaatgaatatatacaggtatcagtactactacatatcaacctctaaactaaaataaaataattg

SEQ ID NO: 67379 - DNA, 1343 bp, Cannabis sativa
  modified_base (94)..(94): a, c, t, g, unknown or other
agtatactgcagtatgaaacttatcaaaaacacagtaaaaaagtaaaaatttccgcctggcagtatttttgtaaaaaaatggcaaaagttagtntaccatgtaaatttcccaatatatttgggttttggtgagtagacatttgtattccattttgaattttgggaaatttacaaaaatattataaaatgggagaaagttgataaaactattgggacgcggaattttttacatttttactgtaccaactttacaaaaatattgtgtttaaagttttaaaataacaaaaatactgtgttttagtaaaataaaaaaataactaaaaaataactgactggtaaaataagttctaacagtaagtctgaaaatatcaacgtcatactactttcgcttttaaaaattcaactgaaaccctgaacagcctgaacaccatcatagagtacaaacacaaacacagttgaacccgtgtcaaatttaaaatgaaaaaacaccccaaaaacataaaagaaaaaaaaaacaacgattaggtttatactgcaaaattattgctaaacatcgtagaatatcgtaaatttctctaaaatcctcctttttaatagtgcattgttaaacatcgcaaaaaatatcgacaaacatctctaattctcaaaattatcacattttcagttatatattgcaaagtatatcgcactaaatcgctaagcatctagaaaacgccctttaactcattttctaccttaaatattgctagacatcggtaaatatcacatcattcctaacctttaatttagctaattatcgcaaaactaattgccatatatcgataaatatcgcaaaaatatgagaaacttagaaaaaaaatacaaaaactgcaacaatactcaagttttttgatagaaaatcaacaaaacccaagctaaaatgtgtagatctattcaacacaaacaaccacatacaagtaaactcaagatcattttatagagaagaagaatcacccattaatttaggttgaggtatggatctaggcagctgtagtgggcgaatagggaggttcgacgtgatgttatagtggaggttagggtggtccgatgtgttgttatggtggttggtcgacatgatgttgtgtgtggctaagtaacctctgtagagagagatatagagagaggggaggtttaaatgaattagagtatttttagtatagggtgaaagatgaacttaagtttgagatgttaaaaatgaaaggaattattttgttatagaaggcacatttaaacatgtaaatctaaatttatattagtaaaactaatataaagatttaaattttcttttgatatccacttaggag

SEQ ID NO: 67380 - DNA, 1126 bp, Cannabis sativa
tggtcacttaattttgtatcacactttataatagcatatacattatacatatgtgcccacaaaggattttttaatccaacacttcatgttcatagcaaacaagttgtctcacaatcctcccactatgacgatgtacatgggtttccttttcaggagtagtggtaatcgttgtcagtcattcaactaatggtgctggaattgttgggtcacaaatctgcccatttttgtatttcatctataaccaattgactgcgtggtttgtgacttttcacatatttttccaattcaaaatatattttttcaaacaacattatacaactctttatcccttcccttgacagtaattcaaggaggcaattcggggaccatgaacctataattttaagttccaataaactagattatttattgagtctcatcaaccaaataatctttgtttattaattccatgattactccactataaatatagaatcgaactcttagtaatttagaattatatttagtgagttttagtgaaatgtccattgatataattaattccactgattagtcctccatgtgttggttcgtaattagttttggtcaaattagcgttttatttttctaattacttctttatcctttagtaccattaattaactagttgaagtataatttagatcccatctaaatttgtgcacaacttttcagtctcagaattgacacttaaagagaactaacattcgatctgttaggatagtcaagattccataattgtagttcatattcccaaccattcacattattagattctctaaacaaaagttgtaagaatcatcttttttgagaaactttaacgagtgaattaaagaaactatgaacaagagtttatgattagtcaaaatttaagctgatctactattgatgatcgttatgatatgaattaggtccatgtttattttgttagtgttcttagagtgtgtgctgagtaaatgatcaaacacaaatgctaggatgagttatttgtgttttaattacatagagggtacatttttatgaactagtgatgatctcacttcttatttgttgtgagagagtgtaccaataggtctttttttgtttttttttttggctaactgtgtac

SEQ ID NO: 67381 - DNA, 870 bp, Cannabis sativa
gtatagtataattaagatagaacctaaccatctcaagattgagatcaattgacctaagattaacatagtgtcaacgacttagaaaagatataactgtaagtttataatatcttttccactgtcaatattggtctaatctaatatatagccaatacatccgatacaagtttactttgctaatgcactgaaaagaaaaatttacttatctaagtgtaagtaaaccacatcgctgattatcgtgtctgtgtaaatccagtgcaatgataaattgtgagactaaatagtttgaagcatataactatgattattttctatgtgttggcaacactataattatgaataacaatatatttaagatttaacagaatttatttattacacataaaattatgaaagtaacatgtgaaccaagaaacataaaatgatttctaatctttttttaattagtaaatgagattatattaaaatgagtttcatttagggcacaaagtcccaacaaactcactaatataaaactaatattacattttaattaatatcgtcttcttgatgtccagatcaagtgtagtatgtagtattatctttgtaatatgatttgacaggttgtatttattatcaactttctccaccattatatccttcttagtaacaaaatctttgatattgtgatattcatatatatatatatatatatgtttactcctcttagagttctagattctttactatttgacaactacatctgtgctattgtgaagcaacactagtagttaatccatgattaaaataatgccaaaatttttgtaaaactttcccaattctgaataattctcttgtagccttcaaggccactgtaatattaatctcatt

SEQ ID NO: 67382 - DNA, 1417 bp, Cannabis sativa
actataattatataatttatattagagctgtaaattcgtgctggtacagtctagcccggctcgttttgaaaaagcccgaaaaatatgggtcgtgtcgtgctggcccgtatagaatttgggtcgtgccgtgctggcccatatttccataagtcaagcccagcccggtccatgggcacgaaaaaatcgtgctgggcccgggcccaaatcgtactttaaacgggctttgttagactgaccaatatatgtacaatatatttataatattaccagtttttttaaaagtatacatataaatagtgtaacatataaataaacttaagtgaaaattattttttaaaataaaaatatgtatataaatatcaaaatatataattatgaagtacaaaattaaaaaatcatatttatttgtgtgtcgtattttttgagctttttaaattcgtgcttgcttgtcgtgttttcgggcttgtcgtgccgtgtcatgcttaagcttatttttttcgtgtcgtgtcgtgctcaagcccatattttttcgtgtcagattgtgcttgtgcctctcagattcgtgccggtttcgtgtcgtatcaaaaagtccgacccatatttacaacactaatttattactacaaagatctaaatttaattagtaaaacttaaaataccataagtaacataatctaagttttgagattgaaactcagatgtttatctgatcatgtagttacactgtacttaataggaactgagtagtaatgattgagtttgaactcttggcctaaagagtttgtgaattgagttaagtggacagagttacaaagagctcgaaatgtctcaaaggagttgaagtatgcggctttagtcggggtagcctatagcatttaaggcttaataggaacttatgtatttttgaacaaaaatgtttgtcaattgattgtatagttaaattgattagagggagcatgaaagtgtgtttatcacttgtaattggggaaagaatactaaaagagaaaagttggttaagatgtgtacaagtcacttatagcttctttggagctatttgtgttgactttgtttcgattataaattgcctagttgattaatgaaaaatgttaaaggatactagtggtgcttaacatttttctatgtgttaatatcactattggtctaactaagtattgagtctcatatagtttaatataatagtttttaggaaatatcgttagccaatcacaactcgacatgtcgaaaaggtgctaggcaccggtacctttaatcaatactgtcaggacagttagttataactgtttttctgtttctaacaactttctgttgtttgttattttagttggcctttgccttgtactctggtatatataaaccagttgtagcttttctcattgtaatgcaatacaatctttca

SEQ ID NO: 67383 - DNA, 834 bp, Cannabis sativa
ggtgttgctaactaatccattgtagaagttatgcacttgcaaccagttttcaatcccatggttagggcacttcatcaatacatccttgaatctctcccaagcttcgtaaagagatttgttgttatgctaggtgaagttattgatgtcagatctcagcttggcgatctttgcacgaggaaagaactttgaaaggaaattcagggccaattcctcccaagtgttgatagaattgggtggtaaagataccaaccaactcttggctcgctcccttaatgagaacaggaacaaccttagcctaatggcatcgtcactaactccattcaccttaaatgtctaacagagctcttcgaagttagcgagatgcatgtttgggtcttctgttgacaatttcccaaattggacggaagattggaccatctgtagtatggttggcttgatcccaaagttgttagcatcaacaacaggttgccttatacaggatctggcccctatcaagttaggaagcaaatagtcctccaggctacggtcattgtggttgcgaccattagcctggtcatctacaactcctctatcgtttccattgttgtcgacattggcattgtcagccatatctacttcttgttcaatctttatcgcagctctttcccatttcttccttcttcttacctgtctgcaagtcttctctatttcaagatcaactggcaatctggcagttgcaccttcacgtctcatagactagttgaacttgaaaaaaaaaaaagataagattttgaaacaaacagaattagtactaaaattgaaaagaaaaatcaaattagaaaaaaatttaatttt

SEQ ID NO: 67384 - DNA, 788 bp, Cannabis sativa
atatttagcagtaaaatctcaatcattatacttatttggttgtaatattagtctctaagttggtaataataaagagctaatattgtaataaaatagattttttttgctaaaaaatttacattggtaaaacgaaaaaattttgttgccatattttttctcataataataagaataattagtggcataaatacttaaaattttaaatttataagtaacataaatttaatatttatttttaacaacataagtacctaatatttgtaaaattatatttattctctaatttttttagtatatactctgttattgtcttaaatagggtacatataaggcgcagattctagatcattgagtttaaacaaaaacatgtagtataagttacttttaaatattcctttaataattttaaaataaagtctctactaatgaaactagataaaaattagagttttataaatatttggtacttattccgctaaaaagaaacattaaatttatagtacttacaaatttaaaattttgaatatttatgcctctatttatcctttgataataatgaactaaagtggcatttgattgggaagaataaaaacataaaaatagaaatagaaatgcgaattgaaataataatgaaatagaataaactttaaaatacataaaaaaaattaattaaaaaatcattaaattttttttcatgttaaatgacttttccttttattttaaaatgaaataatcattctatccaaatgataaaagaatattcaattaaaataatattttaatacttt

SEQ ID NO: 67385 - DNA, 933 bp, Cannabis sativa
  modified_base (661)..(675): a, c, t, g, unknown or other
  modified_base (836)..(868): a, c, t, g, unknown or other
agataaaaggaatatgaatcgatgaaatccctttttatggaataactcattaattgcgtaagtagcagagtatatatgcaacttattgactgtaaggtcttatgcgaggaaaagatttacaaaatgttgcttagtatattaacgagaaaccatatgtcattgaatgcatatagcgaggcatcaagtacgttacagctgggaagatgaaggcgacacatatcgactgcggaaacacttagtatataacttacaaactaagtataacaatcggattagctcgagacccaataagcaaggtgcctatctcgctatgggaaggctcattcctatttctgagaaagatttacaatcctaacgagttcaaatataacattcaaatgagcctcgagaaactctctgttaacgagaactgcgattgtcccaaacgaagcgataatcttttaaacaaagaagcaacaaggcgtacattgtcgatcttggaaggacaaggaaaaaggctccagctcgccattacggtcactggaacaaagctcctatcgaaacaccctcaaacgtaacaattaaagacttgttaaaacacacgatcattttaaccctgtaaaagagggaaaatcacaattatatgatttttaaattataaccgcatttacactacgtgatnnnnnnnnnnnnnnncatgatttcaggggataatcgttgtaaaaagattacagtcaagattgtaattaactgccaactatgtgatcacaaatagtggcaagtaagatgaaaagggcgacgaaaagaatcataccagaaatgccctgagaaaactatcagaaatctaataagattgnnnnnnnnnnnnnnnnnnnnnnnnnnnnnnnnnccacgtaaaaaatcccttgtgttcgtatctcttactttattgctttcattttttatttgtgaaat

SEQ ID NO: 67386 - DNA, 924 bp, Cannabis sativa
actttaatctaatcttgtgtgtttaacacagcacaggtgcagtgcaatccaacactcacagttccacccccatcattcaaaggagacaacgaaagacccttcttttgctgagaaaatttgtattgatcaagcatgttcctagctgatgttacaatatttgaagcaagccaactcttctttctcccaataaagtcatttcacgcacgccaaatagcccaactcaccatcgccgcttcctccatttcaacttcgtgcccctagtgaaaattcccaacaaccagctgctgaacgttgcagccccagccccgacatccactatgctgcgatgccaagcagcctttgcaaacgagcattccaccaacgcatgttgaacaatttcagtactagagtgacataaagggcagtcggcattgacaggaacatgacgcttttggagttgaaaacaagttggaagcacacccgaagcagcttgccataaaaaattactgatcttaggaggatttttaatgaccaaagccgcttctaaaaatcagtattagcatcttgacaccaagcacccttagattcttgcaagaatttatatgcacttctattttatataaatattaataaaagtaaaagggtgtaaaaaagagatgttttagttatattttaatatttaatcatttttattgattttattataatgtaatcagaattacaatgtcatattaaaatcaagttttaaattttaaattaaataatataatgataataataattcaattacaaaaaatattacatcaatagaaagtgtgtcatttggaaataactcatacatttgagagaataggaaggtttcaatcaaatacaaaatacaaatgaatgtattattacaagattacatgcaaactaagaaaaagaagattcgaactcaattacata

SEQ ID NO: 67387 - DNA, 849 bp, Cannabis sativa
aagaagaaattcaatagtttttttaatttaattaataaatctattcttgtgtttattcacgtaactgtcccagtacacaggttttgatatcaaagtctcttcgcacagtcattttctaacattggttgtaacatattctagaaaattctctaaatattttaaattataataaattttcatcatgattaagttgcggtataagatttatagtacaattattataaatattttttacttgtgcgacctacaatttgaattaaattttttcttaaatacaataaattagtttatctaagagagtagatatatccaatttaaaattcagaagtggattaagaagattttcttaaaaaacacaccaacatttatcatcttactctgctaaacatgttaaaactaaatcaaaactaaaaattgtttgaaaatgtatgaaacagtagtacactattaagggtagaggaagatgaaagaccaaatttcagaaaagccaacaaaatctttgatctgtgttgtaaggttttggactagaacagagagagaaaatgaaatttatataggtattagagaaaaccttctaacaatacaatcaaagaacactcaactaacagagttagttaacagtaacaactaactaactaaccatcttctctaataatccccttcaaactgagtgtggttttggaaaccatacacaatttgtctcaaagtttagaaaacttagtgctggagattgaattagttagacaatcagcaatatcagcagtagctagaacatgcttaacattgatgtgctgatgttggactttgtctcgaacaaaatagaggtcaatctctatgtgtttggtacga

SEQ ID NO: 67388 - DNA, 666 bp, Cannabis sativa
tttttttttttttttttaaaaggcccaattttaaaatttcgcacaagacccccaaaatgcttgggccggccctgaggagtactaggcacccgtaatactttttagtggatatctataatattacatcaacaaatttcggcaacaaatacaaatatgaagaggacaaaaattctacaattaatgtcatagttcggttagaaaattaatacttatatagttcttgtatactatactaaaatgtattattttaaattttataattttctataattaaattacaattattccctaaagttaaaagatctccttaaatatattcaaaatattctaatttataagagtcaattataattggaaaagtctcttatattttagtctattacctgtgtgcagaccttacatttttaaaagtttctattttctatttacttgtatttttttaagtactaatacttttttataattctaatgacgacatataattttccaaaaatttgtagaaagaccctataactaaatgtatcatcatgtaagaaaaataaagttaccaaaatatacaaaaattaataatagatacccatatgatcaatagtctttgttggtggctgagatgaaagatatatacaaagctaaaaagaaagatgaatgaattaaaaagagtatata

SEQ ID NO: 67389 - DNA, 1127 bp, Cannabis sativa
catttatctttatagtaaagatttaaattttttttttacctattgcctatttcaacttagggtcggccatataattattctaacttaccaattctctctctctttaatcctatgtttctgttattgtcgaaccaccaccccaccaattcgcacactcaaatcacaacacaaccaaactttgcttaggagaagacgttattacatgaaaaaaaaattactaattttaaatttgacaaaagcatgaaatattcaacaaatgagtttttattatataccttcttgtcataaatcaattggtgaaagctgtttttttggagggggggagctgctagtataagtgctattcctcttgcctcaaataatttaaagaaatgaaatgagtgaacaacaataaaaaaaatataacacatatgaacagtaaattcacatataatcaaaatatattgatgtaaataaaaatgaaaagcaatatcagattaaataaaaaacaaaaaaaaaaaatgaagctaaaagaagttaaggaagagactgatatatattatacatcagaaaaaaaaaaattaaggtgacgcaaacttgattaacggtagtgtagttttcacttgaaaatgacgttcattaggaaaatgagtgtgatgattaccaaaagcatcaagtgtgagatatggtatatatatacacaaaaacaataatgaatctatgtgatagtttgaaagactcctaaaataaggttgagaccataggttaattacttcctaatgtgcaaattaactatatattaaacaaccattttaatatacttttaatatatatatttcttttccctatatatgattaaaaatattatatattaaagtatttattaacgttccctatgtatatgggctgtcaaaaattagtgaaaatgaatgctgctattatttattttattactacaacgttttgtttttcattttcttaaagacttacctatatgaattattaatttattacgttggctctttatctctaaacaaaaaattaggaaaataggaaaaggttagtgattaatggttaatattttattttaaatgataaaatattagatgtgcgaaatattaatataaaatgagttattatatggagaa

SEQ ID NO: 67390 - DNA, 1109 bp, Cannabis sativa
tatgtgcttctccagtttgatcatctactaacccttttagaaccttaatttatagtagaatttatatatgtaattaataattagtattactattgaaataaaattaataaatattctgtcaaaatactatcattcaactactcgtacagatttgtccacatgttttttgctgacatgtttaggaaattagttgttgcatcttaaagttagttttttgtacatgttttctagtgttagtgagtactatatgtagaaacctatatataacaactattcatctttgtactgaacttaaaagtgtaataatacgagagatcgagttggaggagtattaaagagtgtattgtgtatttgatcaatgcatctcatgtgagctgaattgtaatggcgctaggctaatctctcttgtctcagactgtaaaatcactttgaagattaaataatgaaaccagccattgttgaaggctgttttatcatatcaatctctctctctatatatatatgtatattattttagttttattgtttagtttgattcttctcttgagtgcattgatcgaattatgttcttgtattgatatagtgttctacaccacaagtggattctgagcacgtgctcgaatcatcaagaacctggtgcaagaattcaagaaattaagcttcaagaatgattggtgtaaagtttaaagttgataaattcacatgccacaatgacttcggtctctatggagaattaaaatgaaagcactcttagtgcacaaaaagcttgatgaagccattgatccaaagctacatgcaataaagaatgaagatcatgatgatggcaacttcagtaccatcgaagtaaagattcatagtgcaatcttactcagtcttagggtgtagttctttgagaagtgtgaaatgaagaaacaacaattagtttgtgggcactaatagaaaaataggcattcgcgttggttaaaataacagttttcttttaaaaccaacactaatggagtgtggattataaactgacgacgaatgaccttcattaaccaacgcttaacatagttatattagagagagagagagagagatgggttggcccttataaaataaaaccttaa

SEQ ID NO: 67391 - DNA, 751 bp, Cannabis sativa
ggtacaatacatataaaaagaagaggtatgtttcaaataaatataaaattagaggttaatttaattaattgatgaataaaagagacatttttcaacttacccctactatcaatgtaaataatattattatactgagtgacactccctacctgtatataaactagatagtaatcacgtgcgaggcacgtctctaactttattagaattagctctattagtttttttgaattagctctattagtttttttgaattagctctattctaattctattagaattagaattagttctattagttggaaaaatcttatcaaatatattggatattctcaatttatataatttttttaaaatgagttatggaatagaatatttatattataaaaaataagtaaataaaatgattaattaatttacctttcgtattatattaatcagagttagattttaattattgatgtggacttaattatatcagtaactattatattaatttattgtggtaaaaatagaaaagaatataaaaagttgtattgaataatttgaattgattatatctttcgtattattttgtgttatatctttatatataaaaagttgatatttaatggtaattattggtttaacgatttttttttaacgatttttttttatttagacgattaacttaacagactattaacgttaaacgtttaacttaacagatggttaacgttaaacattaacaaataaataaaaccaataattaaac

SEQ ID NO: 67392 - DNA, 760 bp, Cannabis sativa
aagctctctgccaatatgggcactccaatggacaaccccacactgtatcgaagtgttgtgggtgcacttcaatatcttacattaacaagacctgatatttcattctctgtcaacaagttatctcaatttctcaaagcccccactaatgaacattggactgcatgtaaaaggcttcttcggtatcttgttggcactattgattatggtctacacttcacacccgcatctcccctcactctcactgcctattctgatgctgactgggccagctcgattgatgataggcgttctacatctggctactgtgtgtacttaggcaccaatctcattatgtggagttctcgaaaacaaactgtggttgctcgttccagcactgaatcagaataccgtgccattgctcttgccaccactgagctcatttggattcagtctctttttacagaactgggaatcacgttttcttcctgccctgttctgtggtgtgacaatcttggtgccacttctcttgcctcaaacccagtgtttcatcaaagaacaaaacacattgaagtggatttacactttgttcgggacagagttcttgctcatgaccttgacatccgacatgttgctgctgcccatcaaactgctgacatcttaactaagccacttccccaaattcagtttgatctgttcaggcacaagttaacacttagagaagctagtgtaacttgagggggggtgttagagttagttattgggtctgttagttagttagatc

SEQ ID NO: 67393 - DNA, 3368 bp, Cannabis sativa
  modified_base (3317)..(3343): a, c, t, g, unknown or other
taaaaattacaatgctatcttggggaagttgcaaattgcaagtcactcatggacatgtgacctttgttaggaaagaaaaggctagtatattatcaccaaatataaggaagtgtctcagcagctgatgaatattgtgtttgatttgggtgcaatttcaccttcaaaccatattttaatactctagtggggcagttatatctcatacaaatatcttaaaccacataaataaatatgtgccataaaccatggaaaagtaggtctctttctgatgttttggattataaattataatgaaatcctcggttttcctatgagagaatcaagcatctgatctgatgtcactcgactcatttctacatagctggatataaatgtaattgtaactcttgcacatccatcaaagaaagagtaacttttacttgaatacccaagttagtacatacgtggggttggggacacgacaaagggaaataacaaccgtcagtttaggaaattgattccagttgaatggaactttttgtgttgctagtagacaatcatcatgaaaatgatttcttatagctgaaacaacaattgcagttctctcttgaagcttaacatctttattagattttctaactaatatccatattttcactgcaggttgtagcgtctgtatattttctgaagttgatatccatacaatccttgatgatggctatgggcataggtaaggagctgttagtctgctaatttcagtgcgtcattttgtgggtcgatttcttacttactaccattctacttcatgctgacaaattggaacaaatttgcatcgcagctttagcatttgctttcactgcattttttgtttacgaacaatatgaatctgaagtagatggagtatcaaagcttctacacagtggtgtgaaggaagttgtgaaattattgaaaagcctacctcattcagcggcatctattctttgtaagaagaataattatcctcgccaatataagaagtctacaccagcacaagcacaacattggaaatagtattcaaagctttcattcaaattttccttaattaatgataatgagtaatggggctagttaacatatgcttgtattaagatagagttggggcactctcccaccaagagagagagagagggtttaatacagtatagtcttgtcagtttcttacctttgttagtgtatagtcttgtctgtttcttaaaccggtatgccataacctaaattaacctatactagtgactagtaactagtgattatgaatgtttattggatctgaagtttcatgtcgacaactggtaatttaccgcagttggaaaagaaatcaatgtgctttactatagagtaagggacttgtaagatcaacttattaagtttgattttttaatattttaaagtacaaataaaattataataataattttggccagtcacaatcactctaagtcacactataactacttttaataaatgtgtaacaaaaagtatttttactattaaattttttacttatatgtattaatttgcatcaaagataaatttaaatattattgtcataaaatactttaattgtactaaaaaaatttgataaactatgctaagatgttaaacatgaagaaagaataaactcccataatacacagtaaaaatattgtaatctttcaactaggtttcgaacttattcctcttatttcaacttaaccccattctctctaactcctttctctttgttctctctctgcaaatccaaaccctagatgaaaccaaccaccgctcaccacccaagccccctgtgtattggtgaacccaagccctctgtgaactgggctctattgaaatttggaaaccactcgaacccacacgaaccaaaagctcaatcaaggcccgaatcaccatccaagctctgccaccacctgctgaactcacgagctctgccactgctcgaatcacctagttaaaggttagtttttgtattttttttttaaaatttatctttttgattctcaataaattagtttatttgaggttagtttattgttttaggaattaaatttgtgattaatgtttggctttgactgcgtggtctagggattttcggggttttgggacgtaaggtttttgggttttgtgtctttttgcgatgatttagcgatgatttgctatcagttgtgtatccgaaatgacattttttttttttaattttagtgacgttctcacgattattttgctatattttacaattttctacttgttcggtatgaaaacagtgaatttgcaatttgcgtagtaatgttttgcgataattttgtaattttccttttactcgtatgttgtttatgcatgtattgaggttttagcgatgctttcacgatttgtttgcgaaacttatcgatgttgttttgtataacgtttgaatttattttgagagattttgggcgatattttgcgatttcttacagatgctttttagatgattttgcaaaatttaacaatgttatattgaaattcattacttgcttattgttttttttagcaaatggttgtagagctaattttgccagtttcaaatcatttctcttggtgtatcacatacagaggcaatgaattctttgaaacaataaaggagaagctcaaagtgttggttttatgatactaaattaagtatgcagcggaagagttgtttctgattatcattgtaccaaatgccaaaaattaccatatgtatatattaaactgaaagtaaatagatgaaaaaaaatatttacctcttgatgcctatcatggtatccttgatttttttccaaagttttatcctttttgattgattggaaattcacaccatagtcttccagaccttccaccatacaaaaggactaatgtggactagtaggataataatgtagatgaagttcttgtataaatctcaacacatgaacaaaaactatttcttttgtgatagagagaaaaatgttttatggtataatccttttacgcttttagaagagttacgtaaaaattctatcaaacattgttatacgatatatttaaataaatctaataaaaggttatttaaatttaaatctatttattaaattatatctaattatttgaataaataataaagccaaatcgcttattgatatttatatcttataaccgattgagagaatctttcaaccacttgagagaatatcttacctactttttaattttaaatatttatcttattgaattaattaataaattaattaactcgaaaagataaaactaataggctaattaggatttttgtcccctgaactttgacnnnnnnnnnnnnnnnnnnnnnnnnnnntaaggtcgttaaaaatgccccctga

SEQ ID NO: 67394 - DNA, 1170 bp, Cannabis sativa
  modified_base (29)..(35): a, c, t, g, unknown or other
  modified_base (470)..(471): a, c, t, g, unknown or other
atctaatggcttaaaaaaatgtaaccatnnnnnnnacaataaaaatgtaaccattgaaacctcctccatatttatatatatataaaggagaagtataagacggtaacgtggcactttaaaatggcttaaaacatgtttatctattttctcatttttttttattatttaacatctatttatctatttttaatattttttctaattatttaaaacttatttattttctcatttttttaattatattttttttaatttttcaaattttttaataaaaaacacaataattttttttaaacttcataaatatctaacaactaagtttcaaaaaaattaaaaattaaaaactctatctatctatatatctatatacaattaaaaatcattcaacataatcttatctaattctctcaattaaaattaataaaaaagtatttatccacaattttaaatcaaaactattaaaactaacnntaaatttaattgtatctcaaataaaaaacttattaatcgtgtaatttaagaatttaaaaaaaaaaataataagaaacctaaaatatctatatgaaaatatatatatataaaggaaaagtataagacgatgacgtagcgctctaaaatgacttagtttatctattttctaattttttcttattatttaaaatctatttatctattttctaattatttaaaacttatttatctatttaatcacataatcttgattactttctactgtgtagaaaacacagtaattatgaataacaatgtgataaggatctagataaatttataaatcaaataaatgatcatgaaacaaatatgtgaaccaatcaatatattaaacaagtaataaaataattttatttgtttattgataaatgaatattcaagattacactgaaatagaattttagttagggcacaaaaaaccaagttgagctcgtgaatttcaagggtggagacgataagacttagagagagaaagactgtgagagaagataacaagaagggcttgtgactggggttctaggtctgggttcgacgatgggggttttgggtttgggttctaacggtaattattaatttgaaccacgtgttttgtaaaagttatcaattgaaccctctgttttattaaatgacaaaatggactttgtattttccaaaatagta

SEQ ID NO: 67395 - DNA, 553 bp, Cannabis sativa
tacatttttaatgcaaaaaattatttattacatagagataaaagaattaaaattgatattgtgtccaaatttatttaaaatttattttaatttttattaaaagaagaggccttgtttcaaattttgccctaggcctctcatcaccttgagacggccctgaatttatgtatataagtatcattaattcaattgcattaacatttacaaaaataattaataaagaaatttattttgattaatctaaaaaaatattaaacacaaaatttaatcacatgcgttttttaaaaaataattagtatttttgtcttctaactttttatactatcaaattgtgttctttaaagtataagactttttaataatgccctttataataatagaataaaagaattttttttattaaaatttttagttttagttttagttttagttttttaatcattaaaattttaaaaactgaaaagtatttaatttgcatcattttatcaattatcattcaccttgtcactcattttatgataaaattgaataaaatataatagaaaaactacgt

SEQ ID NO: 67396 - DNA, 1124 bp, Cannabis sativa
agtgtttattaattatatatttataactgtagtatatttattgaaaaaaggctatttaatttggttaacaaaaatctacgttaacagtacaacactcacatgttgatccccttgtcataatagttcagcacgccaataaaagggtgaaaagggtgttggtatataatgagagttcagttaacatcctctacaaggacacattaaaaaagatggggttagaggatgtaaagttgaaaccatgcatggtgagcctatgtggatttacatgcaatagtgttgctagcctaggaatcatcgagcttccattgattgtgggagagccacccttataaatgacacaaatgcatgagttcttagttgttgatattccatcagtatacaatgtattgatgggtcgcctagcactaattggactgggggcagtaagttcaattaaacacttgttcctaaagtttttaacacatgaaagagtgggagtagttagaggcaactagttattggctcgggagtgctatcgaatagaactttagagtaggagagccaatcatcaactaatggtaatcctaactgaagaagaggagaggaaagaagaggacttggacctaagaattcaagatgaaaataactaactcaaaccaattgaagagcttgaagaagttatttcaaatccaaacgatcccaaaaaatgtgtttacattgggaaaagtttggaggaagaactaaaatagcaattaattatctttccaaaggcaaaccaggatcagttttcctggagccactacgatatggtgggaataaatccaaatgtaatctgccatcatttgaatatcgaccccaattatcttgtaaaacgacaaaagtgacgaccattagatttcgagagacaaggtgcgctcaaagaagaagttgacaaattgttaacacatgattttatccgtgaggcgttttatccctcatggatctcaaatccagttcttgtcgtaaaaccaaacggcacctagaggacttgtataaattttttaaatttgaacaaggcatgtcctaaagattgtttcccactacccaggatcgaccagttagtggatgcaataacgggacatgagttaatgacttttatggatgca

SEQ ID NO: 67397 - DNA, 813 bp, Cannabis sativa
  modified_base (526)..(538): a, c, t, g, unknown or other
  modified_base (752)..(755): a, c, t, g, unknown or other
aagaagaacgttaagtttcccaactaacccacgaaaatagcgatcttccctagcatagcggagcaagaatatcaaccctctaagtgatacgctaatgtgaggacactcatctaggaacaaaccttaaagatgacgctcatccctggagaagtggagtaagaccgtttctctagggaaggaccacgtttcgagaggtagtcgttttcctaagataataaataggcccacactgggactgagaaggtgggacggattttcactctctttctctagttttacgactaaacttatcatttctttacgatctgacatactctttctcatttcggtgagtaaggtttgatcgtccatcatcgcataaccatagacacaggaagtatttatttatatttcttattttcttttccacttcgcactataaggttactgacttgaccgtcggagtgccttcggccggcaccaccccggtgtcccaaggtttcacggtcatctgttgtctttgttccgcaggttgtcggtgcccacnnnnnnnnnnnnngatcattgtagattttagcgtctacaactatgagtaaccttcacaacatttatcactaatattaagtgtgtaaaagatgttacacatcttaatttaaaattcatgctataagagttatggtgtgtgtatgagttacatttgagtccataacatccatgaggagttatgagtttgaatataaaatggtgatatcctaaacactatataaagaagnnnnaggtgctcatattgagatgaaccaaattttctatcaagaaaacactttgctagaaaac

SEQ ID NO: 67398 - DNA, 727 bp, Cannabis sativa
gtaccacaaaaaccttttaacatttctcataatcaaaccctatatataaatgttatataaatgtcacacacactacacaaattatttcaacgagagaatatagcacactaatttaacatatagttgacattcaagatcgtaccaataactattagatatatttatatctatatataaatatatacgttgcttaactataataagagagtcatatatatacgtttagtaaatttgatatggttgacttcacaaagtctatacattatgttccaagttaattaaacatataatctattcctttcttacatgtgaacgtgagtgatgctatacaaactaatctatacataattaataattggataaataataacataagtaatcaaaattttaggtttaaatttattaaacgaacatttgaaagaaattgatactacatatttctatcatgatctaataatttaaaatttgtactttatataacagagtttgtaatgataaaattagaaaaaaatgatagttttacaaatattaagtatttataatactaaaaaaataaacattaagtttataccatttataaacacataaaactttaggtagttatgctactatttacttttaataattgtatacaactaaaataaattatgtacattattaataaacttatattaagcagatatgagtagtctgtagtagcacctatagaattttcacttttgtaatt

SEQ ID NO: 67399 - DNA, 1325 bp, Cannabis sativa
attatatctctaacttttacacttcgtaacaagtaactctcaatctaaaattttagtggcaatacttctcaaactctattttcgtttacaaatctaatcgaaaatcacacgtagatgatccaactcggcaaataacacagagggttttcaactgaaccttaaattggcaaaatagaagtggagttcaggaagtattgccaccaaaattttaagttggggcttagccctccataacaaatctagaccaaatctaagtggtaaaccttgattagatagatgcctactattgcattgtttgttattttaactcacaacaaattctctcatttcttcacacattcttttcccgatctagattttactaagtacttggatttctcttcttttttggatcagaggggcactctagacgactcataaaatagacaatgacttagtgaaggaggagatgaaaccactcatcgttccaattctgagtgaaagagagtaaagtgtagacatgacaagagtatgtacgatcgctatgtttcgagctccatgaggagtagtgtatacttttgaaatagtatcatattcatatatttagcagtgcatttttattgtcctttaagttgttcattcattctttagaacatgttagttttgtagttcatttaattgatcagctcattaattaaaattaaagcacaacagagatttttcacttgctgaaaattaaaacataatctatatattgttttcttttgatttcaactcggtgataagagcctcatttctaattgggtagggcaaagagaaagaattgtatatgttaatactgactccaagcatatggcttccctcaataaaactcaaaaatatttgtcaacccttttcttaatatcactactatgtgagattgtgtttcttcaattaaatattggatgtttttctggtctcattttgtttttgtttttatttaatcccctcactctcttctctatacaattgaaaatgaaaataggtatcactaatagatagctagaacatgagatttgtctcccaattatattacatatagtttaattatcccaaatcgatcttatcataagctactcatcatcaactatattacttatatattgtttaattataagctcacaaagttgttctatcaatgtggtatttaatttttttgggaggaaacaaaggtaatatatatgattgaatgattcctttcctttcttttattagtagggtgcgtttggaaagccacaatgtaattagatttgtgtgtaattagaggtaattataaaatttggcatgtttatctgaccatgtaatta

SEQ ID NO: 67400 - DNA, 661 bp, Cannabis sativa
  modified_base (290)..(290): a, c, t, g, unknown or other
aaattcttaaaaaaaaaaaagtcgactcagatcagattcgattcgaataagtcaagttggatttaatccgattcgagcatctaattttagtgggacgagacgggacaagacaaatctttatatgatttagatcaggttggatcatatccggatcaaatctaatccggcccacttacactcccacgtggtgtgcatgtaattgatattttatctaaatagacatatttgcaattgaattataatttagattacaactctagttatatacataaatttaaaaaaaaaaaaangagagagagagagaaagaaaggaatagaataattgatcaaatcaaactattgaagagagaatggtcctatagttttgactcaaaatgtattatccctaatatatttatatattttttttgaaatttccatgtaaattaaaactgaaaccagatttttattccatgaaagaagagaacttttagtctactttccaggctgtttcagtggtgagaaagaggcaataagaaaatcacaatataaaaaatagtacaccacttatctctctatgtgtggggttctttcactctctaacattcaataattcattgtcccaattgtcaatttaaacttttcctcttaataaatgtccaaaaagagcaacaacaaaaaa

SEQ ID NO: 67401 - DNA, 2926 bp, Cannabis sativa
aaaaaaaaaaaaaaacctaattagcctatattcattgttcaacggtaatttcgtgtcacatgtatgacaaaaactcctgtccaaaaattatacatatttttcatatgtatttctataatgtaaaattctacatgatatacgtcatggctgacagcatagattttatcttttcagtgaatttgtctagtgaaaaacaccaaccctcctttacaataagttaatagcaagactaaacaattgcataattaggttatgtttggagagcaagattgaatttgatagaattggatagattgaatttgatagaattggataaactttatacttttgctatgaaattagagagcatattaaaaaaattacaattactaagtgggagagaagacaattcattaataaattacaattaatattttatgatgtgacattttggatgtaatctgagtcttcccactatatattttctttattacaagcggaacaaacctcagtcttctttcatcatagtaaagactggttctgaatcctcttttaccaaagcttcattaaggtacctcttttcagtttcttagcaaaaaaaaaaaaaacactcatatagatatatcatcaccatcatcatcatattcatatcacatattcttacgttgattattctcttttcctggtttaacataacatctatctataaaaaatttaattatcaaaatatactctgcccatttctctatgtttaatttttatattttgaggatataacttcaatactttgcacaactcttactcaaaaatttcaaatctttatgtgacactcacaatcacaagtatgcctttaatgattttatggtgactttttcatattcttggcagaaaaaaaaatgaaaatggtacatcgttttggaggttggtctctttgtgtagcaatattagtattagtattaagctgcaccagcataccaagttcaaattccctgaggatcaaaaagcaaattaagaccaaatctggtgttttcttatcccaaaagtttgagttgggaccaggatcagtgatcaatagattttactatgacattgactttccaagaggtcatattgctgtgaagagttttaatgcagaagtagttgatgaagcaggaaaccctatcccacttcatgaaacttatcttcaccattgggttgtttacagatactatcaacccaaagatgagtatcagaaacataacatatcaaaactcatcattgctggcaacaatggaatatgccaggatgatattcttgggcagtactatggtcttggctccgaaactcgaaaaacgcctacttttgttcctgatccttatggagttgaagttggtaatcctgctgaaattcctgatggctatgaggagagatggctgctcaatgtgcacgcaattgatacccgaggcgcggtcgatggattgggatgcactgagtgcaggtgtgatctgtataatgtctccaaggatgagtatggccggcctttgaggccagattatagaggaggtctgttgtgttgctatgatcaaacaaattgtaaagtcagaaaaggctttcaaggggtcaaaagaagtctttacctcaaatatactgtggaatggattgattggactgattctattttgcctgttaagatctatatttttgatgttactgatacttggaatggtttgaactctgctaaacataattgcaaagtaagtgaatctttcctcctttttaactatctgaattttagcacactgaattactgaaattatcttaagctttatctcgactagtaatagattcttacatttaaccaaaaatttgttgtgcttttagatcgaatacgaagttgtggagtcatgtaaaggcactagtgtgactagagtcagatgcattgacaccaaaagcacaagggtcagcataccaaaaggtggatatgttgtgtatggtgctgctcaccagcataccgggggagctggttcaacattatatggagaggtaacattaacgagtagagtagtctgtattcttatatatataataatgtagaactctttaacaaatctgaactgtggtttttaggatggaagggtgatatgttcgtcaaatccaatctatggaaaagggaaggaagcagggaatgaggccggttacattgtaggaatgtccacttgttatccgcaaccaggctcaatcaagatagttgatggtgagacattggttcttgagtctaagtacagtagcagccaagcacatactggagttatggggctattttacattctagttgcagaccaattgccaaattcatcaaacatcttttgatcattttctcttctctttgagtctgtttttttcttttcacttttttaatctataacgttttctatctaatatgagttggtgaaatgcaaaatatgatgtgaaaaagatggtgaagagtactggtttctggccactggttccgacaatgcatcctagagttcataattggctgtaaaataatttaagtttcagtttggttgggactgtcatgtataaagtatttgtatctattataaattagaatgtaagttatgaaagtaaaagttatgatttcactttttccttttttcttctttttgtttattacttttatatatcagtcctggtattattgggaaaattttgatgaacaaacaaaactaagaaaaggaacttggcttgaaccatatcagaaaacattttccatagagaaatatttccaccctttctgtagtttattgaaatatgacttgggaaagtgagaagggagagatataataagcaaatgcattatagatcttatttatactagtgatcgagtacaagcctataagaccaagatgctaacagatataaacaaccaagactaacactgacaaatcaactgaacttaggcttt

SEQ ID NO: 67402 - DNA, 1290 bp, Cannabis sativa
  modified_base (763)..(769): a, c, t, g, unknown or other
catgtacttttctagcatagctgtcatgcagactaatttattgaaagtaacagtactatactatttgaatatcatcatcagataagtaagtactcaatatgcctttctaaattaactcatccatcaatataaaatatgtacaatgaaaacgattccacaaatttatattaccttttacagatacatgtaatattatataactgctctctaattaaacaaattaataactgatatatatatatatatattctctacacggcataagatcttagtactacgtacgtactagtgtttaaattaataatttgtttaaaagtttaaaaacccggaatttgctatatttatatatatagcaaagaatatttctttttaatatttatatattaaaaaaataagttattaataatatatagagacctgtgattgtagttaatgagcatattcaccacccattatatatatatggaattaaagtgaaaaaattatatgaagggaataacaaggaatgaggacctatagttgaagggtggtcgatcgagatgccacaatttagtcaaaaagaaaagaaactattggatcgattcctttttcagtttcttgaaaggccaacttaatatttaattaataattatatatatatattattatagaatattatagcttatgcatcaatggatatcattgaacttagttaatatccactaaaaaataactaaatggaatctttgacaggatgatgaatatattattattattattattnnnnnnnttattattattattattcatatatatatataaatgttttttaaatgtaagcataattaatatattgtcacttttttttttcttacctctcttgtacgatctgagctaaaattaaagaataaagttaaaaagaaataaaaagaggttataatatggtactgatgcccaactaaaccaaacccaagtactgacatggatgtcgggctattcacagatggctatgctttatatggattccattagaggtaatattaacaaaatatggtatttatttcagttaacctgttatataaatataattaattagtaaaagtttgttgatgtgtctaatcttaaattattaatgattgtcagtaatctatatgcatttaactgaacaaatttgtaccttatacttcacatcgtataaccgctcacaccgcatagtttgaaattctatatggtgtagttgcagtttgtatttttttcaaactgcacagtacagtgggatttgctgttgtgcatttaataattacaatttaa

SEQ ID NO: 67403 - DNA, 754 bp, Cannabis sativa
tattaaatttatttcatgttaaaattttgatttttttttcttgaaatgaatagaagagaaattaaaatataattttttattcagatcgagtaatcaagttatttagcatactatatgaaattttttaaatgtaaataacaaaatatattttagtgacctattaaaattaattaacatatctaattttattgattttaaaattttgtcactaaataagaaaagaaaaaaaaacgaataagttatttttatttcagtcatctttactgataatggcaaaaaaaatatatatttctttcatatcaaaatgattattttaaaaagtagatcataatagtataatccttaagctcaaataattaccgatgaaattagaaaaactttatcaagttttagaaaaaaagaaataaaaaaaaagtaaaaatatacatgaatttcatttctttgaaaaaaaaaacaaaaaagtaaattagatagctgatgttattaaagaattgagtaatagtttaaaaaaaataataaaagaaggagagagtcttcatgtctgcctcttactggttaagtggttaacaaacaaaaaatagtatatttcggtacacgcatactaaattatcttagcatttaaatgttgaaaggtattttcataaatattttagaaagtgcgcatgttgaggtaatttttttaaaaaaaaattagtaatttatttaaaagttcttaactatatatatatattttgtttttagatcggaagagcgg

SEQ ID NO: 67404 - DNA, 597 bp, Cannabis sativa
catttgcatggcttaggtttttcaactggggtctttcttgtgcacttgaggcagagtctcctgggtgatagacttagttccacttagttgaccctttaactactctggggggctacccttgtctctgattccatggggtgagtgtttttttagttttactttggacgtagcatgatctttggtcccgatacactttcccaacatgagtcttcaaatgtctcctgtgggacatgtggtcacttgcttgttcaatcagaaagtaactttgttactttttgacaccatattttggttccccgtcaccaggtgttgtgctaatttggccacagttgcatttcataaccccctattggtctttcaccgtcgactaaacgagaacataatgccttttttcatcatcatacgagattggtctagcggtcaggtttttagtatttagacaagctttctctcgcatggtccaaggttctcttttgtaggacgatttatgatgatgactatggggatcttccttgttgctaaagccctggcattcctctccacatatttcaccgtagtagttatttagacatagtctttatctctttagcttgtttt

SEQ ID NO: 67405 - DNA, 987 bp, Cannabis sativa
cttattcttgttcgcggctgggagtaccattttgctcgcttgcggctggctaactctttgataggtgtggatcgaaagcccgttagggatatgcctctgataccaatttgaatttttagaaagctagaaacagagaaagaagcagagaagagagtaaatcttttattctctgataataattatacaagggagaggttcatatatatatatacctctttagtagtgaaaacacttaaccaatcctaacaaccaaatacaacagacaataacagacttaacagaatacaatagaccttaactaactcttaatcattggtattgcttgtattgtcaacataattgaagcttttctttttcatttatggcttagtttgagatgggtttcatttgagatttttgagatattttatgagattttaagcttgaaagaaacactggctatggtgaaggagaacaaagactcatcaggtttgttatatataattgtgtatgttttccttctttaattttatttttgcttataaatcttaatgttattggttcaatattaacattcttctgtctatttttctattgcatgcattggaagcctttaatcttttttatgagagtgaaacatatcacatttagttctctatcacattaatttcactctctttaaaaaaattctgagctttcttttattatttaattttattttactatatatttttgtagatatatcatggaagtgcaacaattcaataaatcatctcagtctgtaagttgttatttttttaaggcataaatagttaatattatttaattagtaacaaatgttttagttattgtggattttatgccttttaaaatatttttttataattttttaaattatatccttttaaattagaaatttttacatgaaaaatcacttttgcacaatttattacctaaatactcctacacgcctatatctacttttttacttacaatgttggttttatt

SEQ ID NO: 67406 - DNA, 693 bp, Cannabis sativa
aaatgagaatggatccagagccgatgtagcgatgatatcccctgacggactgagactccatgctgccttgaggttaatatttctggcctctaataatgaggcggagtatgaagccttgctagcaggactgaggctggccaaagcggtaggagccaagaaggtggagatgtatatcaactcccaattggttgttaacctagtatttggagaataccaaacttgtggtgaaaagatggttgctaatgtctcaattataagagaatttctacaagaattcaagaattacaagattgaacgaattcctagggaagaaacgttcatgcggattgcctgcctgttggctttgaataatgagaaagaaaaactaggagtagtattagtcgagtatcttacagagccaagtatcaggcgaaaggcaaatatagcaacaaacaaacaaatgccaagttggatggacccatttatcaagtacataatgaagggagaattacctcaggaaagaggaatgtccagaaaggtgaaatatcaagctcaccgatacttggtgattgacagtattctctatcgaagaagactctgcatgccatatctgagatgtgtgtcaaatcctaaagctagagagattatacaagaggtccgtgaggggttctatggagatcacaccgggggccaaacctctccatgaaaatccta

SEQ ID NO: 67407 - DNA, 1312 bp, Cannabis sativa
agtattattattaaatattagtagcgtctaattatatgaggacatagaattttagaaatggttaataattttttataataattattaagttaaaatatataaaatctaataattagttataccaatagcgatataatactttataatgatgttggatactattgataccctttaattaacattttatttgtttatttactttttattgaaatattttatttattttaaatatatagaaacataataataattagaataatttgcggtcagactatcttatattttaatttttatacacttaatttcatgatttttttttttgtgacaactcttttaactttactcatgtttgcaaatttgagacgataattaaatttgatcgttaaatgccaattgagaccgtcactatgtaaatatgcacatgatatatttttttgtaatgtcctcacttcatgtctctattggatctttacacccacaaaattaatactcttatacacgggtacatcaatttaattgcttcttggaatgacgactgaccatacaaaccaacacgagtatttccagcgtgcgcgtcactcgcacgctcactggaaagactttccaagaagttttccatcccaagattattccaagtcaagcatacttaattttagagttcttaagtgaccggctaccaaaaaaaaaaaatgtacattattgatgtaggtagtatatatcaatccatttaagtcgtattcaactgtgtaattccatacttacacagtcttagaattatcacacttgacctttccgaaacgatgtgagattgcacatctcctagtcttacgtcacatttttattggtccaattaattttaattattttttatgaattaatattaattatttaaatatcataaaaatcattataaaaatagttttaatttaatagttttctttagatgaagttttaatttagtaattaaatttaattgatatctcaaatttgtaaacaaaagtgaaattaaaaaagtattgtcacaagaaaaaaaaagaattaagtgtataaaaattagggaatatactcatttaacaccttgtgttttctcaaaaaatatatatgatactttgtgttttcaattatacttatttggtacattgtattttaaaattgtacatacagtagaaccactatctaagaatattctattaaataataacctttaatttgttataagaaaacaagtcctaacttgggtcaattataaataagaataacatctaaattgtaattagttatacatttgttaagtctcgtattaacaaagtat

SEQ ID NO: 67408 - DNA, 937 bp, Cannabis sativa
ctagaaaggactgggatccaaaacatagatccgaatctggacttgaggcttcgacctcgctcgtagtcactgtttgaatccaagacctgaacgcagatctgtactcagaccctgatttgaactgggatccagacacgatcccggacccgcaatcagaatcagactaggacagggatgagaaccaagacttgggactttaacaggccccaaacaacccaaactcatacaagaacccataccaggacatggacccagactaggacctgtgacctgggacctaaaccaagattgggaccttgacctagacatggaccgggacccagacccacacccagaccaaaaaattgttgccaaacccaggacccacgaacaaaactcagacctgggacccgaattccagacttagactgtgactaggtcccgaagtaagacccaaacccaaactgggacctagactcgaactgggacccgagactcaaacccaaaccggaacacgaacttagacatggactgggaacaaatacccgaacatggatgggggacccaaacccggtaatagggcccccaaactggggccagaactttggcctcaaaacttggatcaggatccaagaaccaacccaaaatctaaacatggacgtaggacccacctcaggacttaggattagggacttgatgcttgaacccgaccattaccccgtgacttgaaagtggaatcgaaaccagaagctaatcgggaaccatgaataagagtaggagcaggaccttgatcgagacccaaaacagttacaacacaaggacccagattcaaacacagacccacacaaggatttcgtgtttgggttcgagttcgggtacgagtttgggtcggggtttgagtcttggtccaggtcagggtccatgttctgatcacggtctgggtcccagtccaagttcg

SEQ ID NO: 67409 - DNA, 626 bp, Cannabis sativa
aatttaattattatcttttaaaatgaaaaatcagatcagatattttaaaatttataaatattaaagttttatcttctttttaaaatttaaatactatatttatcttattaggtattttatttaaaagagataagattctaatttaatccatatattttaaaataagaatactattagattttaatttgaaaatatattttcggtattaatgaccaaattttttcaaataggcattaaattttatttattatttaaataaaattgtacaattatcctactttcataaattactatattttgttttattttaaattatttatcgcaaatattttaacacactaaagctaaatactaataaaaaaggagataacatccttgaaaaaattaacttctatctagttttacagaagctccttgatatgtgtcgcagtcatttttggtgcatcttcaagagcaggcatgtttggatgctcagggttgtagcctgcaactcctgcagcatccccggcgttcgggacatcaccattcaagttaaagtcgatgtcgtagagagcagcctcattggcatgctgctcacattcaccaactaagaaaccaactccgtttttatcaaaggctacccattt

SEQ ID NO: 67410 - DNA, 502 bp, Cannabis sativa
aacagaagattttgtctgtttcatctacttgatgacattttgaatagcatctatgaattggatcataatggaccaataaaaacaattttcataattactttttctgctaattaatttgattccagccctcgtctttttcttcaaccttcagactttttattcttatatttttaacaaattttttgtttcccccaaaaaaatttctcaagtctttgtttaagattgtagatttattttggctggaacacaaacaagaggagagacagattataatttcctaaatattattattttgtttaaatgtattttaaattgttcgttttctaaatataaaattttcattaaaaataaatctatcttaaaatataaataaattttataatgtaaactaaactatgctaatcccataaaaaatagccaatttttagatttccacatttatgtgaactttttttaaaaaaaaaaaagtggatgtacctcaacagaaaaaaaaaaaaaaaaa

SEQ ID NO: 67411 - DNA, 707 bp, Cannabis sativa
  modified_base (677)..(681): a, c, t, g, unknown or other
aacaattataaagaatggtagagacacatttatctgttgactttgaaatgaatctgtttaatgctgccattcttcctgttaaggcctaaacctccttcgacttcgttggtgaaggcatctcgattagggccttgattttttttctgagttggctgcaattcctctcgcatttactatgaaaccaagaaattttcctgaggagacctcgaaagagcatttcttcagattaagcttcatattgtattttctaggtatcccaaggcattcttcgaggtctctcatgtggtcttcattttttatcaaatttaccagcatatcatcgacatagacttccgtattttgcccaatttgttttttgaacatcccattcactagtcgttgatacgttgccccaacattttttaaacaaaaaggcacgactttataacaataaagtcctatatttgttacaaaagtcctatatttgttacaaaacttgtgtgttcttgatcagggccatgcactttaatctggttatatccagaacatgcatccataaatgtcattagctcgtgtcctgcagttgcatccaccaaggtatagaacaagaaaaggagagattgcaactaacattttaggagtttgttcataagacatgccatctatatatgttctacctgttaggttttatgccctannnnnaactccatttcaatgtaatctatttt

SEQ ID NO: 67412 - DNA, 1614 bp, Cannabis sativa
tgtgttgtgtgataatgaaaatttcgcccgtggatgaattatatgtggtgttatggccctaggggcagttttgtctttttgaccctttaattctactttcaataaaatgtgatgttggataattatgaaacacattttttgagttgttttcctcctaccctaaaccaaaacccccctctcctctttcacctatcttctaaaaaagtttagactttgttaattgttcttgaagttggaggtgtttggagttgaatctattgtgggtaggtgcttgaatttgtggtaagctcctaaggttttcttgctgaactttctatttagatttgttgtagtttgaaaagcatgctctattcaaaaattttatcttgaatgcatgtgtaaaggattggagtaaattgatggctatttggtcgtttgaacttgttaaattatgagttatgcatctatacttgttagtgaatttttagggttgttttcagagttagaaatctgattattggccttgattatttttgtttgcgatgtatgtttacatgagaattaagcttgaaattatgtgttttaatgccctaccatgatttggtaggtttgggataattttgcctaagtttcaattgagttaaatatgattttcaaggtttttaaacccagtggtcgcgacctattttagtgttcatgacctagtgctcaactagagagggtgagtcccctatttgggctctagtcgcaaccatcgcaagtctggtcgcgaccatggctttggcagtttattatattttttatggattttgttctcgtcataacttttgactcgggactccgtttgggacgttctttttatcgtcagaaagctcatttcgacctctatattcttatctatattttgaatgccaattttataattatgtgagaatggatctagggattaacccaatttgtgaatcctaaaatattgtgattaggattaccggcacttggtcaggagcacccagggaattggaatctccacatttgcgggacatcaagtaagacagtagtttgcacatagatttaagcgtggtggcactcatattttatattatggttatgattagttaagaactgagattagggttattaccctaaaatgagcggttatatggtctagggttattaccctagtaattaaatgattttgagtgttatgccatgctaaatatgttggaataaagaattatgtgctcaaggaataattaagttaaactcaataaattagtacattgagtttgataataatgcgatctagggttattaccctagaatttatataaaggtaagaaagcaatgatgtacaatattattgctaatcaaataaaagcatgaattagggttattaccctatataggtgttattttgagcatgctataatatgtcatttgcgtaattatttgcaatgcgagttagggttattaccctaagattttatatattatagtatatattgaatgtacgcatatatggccaaagttatgtgtataagataaactgagttagacctgatatatatcatcaagataaaccactgaaagaacataacgtatgaattacatatttatgaatagggttatgcgggc

SEQ ID NO: 67413 - DNA, 907 bp, Cannabis sativa
aggttccagcaacaaggggcgggcggcggtggggcggcggtgctctgagcatgccacgagcatgccacggcatctgggtgcagaacccagaaaccagcagcccttcacttcgaatttcagccctaaaactcaatctttcttagcaaattcacaaccaaatcacaaatttgcatataggattaatagcacatactagatactcatctatcatattacatgcatcaaaatcccagaattcaaattgctcaaaaacactcaatatcatgcttaagattaacaaaacctaagctcaaactcaagaacttcaaaaccaagttctttaaaccaattccagcaattaaacattaaatttcacacctgaaatttcaacctagaattaccaataatctcaacccaatttaataacaagcatacaacaaaccaaactcaaatccaatccaagatagcactaaatcacccaacatgtagcaagaacaacctaacccatgcataaccaaaatcaacaaacttaaacatgtttctatcacaatattcagcaaagaaacataaattaaaatcaagaaaactacctcaaatacttgcacaatcaagcctcaagcctcccaacaccttcctttcaaacaaccaacttcaaataaactagttcttcacaaattaagctttgaaaatggaaaggggtgaaagagagggagagggttcggtgagagagagagaaaaccagaaaaatacaattcattttctctaaaaatccaataaattcaatttaattcaataatggtcaaatgagcattttgcccttagggctataaaacatacatattcattttcaagggcataaatgccatttcacactcaaatattgccaaataaatttcagattataacatatcaaataaaatgccaaata

SEQ ID NO: 67414 - DNA, 844 bp, Cannabis sativa
acctcgcttatggcggaaaaatactgtggaaacaagcaacacaaagggaagaaagaagaaaaataacaaatcataaacacaacgaaaacaaaagaaatagtgcacaactttttacgggatgtaaagctaaatgaccttaaaaaaaaattattagctacgaaacttttatttttaaaatttaactacattaacattttcttttaataaaacttttatatttattttcaataaaaaatagaaaaaaatcatattaaaaaaaaaaaaaacaaagtcctccttcacattgggatccccttcacttcacatatatggttgataactttaggaattagagttattttttacatttttttaaactaaaattggtttagttcttaattttgaattaattagttaagtttttaatcatttttgaatttattagttttatgttaattttataggtttttatgtatttttataattatttgtgataatatgatatgtgttatttattatatattttatttagttttctaattaatttatctatttttaagtgtgcttgtgagaaaaagattgagattaaaataaagaaaatattgaggaatggagtagaaatcagaatttacaaaaattattcaacagataccttgcacgaaacccatcgcatgttatgaactgctcgaaaggtgttcgatgaaatgcccgaaaggaatgtggtttcgtggaatgttgtgttatcggggtatttgaggtttgggaatttggaagaggctcagagggtgtttgttaagattcctagtaaggatgttgtttcagggaattcgatgatttcgggtttgtttgaagagatgcctgagag

SEQ ID NO: 67415 - DNA, 681 bp, Cannabis sativa
caagacaccatttatgacatcgattgtgaagatcaaatttgtaactttgagcaacattattcttgaatataaagattggtcgcaaggtggttcctccggggattagatccaagcattaatcgcttgagattgaatctcgtcaattttttttgtctcttgattctgatactagaacattatgtcatagcatcattctattattttagttattttatggttttctttaattattattattattttttatttcacatcaatattaaaaccaacaagttcttaaagtgtgattatccacattataaatgatatgaaaaatcactagctaatgttagagtgccatattagtgtgatgttgagcttcttaaagcactaaagggtaattctcttaaatatagtgtggagatgctattatttaatattttatgtgatttttttttttgtatgaataatatatatgaggttatttataatataaattaaataaaaatatagaattaggggcagacccacatagagacaatggggtaattgttctctaaaaaaatgtatatacatgttagttagttaaaacatacatttatgaaaaaagatgatatttatgtacatcttgttagttttggtataataattaagctactttacatatataataatgctcaagggttcaaatgctaactagag

SEQ ID NO: 67416 - DNA, 848 bp, Cannabis sativa
  modified_base (804)..(806): a, c, t, g, unknown or other
tatagttaaatttgtttagtaaccattcatgggtaataccattaagaagtgttccttatatatatatatttggaatacttcttatataataacaatgttagaaaaataaaaaaataaaaaaaaaaaaattgtagtggttgttttcttaaaaaatatattgtgacacttaattgttttgtgtatttattttcttgatattctgttctattatattacttggcagtgtttttgttttaattatttcaaaatcttagtcgtattaaacatgtagggatgatatctttatagatcagtattaaacttaaataaaatatgatattttatttttacgtattttatatatatatcaagttaatacattaaaaagtaagtatgtaattagatatctatttaaaaaatcgatcaaattcaattactaattagattgagttggatagaattttgaggtcttgttagatttgatcagatgatgatattctaaataattttttcaagagaatggaaattccattggtaggcacatcagacaatattccattacatgatgatatatcattcaaagaacaaaatcaacaagatagccaaacataatgtttacaaaaataggaatgaaaaccctaatagcaccttcaactaaaatatcaataagcctctagggttgaagcatcaagaagtgtgaagaatgctaaatctccaatccaaatgagcatgtaacaaatcacaaatatcaatgactatagtcaaagatatatcttctaataaaaattgggtataataacaaccctatgtgtaaagcccgcttannnaatttggaaattatcagttaattgtgattaattatgaaatta

SEQ ID NO: 67417 - DNA, 1118 bp, Cannabis sativa
  modified_base (489)..(495): a, c, t, g, unknown or other
ttaacacaagagcgattccagcactcaggcgagacagttagtcgatatttctacaaggttttagatgttttatgtcatatgagtatagatgtattcaaactaccaaacacagaattcaaagatattcctgaagagatattgaaagattctagatatatgcctcattttaaggcaagtcatacattaaaattagatatttttttattaattttttctcaagctagagtataattttataatctagtattctttttctagaactgtattggtgcaatagacggtgtacatgtaaatgtcgtaattcctgaagatcaagtaccatttgttggtagaaaaggggtaccaactcagaatgttatgacaatatgtaattttgatatgtaatttatatatgcatatgctgagtgggaatgttctgctcatgatacaaaatttttttattcagctttacgtgattcaacttcaaattttccaaaaccaccccaaggnnnnnnnctaaacacatttataaattattaaagtctttataatttttttaattatgtttttatattttatttgacaagaaaatattatttagtggatgcgagatactcacaaattacaggttttttatgatcatataaaggccaaatataccatcttctacaatttcaacaaggtagcaaaccttctggttataaagaggtattcaaccaagcacattcttctcttcgaagtgttattgaaagaacttttggagtatggaagaaaagatggaaaatattaagagatatgcctagttatccataccagaagcaagtaaaaatagtgattgcatcaatgaccttgcataattacattcgaaagcgagctttgaaagatggtgatgcttggattctgtgctctttgtagctgcttcttcttcatcttcttcactttcatcttcactttgactataggctcggtttgagagtatgcttcttctgcagattgagccataaaataagggggtacgtcatcatcaaaagtattcgagtctttagactcgtcactagtacccgaatcttgggactcgttactagtatttgaatcttgtgaccaagtttcagaattctcttcagaattttcttcttggt

SEQ ID NO: 67418 - DNA, 892 bp, Cannabis sativa
tagtattatcattaatgtaaaataattacttaagattaagtaatcactagaaataccataaaacttttcataaggattaagaattttgcctaagtctttcgaataaatattgtaaaaaaattccctatcttatactcataatattgataagtcatttctatccatatgaatggttaaatttattttcttagttttattctaaagttcctatcttgatcataacatagtaggctatcactagtctcatccaaataatgatgagctggaattttaaaattctcccactaagataaggtactgtgatactatgtccaaaaactttattggtatcaatctctattactacagtaacatgttaattgggacacttataggatcaagagtaagttctcatagtttgctagttcgtttattgtattatatccatgtctaatcaaaaaatgtgtgtcatagagactgtggtgtattgagtatagtctagagttcaaagttaaaatttgaactgcatataacaataacttcttccacccctaagtgatgtagagattctatgaagttttgaatatagtatagagttcaatagatctaaaagatctttgaactgcatatattgtttcttaacatctttcacccctatcaggtaaaaatatcttttttattaaacaaaatcttaataattgcttaagaaatgacaattatttataaacattgaatttaaattctaagtgtttaagtggtattatctctttacagatattaaaaataccatagattttgtctcattaataaataaataaaaaaacatacaagatcattgcaaatagaattaagcccatcctacctaatattatctcccctactcaagctgccttcgttcctgaaaaggatatac

SEQ ID NO: 67419 - DNA, 1443 bp, Cannabis sativa
tctctctctcagtcaagtgaacctatttgggtggatttaagttgttagttatataaatgagaccaaattagaacatggatactacacatgagctgaccccacccaaataaaatatagcataattgtctatttcagctgaaaatgaaagagagttagttttagttgtcatacattgtctgtctccactctccacaatttactatagattccgatcactcaattttttgtgatagatagcctatcaacattgttagacaaatgaatgataaagcaaagctttctttcttccttagtataattagacaagtttcatgagagttatattggataacaactcaacattataaatgatattttcatgtcttaatgaccattcaagctttgaagataaaagttgcagcaacatgtcttatggcgtcaaattcttttttattggaaagaaaaccttagcatgtgcatagccaaattccatgcactgagactcgtagggtaataaaaaactaaaagtagaagtacatggacattcacatactggctctttgcgagaatagactgaaggcataaccccaccatcttcagaagcatgcctctctaactgaattagcagacagactgatgctgatggagcatctaaatgaaagattccacgagactcagatggagcatttgcctggaaaataccacatcttgaatattcagatgttgcaggaatggcaaaaataaatagacgtgggtgaggagagggaataagaatagaagtttctacaacgtccttacaacttacatcttgcatttcactgggtagcacaagaaaatggaagtcttcagacaacttatctcttctatcacaattgtataagcaaattgtaccggaaaatggctctataaaatatataaacatatgtatagagaaagagagaaacagagatcagaatttaccacatgcaactcaaaacaatagcaccaatacatgagtaaactgcttaccaactagtccagcttggaatgacaaggatagaactttcacagaaatcttcaatccactgaaacaaccaaaagagtgagaaaagggatgaaacagatcagtatggaaaaaagtataaaaggaccaaaaatttctactaagcaacaatattttagtaattccatactgagatacaggagtttttggaatcctttgaccaaatatcagtgatctttcgttttcccagtcaaaagccggttcataagctggtagtggggattgaccaaaatgctgcaaatattttttttgtttaacaactcatcaatcctgaagtacactagaatgaagctacacgtatgataattgctacaatgatccagtagaaataagatctgagccagcaaaacctttaaagtatttgatagtgatgggtcagaagaagtactagcctcagtaaactgcagtcctgagctacttgg

SEQ ID NO: 67420 - DNA, 1419 bp, Cannabis sativa
ccttctttgctttctttcgctttatcttcacctttttcttttctatttatttatttatttttcatttgagcacttatatatacatatatgtcattattccttctcttagttctatcacactaattaaataactaacacactattattactagatgaattaatatcatttgtgtaattttagtgtaacatctatgttctatctttaaataaatatatttttttactttttatttttgttagaattttagaatgaggtgaatggggttctattttaaaattaattggcaatgggaggagtaactcattcatcttatatgtcacaatttatttttacaaattagcaatgtaagactaactcataataatttttgtttaagaaatacatttattgattttaaaatggtgtgaatcttaaaatgatatggggaagtgtatgattttaataaaatagagcaagttaaaagtagggacaatgaaaggataaaggtaacacgtaatacaattttggagaaaaaacaattcatattaacatgatccgtgagcgtgagcaaagtatcaaaacttaaaatttttaaataaatgtttttgacaaaacttagttgtaaatgactagaatgtaagtacaacataaaaattataaaccgatattcaaaagatccttacgcaaacctaaggccataattttcgctcattgttatgcggcggccactaagatttaaatttgctttggcgttttagtaaatgctaaattactaattttgaaataattgtgctatttatctatatgacttttaattaattttgtctttttggtaattgagccagctcatggctttgcaatggccaattgcccctttcttcttttttttttttttataacacaattgcccctttcttcaccaacccactttccaactttttagctttctatattattattattattatattataatatgtaaacacaaagtttaattgattaattaattaatttctttaattgagataaatgtacactcagatatacgaaaaccccgtcttctttctctgaagagcttacaaaacttttggcgttttcacttttatttattttttttagggaagggatgtccttaagcgaaaaggagagcctcaagattacaagggtcatcaccaatccaaatagcagtttcatctagctccagaaataattgtgccagattgtgagcaaatgtatttgttgaacgattaacataatggattgtggcattggggaggtgagacaaaaccgtctgaatttgcttgataaggtctccaaagagggagatgtcttctttactggcagataacgtgtttgtgatccttttgcagtccgtttctatttgatgaataggagaagattcttcaatgcacgaggggagcactttgaggatggatttt

SEQ ID NO: 67421 - DNA, 1419 bp, Cannabis sativa
  modified_base (297)..(302): a, c, t, g, unknown or other
  modified_base (1377)..(1390): a, c, t, g, unknown or other
aaataacactatgtttggataaagcaatgtattgtagtaattattacgaccaaattttttaatacaatgtatgttgtattatttaatacctaataaatggtcagtgttagcttgtattataatatttacaaaagatttgaggtcaacaccaatctccgactcagacccagacccgagacccggacctggaccctgacccggacccgaacccagacccggacccgaattcggacccggacccagacccggacctggattcagacccgtaattggtgttgggatcgagtgtattaaaannnnnntataactttacacaatcaattaatataagtcaataccaaacattgtattgtattaaataatactaatacaatacaacacaatccaatataatacaatacattacaatacggcataccaaacgaaaaatttagaataatatttgctgtaacgtatttttagtacgattttttaaattttttaaaacttctctattttaaagaggctcttgtgagtgctataactctcttactagtctttattgtataaatactgtcttgtattttttctttttccttttgcataatgatagagttttctactctgcttttactgaaatactttatttctaatattccaactccaatctaaaaacgtttataaggttaaaaacactaaagtgcctttaacattatacacaaatagtaacacaagtagtaaagtagaatacattcttctgagtaaaattccttgattttacacatgagtatgaaaataaataataataataaaaaaaaatacaacaacatcatatgaaagtataaacgaaataatacattgaaaagaagaaagacgtcacgtgaatccgaatcactgttctggcattatatatatatatattctcagaattattttggctccattaatcgattaactcccccacattagtcatcatcctgaaaatattaattagttaattaattgacaagtggaaatggtttagattagtttaattactgttaaatcatacatacatacatattaattagttatatgatttatccttttcatatagtctcaaacattatcaacaattcaaggatgtatgcacatagatataagtatatgaatcaaattaatcatgataattaatagactaattagaatttttgccccttaaaccattgaggttattagatttaaagacttttgtttaatttcattcaattttactatttcattaattgtttatgtattgaatcatgctcatcaaattttgatatctaccaaatcatgtccctcgaaccttgatatatattaaatcatgtcctttgaactttcatctatgttagactttttttactaaaattagacaannnnnnnnnnnnnnaacaatctcaatagttcaagagatatttt

SEQ ID NO: 67422 - DNA, 1074 bp, Cannabis sativa
  modified_base (780)..(782): a, c, t, g, unknown or other
aaaaaaaaaaaaaaagaactaaatggagatgacatatgcatattgtttgaacaacaactaaacaattactgctaattcttatgtgtagtccgactcagagtctccttattaattaataagtgagattaattttagtatatattaattaatattattctcacacataataaattatcatatcatacaaataatattagaattaaccattcttgtaattcaattttattattattattatacatgaaaactctatggcgtataccttgtactccatctatttcggcattaaaggataattttttttttcttcataattatatatatatattgtaattattaaatgtattcggtaaagtataataaaaaaaattcaaaaaaatttaaaacgccgaaaaattaagttaaaataatttgttatataaattcatatcttttttattttatacatgtgtgaaatagattatttcaacactattttctatattgtgaattattttaaatttctcaaaattttattaaatatcttaaataattataatatacacgactataaattttggataccaaattaataaaaagtgtatcggtacattgttttgaaaaatgcattgtaaaagctccctaaatatgacttagacttcagcattcattcactacaaaaaactgttacatttagtgacaactttttaattacaacataaaatttttgtgactaaatgtgacttttagtcacaataaaaaattatttgtgactagcatttagatacaagttgtcactannntagttttagtcacaacaagtattgtgattaaaggacatttagtcacaacaaattgtaattgtaatttttgtgactaataccttttgccacaaacttttcaatttaatcataacataggaatgataattcataattaatcacaacttttttattattgttacaataataaataggcccaatatctgtagtgctaactcaaacggagatttttggacaaattaataaataatgtataataaatagctaggttagtaatattttgaaggggaattactctatacactattttttt

SEQ ID NO: 67423 - DNA, 858 bp, Cannabis sativa
ttttttttttttgaaaatatatgtacataagttagttattcttatggttaaattagtattaattggaagttttaaaagtctattactgttttttaactattttaatttttcttctccttaattttgttacttcatgattttttttgctaaacatgtgcttaggttatataatgaggcacaagtttgattatttcttagtaacgtttttttttttaaatgagaatctacacaaaattgatgaaaaaaaagatatacacgcaaataaaaaaaaaacaaaaaataaatttaaagttgaaaagatgaaatataaaaataaaatttattatctaaatgtggatcgaaattgaaaaaatttaaatatttcttattgttatcatttgtcccccaaaagaagttcaacttaggtagaaagacttttaacattagccacaaaagtcattttaggacttttcttaggacattaagattgacatggaaatggaataatgtttgatattaacaaagtcaattataaaaaaagacattgttttaatgtcccaacaaatttttttagccaaaattcaacattcaaacaaatttatatcatccatttacatatttgtactcgataaacctttcaagacttcgacatcattttttaggattctcgccctttatcttacgttaattattgcaagccaaaatgagagtggtttgccatctacatacttatcgagtactcgaagaacttttgagctacaatcatctaagactcgagcaacattttctaggactcttgccgcctaacaatgtcaagaaacttcaacgaaaccctacgtctcctgtccaatcccgatgcaacgaaacattgcaactcag

SEQ ID NO: 67424 - DNA, 691 bp, Cannabis sativa
ttattattattattataaattgaaatatacaatatatatttggataaacattccaaaagacaaaattaaaagcatcgaaaccctcttctcaccctctctcgagcaagccaaaaccaacccaacaacccaagttatttttttttttattttctttgtccaaacacagcccctccaaccctagtagtagctaagacgtaattcaagttgaagtggaagctaaggaaagaatttagttctctcttttttggaaaagcttaggtttatgagttgacttttggttgtgtagttgatggggtataggtaagcatttggttttgtttctggggtgttttgggattggttttgatgctcattcgttaggtttgcttgttgtgggaggtgagagccaagtttgagtttttaagctaaaagcttgagctctcgtgacaattttctattgagggcatgattttgatttttgtcacatagatattgttatatggatgctataggattgttctgttaagtttgaaatcaatgagttaggttttggtaggattttgagaagttaaaactcgtggtttcacgtttcttgtagaaaatggcataccgtttttggaaaaatggtcaaccatgttccctgccaggaaatcccaaaaatggtttgccattttttaaatggcttaccatttttagtgatgtttagaacctc

SEQ ID NO: 67425 - DNA, 720 bp, Cannabis sativa
gggtttaccattcgattctatgtaacctatgctcggtttgttctgttcacattttattcaactagctcaattaaaagaaaattgtaataataacacaaatatagtagtgtaatttttttattttttataaatataaatattaatataaaaaatacttttcaattgagttggtcgagttagtttaggttaatgagtatattagtattaattttaatctccctaatataaagattaggccggttatatttttgtttagtttttaagtttgtattttttgtcgtgttacctcgatttggtttgagtagattgtttgggttaggtcgtatacaaagtacatccctagttgtgggtaaatactttttttgccaaaagttataaattgagtcatttattttgttaaatgataaaatgaatcatgtattttctaaaatgatacaaataggaatttaagttcaatttttgataattcttttttaagataaccattttgaagacaattcctagcacgaataaaagaaaatataactagttttatcataaattagattattataagttttattttgacaaaaaaatcaattttaaggctctttttgtatcattttaaaaagtacaaggtttatttttgttatttaacaaaacaaataatctaattaataatttttacaaacacaaagtctaaaataatatttagctttgtgtgtaattgggttaataatc

SEQ ID NO: 67426 - DNA, 2331 bp, Cannabis sativa
tgtcaagcctaattaacatacagaagaatgtgaaccctgtgtgtctgatagaggttcatagtgtgtacccggaagtcaatctcagtttcccttttacttttctacaaaaaatacgagctcttctcctaagatcgtgggcagagaataatatcttgtctaaaaagggaaagtaaaataatttaagatcaaataattaatatcacattaatcaaagacacggtggaacaactatcaccatgattaaatctccacatcagcagacacgtatcatctcatgggttgggcttcaccagataagcccaaatctgtgtattatctgtaaactccccattagaggaaaatagtaaataagtacgacctctattagtctactaatatatattgaatccttcatgctaagggttagaaattcttgacttacatgctcaagaagagaacatagtgctcatacttattgtaatcccttaggcatttatagcctatctaataattatacttactgtaatcccttagttggacttaggcttattaactttgtcaacttcacccgaacccagtctggtcttcactacaatgaccataaaaagggtgatgttgatcccaatgctaagacgagagatgcagaagatccaactgaggcgaccagtcaccacaagaaggatcaaattgacaaggatactattcctcaagatccaatgaatgaagaaagtgaatcaaaggaaattatttctactgatcatgaagataaacatcaaaatatgcatgttgatgatgacgctgaaaaggaagacgatctagatgagtcatattttgtggtcattatggccagaaagttgaaagaaactgaagataaattgccattgcaagagaaattctctttgtccatgcatttcaaaatggaaagaatcgagtctgtaataaaagcaataactactgcaagcaaagcttatcatgctgcttcaaaagataacactacagggaaagttaatctcaaaaatcctaaaacctacgatcctcataaggacaaagggaaaggaaaagtaggcaaaacttcaaagaaggctgcccaaactaaagaacaaagggaatccaaatctgtcagccaacctcaaaagcaaaagaaaggaacccatgcttcagggataggtaaccaaactaattctagaagcagaattgcgcagaattgcaataattttgttaatctaagtgatgatgttgaagaagtgcatccctcaccacatgacaaaagtttgagtctttcaacgaatgatctgcgagcaaggctgaatctgaaaggagaaaaggctaaaactgaaaagctagacctcacagagacgactgaagaaaccacatcaacgattgtattcacagaagagaatcgccagagactacaactcaacgtttagagcataagattgaagagttagcaaagctcacaagaaagatctctcagaagcaaaatgaaactgtgtctaacatggaggaagaggatacaaagccatgtgtgaaaataatcatagacacttagttattggagcatttcaaaaggccttagatggaattgtacgaagaaataacggactccagggaccatccatccatgtacagccgaatgatgcatgtcgaaaaagctataaatgatgcaaagcgccaatgtttttcattaaccttgtcaaaattcgtggaagaatggtggaaaaggttatctttaggttcaatttgtaattggaagaatttacagacaatgtcaaaaaaataattcatagcagtaaaggattttgacttggaagttagttcattgatgaacattaaacaacaataaggataaagccttaagaactacatccagcgcatgatgaatacaactataaagacaaaggttaatgatgatatgaagattgtggctttgacatcactaatagctactggatccttgctatggggagaacttcaaaggaaaatggcaaattctttatttgacttcttatctagagcctaacaattcataaacctagaagattcctttgcccaagcttatggagcacttcctgcacctacaacaactgctcaaactttgtagatgacttctctggctatctttcatttggcaaccacatttacaactcccacagtttaagggccaagtatttccgtgcaaccagctacaaaaatgagtttttttaactttggagcagcaccaactagatacagtgttgttcctagacaaaaaaaaaaacaaacaaatggatgttcaagagtaagacacgagtcattcccaaagcaaaagaggttataaaccaccaagccaaaaagagtctacaaagaaaggga

SEQ ID NO: 67427 - DNA, 1350 bp, Cannabis sativa
tttgttattgtttactgtgattttcgaaaacttaaggaaaaatacttaagtaataaataggaagataatttttacgtggttggggtgttaaagattcttagttcacgagtgaatattattgaaactctctagctatggagtatttgacacaagtgttcttgtcaaatttcagtagaatttctagccaaaatttgtaaccctttgcaaggagtaaggtcctatttataggctgaaaccaagttttcaagtaaattcagactcgttaggattttgtatcttgaaataagttcattaatggggtaaaatacatcattatattgacattagacccgtcaggtgaggtccaatttgtgagataaccatcgtttgtacggaatagtaccatttgatggtgacatgtgaatgtgagttgtcggcaatgtacaatacatgtcaagatagtgggcattagacaaaaaaaggtatattttgtgatgtgcgcccttcccaagtttgggacaagcccctggttctgtgggatttggtgccagaaggatgccacataggataacacttgggcatttcttcgactgcccattccaaattaccacatgaaggtatccgggtatgttcacttaattccttccttctctggacgagaatctcttctgagtctaaaagtctaatcttgtagggattagggttagtctgagatttaatctagagtcgcggttggacttcgtcgtgggtttatttacgggcttaattgggcctgtgaataggcccatcttaattaattttgaaactttaaaagtatacatgttacttatccggaaatacggataataattattatagttgtttatgtcttttgtgacgctagttttagttgttttgtaggatttttttttattttttggttgctggtttagagcatgtgttaagttataaattgtaataagtgtggttaattatttatttggtcatctctctttgtgagatttgtgagacttttttgcttgaccgattgggttttggcccttttaaccttaatgaaatttcatctttaagaaaaaatacagcatggatttcattccgttttcatcaattcgatgtcgttttcaaaacatgtgaaggttttgcagtacgtgttcctctgttgttccattgtcgttttcttcaaatattataaaccatcaacaaagctaaatgttgtcgtttggatctcagaccaatcttccactgcaccgcccctaggagcgagcgagtcccctctcgtctcttatttgtttctccaccttcgacctaaccgctgccgtggccatcttctccggtgagtattcacttctttctgcaccagcccatattttc

SEQ ID NO: 67428 - DNA, 692 bp, Cannabis sativa
tttttaacttacccctttcttaatatcgcataccaaacaaccccttaatatgttagacacccacgttttcacggttggattgtcgtagtagtaaactgaacctttatccgagtttcacattgtttttgatattattgtggcgtttgtaatattttttaattaatttttttgtttttaaaattaaaaaagtggaaaaaaaaaatatgttttgtaaaattatttttactttttaattttttaattgaggattaaaatttaaaaaaaaaatatcattttaatggtgccgtttggtaacacttttgttttccaattttttaatcacaaaatgaaagtaaaatttttatttttaaaatttttatttttgaaaaataaaaatatgtactgtaactatgtttgtttttcaattttaaaaacaaaaaagcaaaagtgtgtattgtaaaatttatttttatttttattttttgattttatttaagtttagtttatgtccgagatcgaattcgagttcgagtcagaggtcgggttcagtgccaaggccatgggagggatttgggtccaagtctggtcggagtttaaagagtaatttacggcagaatcccctcaactatcaatttacttacagaaaaccatccaacctcatattttggtgggaaaaccctccaaagtactgtttcatttacatttttaaggtg

SEQ ID NO: 67429 - DNA, 592 bp, Cannabis sativa
ttggaagaggtgatgaagggaccctctttcaccgtcttcctagtgacgaggagacgccgaatcataattacggtggcttcggagcttggagctaaactcacctcatgtccggggcgatgcttccgctccaggattacttcatcgattttttagtttttgttggccttgcgccttaccaacttatcccccaagcataccgcttgctttcaggcttattaattttttatgttgccagaggctgggcttctcctagcccgactaaaattttgtacttttatgaacttgtatccgtccccaagaagggagacaaacttaaagacggttaacaaataccatcatcggtttttcttctcctccagttttcaagccatcgagcgccgagaactgcttacacagtgggtcaggataccgccgatgcaccgcaccgcccccacacagcttttcctttagcacgctgaggtcttttccacgcatgacaaggacgggttgaacgtcggggacttggtcacagtcgcccactgtaggagggccaagttgatcacagagagccaatcagtggacgatctcaatttgtccaaggtcctttgtccca

SEQ ID NO: 67430 - DNA, 554 bp, Cannabis sativa
aagcttgtacaaaatagtaaggagaaacaacaaaagcaatggctaccaccaccatcaggtaaattaaagctcaatgtagatgctgcaattgattaaaagaaagaaaaaattggagtaggagctgtagtctgaaattaacaaggaaacattattgctggttgtgctattcttattcctagtgtctataattcctacattattgatcattggcgttgaagcattctctgtattggtgtaaagcgatttatctgccaatcaattatgttgagacagactcaaatggtgtgccagatagaattaatttagaatgcaaggattgttcacctgtttctgatattattaattatattaagtctactttatcatatttttctaatgcttgtttttatgatgtaaataatatagcacataatgtatctaaataggcagtaaggcttttttttgaataaaacttgcagcttcaaattaaaaaaaaggagaatgaaagtacaaagcttacaagtttaaaaaataaggtaaagaaccattccaaagtaactcattatctaatccta

SEQ ID NO: 67431 - DNA, 1497 bp, Cannabis sativa
tcaagaaaaataagtgcaagttaacgtcctctgcgctggcaggatcgtttggccgaacaagcacagattgagcgtcatcatttgaagagtcttcctgctcctccaaaacggattttccctttccctctataggggtagatggccgagcaggcaaactaggctccctgatccagatagtatgttctatcagcctctgctcgatcgggagggttttcttcttcttgagcgacctctcttgctctaaatattcttaagcctccttctcttgctcagaatattcctgagcatactgcttggctccaacatcacccttcaacttaacctcacgcttaagttgaataagctctttcacttgctctgctccctcagcccagccagacttggacttcttctacctccccttcacaagctggggtataaagtctgccgaataaagcttgtacttcacaaagttgtcgtttgaggtcaacaaagtgatatcctgagcaacatctgacagctggagaattttctgggccctttacctaagtcctaatgtgaagggtggacgtcaatacacatggatctgttggaaccgagtataggtagcttgcatgccctccaccaagtaatactcttcaataaaacccccaatcttgccaaccaccgtgtccacggtacctgtcagccacttgtagtccggctgagagaaatagaagtaccccgacctcctctgcttaggtgtagactttagatcaaaaagccaatggatgtcgtgcagggatggcacaccctatccttgagaggcatagaggatgaacagggcagataagtacatgatgcccttaggtgtgaattgggtcggacagaggcggaaataatttgcaactctcttgaagtatgagtgcaacgatagtattgccccttgcgtagtgtgggcaccgatcaggcaaataccctttctttgggttagtttcctggtgatttggagaagggagataacactctagttcgccccagtacccagccttatccaattccctcaatcggccctcagttatattggacgaaggacacaccatctggcccctaaggcactttgcctcctgtgggggaccgcctcgataaactcttcggttacatagtcttcctcctcaaccaagacgtcaccttgctcagatactttctcccaagccttattatatcctccaaaatatggatgcccgaccactcctttctcctcagccttggaagggcgatcatgacggacatcgtccttctcctttatctcctagacctcaatgtccccacatcatcctccaccacagcgagcagaccctgttcggtacttggcagcgtggcaagctaggccacgtgagggtcagatgcattaactctccgcattgtctactttgtgcgggccatcatccttctcttggacagatgctggtgtgtatgctgcgcaatagtaatgacagggacagttattggaataccaaagttaccagaacttggacg

SEQ ID NO: 67432 - DNA, 894 bp, Cannabis sativa
  modified_base (184)..(191): a, c, t, g, unknown or other
ttgaattggaaaatatggtattagggaaagaagaatatgtggttgaaataaagtggctaaattgtacctagagattggtccattatatggctggccttagtgtgcaattttacccaatattttactcctttttaatccatataatgcttccctaagtcatagttgaaacactataaaaggaacnnnnnnnnctcatctcatccacttgacaacttaactttttcaacctggcagatctagtttcttactctgtcagacaactagtagatgagagacaccttctacaaaggtttcaagcctccttcatcgttcttcatattcgaacccttagtgatagagtgtcatgcccacacatagcaagtgtaataccctaactattttaggcatgttaacgtgatttttaacctactgtgcaactcgttgctaataaacgaggttattaaaaattgtgattaattaaaattttgcttaattaattataaacattaaaataatacacttataataaaccaggatcccgtttacaaaaataattactaaagtttgtctcctagcaactaaactaaagagccaagcttgagttcataaactcaaagcttgctcaaaccttactacagccaccaaaatcaattcacaacaacataattcaccataattaaacttcagaaacacataccaaccttactccacaactcagaaccctaaatactcaaaatcatgcataattctaaaattaaagcctttaaactaaaaaaggagttgctagggactttaccttgatttggatacacttaaagcttgctggaaattactagaactgatgaagaaaatcagaaccctagctagtttctatggtgttcgaaagagagcgagaattttggagagagagtgatt

SEQ ID NO: 67433 - DNA, 3180 bp, Cannabis sativa
  modified_base (767)..(786): a, c, t, g, unknown or other
  modified_base (2032)..(2041): a, c, t, g, unknown or other
cccctgtgctgccctagccgcagccgcgtcacgctctaactcagtgtttcaccgttgcgcctcttctagatggtgtttaaggcggtggttttccatttcataggtatcctcttccataggctgggtacctccacgattgggctcttcatccctcgtcccagggttctggccatcccacgttgagttctcctcgaacgtgttgtccgtgcactaggaccaacgtcgggttgggttctatgtgaacgtgtggtccgagcgctagggccaccctcaggttgagtcctctaggggcggatggtccatttggactgtgggttggtagaccttctagagcccatgggctcttttccagagcaatgatgagtttcctcatgtggggtattaacattttctgggttttcagccatgaatgagagggttttttcttcagaaggaatgagggttttttctaagcgttttcacagaggctctcaatgaaagcaccaaactgttaacgccgatttttgttaaccaaatttgagcctcacaataacaatttcacacagaaaaaataaaagctgtaaaataaaaagtatgaacacacaagatttttaacatagttttgcagttaaaattctacatagtccacgagcaatcttaattagatttctaattgttttctcagggccctttttttgtatgagtttttccgtcccttttttttttatcgtacttgccactatttataatcatatagtgggctgttaattacaaagttgactgtaatnnnnnnnnnnnnnnnnnnnnctaaaatcatggggtttgattacagatcacgtagtgtaaatgcgattattatttgaaaatcatatagctgtgattttcccgcttttactggatcaaaatgatcgtgtatttaaacacgtcttcaattgttgtatccggggatgtctccacagaagcttggtttcagtgaccataatagcaagctgggggtcattcttccttccaaggtcgacgatgcacgtcttgtgatgaccacggttcttatttgcacagagttctttgaggctcatatgaatgttagcttatgactcgtcaggattgtaagcctcactgagaaaatgtctgaagttaactgggtgaagttataggaagccttcccatagcgagataggcacctcgcttactaggtctcgagctaacccgactgttacacttagtttgtacattgtacactaagggctttcgcagttgatatgtgtcgcttttgtcttcctagatgtaatgtatacttgattccttgctattcacattcagcgacatatggtttctcgctaatatactaagcaacagtttgtatatttattcctcctcgcacaagaccttatagttagtaggttgcaaatatactctgatacttacacaattaatgagttattccataaaaagcggttgcatcgatctaaattccttttatcttgacacgtgtctctcactgagatggtagccaaattttgggtataacatggtggtattttgtatgaaagttttattctaatttaatcaattaaaaaagtttttaattaaaccacacttttttctaaactagtaggttagtcagaaataagtttgtaaaagcacacacgtggcgtccttgagggtcagggtattacaataagtctttgtgatggaaaaacttaatgtttttgtcaccaacctttaaccatgaaaacctagtttttcctaatgccaataattattatagaaaaacaataaaatttaactatcatagtctgcggcaacagaatgtaattctgtcactataaaacataattttgcaaaaacaaactggaactagaaaatatattcagcagaacttaaaatactagtagaaaataaaatcacttgacacaagagaattgtatgtggtattagtgttctttcgaacactcctagtctacgaggccacgccctcagaaagaaatcgattagtaaagtctcaaaaattacaaagacaattgacttatacaagtttagactccctctaaannnnnnnnnnaatcctttgtaacacacttcacgaatctgaaatttgaaccaccttcaaacatcaaactccctttgtctttgaggtgtgagtgcttacttccttccgaagtaaggcttgaacaagtcttctctcgaagacctttctcttgttcaatcaatttgttctatccgaccctaagaccagtataagaataaatatataaacacttaaacctagatgaacaattaggttctcacaaaaagaactctctcttcacaaataaaatatgtaagaaaaaaatgaaagctagaagagttgaaataattggctgctctctaggctctatttatagaacataggaacccaaggatagccacgaaatcgattccacagctgttcaaactttcctaaaaaatactgttttgcagcatcagaatcaggtttctgcagcaacaaaacagaccagaaaggacacttgccaaataggtgctcgatcatgaacatggacttcattcctgccaaaaaaagtgtgcttgatccgatcttatcaagaaagggtcaaagtttccaaataaaaccaactttccataagagaatttcttctcttacaagaagatccaaaacaagaaaatgtacaggtaaaaaatgattatttcctttgatagaaaagagcaataaagacacaatatcatggagataaaatcggtttaattgcatgaagaaatcacacaataaataaaaaaatattttgacacctaaattgccaaaaaagactttacaatctccccctttggcactttagattatcaaaatattttttaacataaatgtacctgcaaagcaaagttagccataccatacaaatctccccctaagacacacatcattaaaccgaaatataagactaactttaaaccaaagtttaagacaagtaccaacctcaactccccctggaaaataggccgagagttgagaaaacaaagcaagaaagtaaaaactattactccccctttttgtttatctaagggccaaagacaaatagaaattaaaataagtccaataaatagtcaaaaataaagaaattttaaaaaaaaaacttatgccccataaagcttgatcagagtggacaattgattggacatctcttgctgaacctcctccatggcagc

SEQ ID NO: 67434 - DNA, 1001 bp, Cannabis sativa
ttttagactggctgtatctggtgtatcttgaattgcgttttgaattgctattgtatatagtcttttggttaaatcttttataatagggattcccaaaacacctttttattgtcgttataatatttatctttagtgttttattttagtcaagtttttttattatcctcacagtttttaataattaatcaatatattagtattaaactagtttttaaaatcatacacgtggcgtctccatagaatagggcgttataacttggtatcagagcagccatggttttaaaggtcctgaagactggtcgaatatgtatatttattgcgaagacaggtcgactcatgatttagtaagtgtttatgttatctgttattgccttacctgcttagacaatcatagtgtataatgagaagacgtagtgtatgaatggcttatgcatattgatattgatattgtctaaattctaaattgttgaaggtttttttgggttacaggatattagatcatgcagcagcggtctagccgtttaaaccgcgagttggggctcagggtaggtggtggggaatagcatcctccaccccctcaggactgggaacagatgtttgatgccatgcaagagacgattgggcagcaaggggagcagattcgagacctgagagagcatcaggcttgacctgcacctatactggcacctcaggtagtgctacagaatattggggattgtatggaaccaatttatgagcagtttaggaaacaaaacccacatgtgtttgagggtggcctagacccactgaaggcagaacagtggatgagtatcattacctccatctttgactttatgcgggttgaagataatgaccgggtacgatgtgttatctatatgttacgtgatgatgcatgaatatggtgggagattgtttcccaaggtcataatctgaatactatgacttgggatgcattcagggcactgttttatgagaaatattataatgaatccattcgtgcc

SEQ ID NO: 67435 - DNA, 977 bp, Cannabis sativa
caatatgaaagattgtagttcctcctctgatacatcattattttggaaaaggactatgccaccggttaatctcactcggtacaacttaacttcatttgcaatcattttgaacgagctaacggaaggtttgcaggtagacatgatgtattagagaaaaacaaagagattatttgacatgcattttcatcttcctcttatgcctctctaatcttttgttatagctttgtctgatcccgggtatttgatcacggaatgaaggagaagctcccacctacggattccaggcttagaccagaccaacgacatttggagaatggagaatatgagaagacaaatgctgagaaacaacgtttagagaaaaggcaaagaatggtatgcatgggacatttttgcaaaatggcattgtaaatagcctttctcacatacttgacatttcctctgtaaggaaaatgtctatattcacgtttgttttcttctgttcttcttatctctaatggtatgatctggtgtatgggaaatgcagtcaaggaaattacaagaaagtggatggaaaccacaatggttcaaaagagaaggtaaagatggaccttccgctacatgggtggctattgggagtcacgcgagcgaggaaaataggatgaatgtcccaacatatttggtgaatttgatgaagctcttgctaagagcccttaaaaaaacgtacttaactagaacaagaaggcatatcatgacactcatgatcattcaggtaatatctatctcattcttcttttctcttttcttgacttagactacttatttttattcaacacttcattatataacataaaatcatatcaaatgggggctgcattgcctttcacaatttgtatttagtaaagaaaagctctacagattaaacctattccggtttttttaaaaaaaattatttcttgaatcggtccttctgatcggagaatttgaaatgagaatgagaa

SEQ ID NO: 67436 - DNA, 726 bp, Cannabis sativa
ttgtagggtgtaaatgggtgttcaaagtaaaattcaaagctgatggaagtattgtgaggtataaagtgaggcttgtggccaaaggctttactcaaacctatggaatagattatcaagagacgtttgtacctgttgcaaaaaattaattctttacgaattctactatctttaacagttgactataaccgacctttgaaccagtttccaattagacgtgaagaatgcttttcttaatggagaccttgaagaggaagtgtatatgagtgtcccaccaggtttcgaaaagaagctttggagttggaaaagtgtgtaaattgaagaaatccttgtatggtcttaaacagtcccctagagcttggtatgaacgctttggtaatgttttgaagttgtttggttacactcaaagtcaagcagatcacactatgttctacaaagattcagaggaaggaaagatggctattctaattgtgtatgtagatgatattgtgataactggggatgacattgatgaacaattgagattaaaaagaagacttggtgaggaattcgaaatgaaagacttgggtcttttgaaatacttccttggaatggaatttgcaaggtcccaagaaggcatttttgtaagtctgtgtaagtatgtgcttgatttacttaatgagataggtatgatgggttgtaaacctgctgaaacacctagtgaacctaatgttaaactacaggctgttg

SEQ ID NO: 67437 - DNA, 762 bp, Cannabis sativa
actacgtggcttgacacgtaacaatcacctagtttatatatatatatatatatatatatttttaagttaatctctttaatttttatctcattttataaaatttattacgttgatttctttttttaatattattctactaattttatccctatcacttcacaataatttttattcttttttaatcaaaattttatcctaattttcccacaaacttatacactcatctacaaagaacataaatttattatgtttgaaattatgtcttaattatgtgagtgtgaggataatttgagtacaatactcataaaatatttgaagataaatttaattaatgtaaaaaaagaaaaaaaaaagtagcaacttttgataataaatagtgccataataatgtacttaaaagagtagccacttttgaggaagacagggtgagaaacagcatgattcacgtgatcaccacgcgtgcgtgatgcaaattaacttaccttattattagttgaacttaagaatttgatgggaataccactttgtaagtcagtttttaatttcacttaaaattgtcatctaacttttatattaactgataagaatatatagtcccaaattaattaaaatattactttttgagtgatattattgatcataatttaagatgacttgtgagatcgaggtcccaatatgcatgtgtgtatttaacttgtacagagatatccacaccaaaaaaaaaaaaaaaccaattataattaaaaatatatataactaaaa

SEQ ID NO: 67438 - DNA, 1024 bp, Cannabis sativa
gtgttctatgttatatacaaatagatcttgggttatttgttaatttatataacattttgagcgaacattgttggttgctgcgttcattttaatgttaaataattcaccttgattacaggtttggattgtatggtattgtattttgtttttatgcttatattttttgtacatgtttctgaattatgtcgatatatataatattatattcaatgatgaaataacttttatgcaacccgtctaaattagtaaaccaaggaatatagttgtagaaagtatttgaatctttaaattattgtattatgtataacacattttttacaactatcaattaacggatggacaacttttgaagattcaacagaatagttaatgtaataagaatttttttaaaatttcacattaaagtgtcaaatatgatgttaataatgctttacatttctgttaatgttttggatatgacatacaaccttaaaacaactattatgcaactaatgagttgctcattgcaaagaaggagatgttgttggttgttgttgtattgttaaccatattcacacacaatggataccttgtgaagtaagattctttcaattttagttgtatataaagaattagcttggatcgtcattaaaggttggttcattctttcacttggtatttcagttacagttgagtattttcttagttgcattccaacacctattttaacttgtgggctagttcttcatatttgaaatctattgaattaatgtaatggccagtagtttcacaatttacataattcatttattgatcaggctatccattgcaaaatatgagaaaaaaaattacatcttttttttttttacaatttaaaaatttatgcattgtaagtcatctatgggatgactgtcatgaaactgtaatgcaacaattatatttgttgtgagacaactaatattaaatcttaaaataactaataatgtccttatgttatacaaaaaaacttaccataatcaatttttctctatacgagtcgtgtatt

SEQ ID NO: 67439 - DNA, 2044 bp, Cannabis sativa
  modified_base (149)..(159): a, c, t, g, unknown or other
cctattaatttattatattgttggcgctaggtttatttatatgattttttagagtaatttagagtgtgttttagtatttttattccataaaatcaaaaaaattataaaaatatatttaaaattccgtgaaattgtatttttgtaatttnnnnnnnnnnntttgtgtatttgtgaaataaaccctataattatcggaggcccaattgggtcattaagatatataagcccaataatcatttgaaaattgaattagtgtatttgtatttggccgattatgatttatgatgattaatatttgttctttttctgcttcagttgaccattctgagattgcaaacataatagaggaagctgacgtacgcgatattttaatgaacactaggaagaaaatctaatccatcaaagtacggaaaaacacatcgcatttttgaatgatcaatacttattatagttcttaactattaatttatatatatgaattatgtttacttttgtctcttattgtctaaatacgccaatcaagtttattattaatttcattttattattttctgaggaatgatataaataacacccaaaattgtgcattatcatgtacttttctcaaaaataaaaataaaatgagattgccttgtacttgccgcaacaaatatgtatttatttatttttataagacctggacaaatatgtataaggttcaattttaggcactgagtggggtttggtacaagttcggaaatgaagcaggaggttggcccataaccatttaagactacaattttctactatggattttcaagaattggagtggactctatctctaatattgggttgttcagactttgaatggaccattcctcagttaatctttggaatattgacttagaaaaatccagataaggaccaacttaataaattcatctttaatgcggatagctagcctagcaaaccacaatattttaagcgaaacattcctcatcatgatttaggactactaacgatctttatatggaatatacaataagctcatccacaactttcttttttttttttttgaaagattcttcttcttattagtttagattaaaataaaaaaataaagaccctttttaattaattaataccaactaatttctaacaataatttgactactaatattttacaaatttattgatcgtatgcataattcacgaaaatccagtttgaaccaatgaaagggtgtgtacatatttttctacatacacacatatgggaatgcatagaattatttgaaacgatgtggacttttgaaccgagaaaatgacagaaattaatgacagaagaagaatatatccattaaaatttaagtataataatttggtacaaggatatatatatatatatactaattaacaacatacacacttggctgtataattatatctatatatttcggttacaagggtaggtataggcttaatgaagctatacgctacaataatacgtacgtcctaactgagatactgaccaatattatcatctcaaatcttactgaacaacaaaatttaaaagaaaaaataaataaattaaaaaactactctaatgtacacaacatgatacaacaaacacacaagtagtatagctatatgtatttttttttatttttgtatgtgtgtgtaattaattctttaattatgtaataatctaatataatcttaattattttaacttctgatcatcacctagctagtacttgtccttttggggagtaaagactagttccaagagttttatacaaagtagtatcagaatatactgcgttggatcttgatgacctaatcctgtatttatgcctataaccttttcggccacgacgtcgatggctcttttcctctctttggtaactattattatctccattattattacttctactactcataagtaccacatcttcatcatcatgatcaactttttcctctcttaattcagtgggaacaacataaacaaaaggtactgaaatgtcacgagtcaagcccaaaagtggctccaacgatttgacca

SEQ ID NO: 67440 - DNA, 676 bp, Cannabis sativa
aaaaatcaaaatcagcctctgccatcacctcagcttactcattaaaattgttgatgggttatttaacattgcctcctctgttcaaataaaataaaaggcattgcctcctctgtaaatagtttcataaggcaaaaagattttggaatatatgctgttaaataaaactaattagctaacaaatcaagtctttatttaaaatttatcattacacaccaaatgctgcctcttaatttaaatttctgccaattatgttaaaaactaaaattattacacatgaacataaattaaaaatcaaaattataaaaaaagtgagatcaaacaaaaccttgatgatcacaactctaatttcaaaagtagagttgttattgatactaatgtaactacagaaagttttgcccaaataaatagctctaaaagcttgatgaaggacgaggagtctagggagaccgactaagttggagagatcaaggaggaggaatcaagagagataagtgagatcggaatcgacaatggaggattgataagggagaaggcgatggagttgtgcggtggtgattggatcgttaaatatgtcttcacctacaaggagatcgggtaggtcgagacagagtgggactggatcagaatggaatgaaggtctgcatattactttgaaagctagggaatgggatcctct

SEQ ID NO: 67441 - DNA, 722 bp, Cannabis sativa
gagacaaagtctccctcatctcacttacttgagatttgcttcttgattctcactattgtaatcttaagagagccactccagaatccataacacttgtggtctaagtggtattatcttttatatcaatacaaccaaaagaagagtagctcattacccgctaactaaggggactgaacgtctataaaataatgtgtccctttttgtttacttgttcttattgtgtaaatgtgatgatatcagtcataaatacgactcttctattggatggccaaatctaaggtcaagaatttggtgctttcattgagagcactgtcgattgatctgatctatcaccatggctgtaacaaggagaactctacttcaactcctacctcatcgagtcttcctcaagaccctatgactgataatcccgatgtttgtgttctagccaccaatagaaactatataatctaatcaatgtggctaacctttccaactcgcaggcacaaaaaacttgaccaacacaactggtaaggttgaccctccccacccgacaaatcccaatgatcagcctttactgcctaggccagatccaccattggcacctcatactaagggtttagccaatgtggatcaaccctcgggcaccacaactgactctggtccctagtactatgctgaggaaacaaggccaggaattggcgagcctcgtgtggatttgggagaagattttgaattggcta

SEQ ID NO: 67442 - DNA, 1403 bp, Cannabis sativa
catcctcgggaaaagatttcttccacttccctgagtctgcgtgggcgacatggctcgaaaagcctcagccgcctccgctccaaggatcgagaagtcgaagtctggaatcttggaaagagttgtgtagatgtaatcagagaccgcctattcgtactgcttctttccattctccttctcgacctctaagtcgcgagacacctcctcaatcttcgccttggagttcctggcttcgagttcgactcgtttatgaaattcctcgtgctccttgtccttgtcagccgcttcctgtttcagcttcttgatgctctcctcaagctgagcattctgcctctttaatagttcgacttccttagagccagcagcaaaggctttcatgaacatggtcatggattgcgaagccaactctacagaacgcagaataagctcctcagaaggagtcctctcaaccttggacatgaactcctcgccacaaacttttcctgcagaactaggaagtcgcgagttcgaacagctggatcaatcacgactttcttccccttgtcctacatagccttagttggcttcttagaggagtccgcggcaggggtagccacaacatcgctctttctcttctggggaacaataggagatgtcgtcgctgttccagtctttggcttgcggttgaaaactggtgcggacttcaggaaagtcatctctgcgagaacaagaaaaggtaagtacaaataacgataagttttaatgcactagtttatatacctgatgttggccgagaagtctgcttggaaaggcatttgtctatccgctctttttgcttctcagacggctccttgtacactggctccctttgaaggcttgcgttctctggaattagcttgtgttcccgcagctttaaggtcgtgcacactagtcgccagtcacgatcttgaacagggagacttccgagaacttcaccagtttctctacgagtcgcgtctagtgcaggtcgaatcggtctatctgcgacaataaaaaagaacgggttagctcaaagtcacaaggtaacttaaaaattgactgagtacagaagtacgcgacgtactaggtcgaagattaaagtcagtcctaatccctgaaaccttaaacacgtaaaaccatttggatttccaatcccccatattggaaaccatgccttccaccccgttgatttcagaagtggcccactttctgaaacagtagaagccattgtaaagacctacactctttatgtcataaaagtaactaaactcctccattgaaggctccctatgcacatactccatatacatcgcatagaaacctaacgctatgcgataactatttggagttagttgaaaaggagatacatcataccgcttaagaatagcggagatgaatggatggaaagg

SEQ ID NO: 67443 - DNA, 880 bp, Cannabis sativa
caacaaggtgtggaatgggaaaacaaagtcagtccaaaatgttattgcgtttgctagttgtaatcttgaacaatggatttttgcttaagaaaaaactttcactccttcctccttttcgattcagagtggggaaggggacgagcaatggtgtgctccagaggtaaataaattcaagattaatgtggatgcggcaacatttgaggataaggacatgtttggttatggttgggttcttcgtgattctagaggccatgtcatggaggcgagagcatttggggtgaaagaggtgctaagttggatcaaggcatctaatatttctcatgtcaccgtcgaaacaaatagtctcattactgttcaagctctccgtagcctggtgaatactagttctcctttcgactgttacattgctaaatgcaagagaactatttctaatttgaatgatgtttgtttacgttttgttaaacgttctgctaatcgtatagcttatggtctagcccgagtttcatggttatatgcagagcgtagttattcggttgccactattccgaataactttagtgatgtaattgtgcaagaattgtcttaaataaagttttcagcttttatcaaaaaaaaaaaaaaaaaataatagataaaaaagataaaactaaatattggaatggaaactttcattccattccaaagttaattacaccaaaccaaataagctgtaagtatttagacaaaaacacatcatactaaaggagcattattaaaaacataagtactaaatttatactttaataaaacacaaattcttttttacaaaaaataataaaacaaagaatttcaaatgaatattcaacccaaaaaaaaaaaaaaaatccataaagtagaggga

SEQ ID NO: 67444 - DNA, 1431 bp, Cannabis sativa
  modified_base (1376)..(1384): a, c, t, g, unknown or other
atggagcaatgccaatgtgtgtaataaactctgcaaaataagctcttaaagggaggtgtgctccgcttgagatatgggaccagctccaagcactgaacccatccatgctcgtggatgctaactccttcatgataaccaacctatgacacattagtctaggtatgttgagtaatctggcttcagtcgcatactgttaataccaaaattttggctaatgatgagaagttaacacgtgtaccaaggcagaaatacaaacaagctaataccgtgcattattaaatgcacattaaataagtcacctcgggaattacagttaatagaaatattcgaactcgctaccatataagcaatagcaagatgtgaataataactattaataggtgagattggcgagacaacaagtccatctcgagataaacagaatacacaatgaaagttgtttagaacgagtaaacaaagagcttgcagcttattgattaacatactcgtgagtaagagcttacagctaattcatccacatacttgtgagtatgttcaaagaatgacaacgacatttgttcaccttgctttttatgcattgaagtaaccgcgtcagtaataccttccaaatggcaaaagagaatcgcgagaagcattgtatctctacacttagcatttttcctacaaagacgataaagaaagataacacgtactcaacaagaatcatataatacagtcagcataaccgtcaatggataaaaacaaagagcaattgactagttatttaatattatcccatatgcacaaaaatgaaatgtggggaatatccacgtttcatgagcaattatggatgaatagatcccaagggaataactgtcaccctatgaaactataaatagggacagaatctagggtaacaagggacgaccaatctagagaaaaagcatgatgttattattactgatatcattgtattctgtattcaaatattattatccttaataagatagactcgtggactatgaagatttaacttaagaccatgttaaaaacttccttttatttatttattgtttgctatataattaattctgtagttaatttattacaaaaaggttgatatttttagttagcaaaaatctgcgttaataggttggtgcttttattaatagcatgtgtagtaaaaactcaaaaaaacaccttcctcaaaaatacatctcaaaatttgtactcatgccagacggtactcagcgttatgaagagaatcagcccaaggagacaacttgtcaccctggaaaggaacctcagagttcgtagagaactaacacaattggaactccccgttcaggaaggaatgatggagatttctgttggaattttattttaccaggatcttnnnnnnnnncacaagtatgttgtttaacaccctcaatatgaactttctaaaacgat

SEQ ID NO: 67445 - DNA, 667 bp, Cannabis sativa
tcgggaaagtttgtgggattcatacttaacacgagggctattcaggcaaatcctgaaaaaattaaggtattaatagacatgacatccccgacaaagcctaagggtacaggccctgacaggaagattggcggcacttaatagattcatttcgaactcaactgataagtgtgtgccattcttcaacatattgcaaggcaacaaacagttcgagtagaaaaaagagtgcaaagacgccttttagagcataaaaaggcatctcgcaatgcctccaattttggccaaaccaataactagagagacgttatttctttatttagccatctcgaaagatgcgattagtacacctattgtgcgggaagaggacaagcaccagcaacctatttactacttaagtaaaaggttactaggggaagaatccagatatccctcttctagaaaaactcgcgttatgcctagtccatgcgtctcgcaagctacgaccatacattaaggctcacccataaaagtgttaaccgatcaacccttgagacaagttttatcaaaaccagatgctttttgaagattgttgtcgagggaatttcgcaacacaagattatatgatattattagtaacaagaagaaatttacgtgaagaacaagtgccagtattcaacctagaatggcgagt

SEQ ID NO: 67446 - DNA, 1149 bp, Cannabis sativa
ctgttgaacatgccattcgcataaggtagcccatttcacctgttcggccatcccctcccatgctcggtagagggaaagctgttctatctgaaattagattgatgtcaggtgatgatgcactttcgagtcttgtttgggtagtcaccttgcatactactttgtcttgtttttgggcttcttgacttttatgccttatgtttctgacgtctgttttttttctaaccatgttgtttttcgttctgtacagacatgtctcggtagatgcttgatgctctgaaaaagagaatgggcggaagctctagcgcctctcctctgaccaagaaagctaagggcggtgaggggtgctcttctatggaaaagaggcctgctggggaggtcattgatctttccaaggagctaactgctgcaaacccctctaccccaaaagctgctaagtccaaggagtctctgggaggaagcttggacaggtctagaccacccaaggttgggtctgagctggtcaggagtgaacctgaatgggtgcgtgcacctactccacctttgccggtgcttcttgaggccaagaagggcaaggagatgctggcccattacatgaacttgctggttcttgaggtcagtgagcaactggctagtgttgacaatgactcttctatggatgtgctggtgggcggagtctagaaggagttcaccaggttaagtctttcttgatacttcccttcaaccttctgtacttagctcaaatgctaaagatttttctttgtgcaggccggcatgaagttggcctacacttactcccgggctaagtctaccgcttccaggaacacggctctattcgacaccatgagggcagaggcggacttggccaggaaggatgctgaagatgccagggcggaactcgaagctgttccgttggagttgggtgaagccaacaagaagctgtttgccgcctagaagaagataactgagctgactaaggatctcgaggtttttaaccgtcttgaggagaacatcgagaccttatctgctgaagtgaaaagtcgtcaggatgagaggacttctcttcgagcagttcttcatcgggtgaaggaggagaaggaagctaaggaggaggagctttcggccaaggtggttgttggaaatattttacca

SEQ ID NO: 67447 - DNA, 884 bp, Cannabis sativa
tttttttttagggacgaaaatgaattaaaatttaggattatacatacaagaaaaaaattatagaagaaatattgggtgtgtaagatacaaaacaataagaaaaattaaattaaggactccgaggtatttacaaaatactcaatttaatttaatttgccttatctaattcagtttgcatttacggattggattagattaaaaaatttaaaatctgtacttgcacaaattaaatattgattggcaagtaagtaatcgatctaatccaattcacacttttatatatattttaaacaaaaattatattttaatgtaaaaagaaaataataatttaaaaatctaatacatatggtacaaatatatttcaaaatacttaatagatgaaatttatatttcattcttatatatatgaaaaaaataatctaaacaaaaataaatatatctttttacatactattttttttttcttattcctttaagttttttattttatttgttttaatttcttattggaaatataaaacaataatataatttattttatattgtttctagtgaggtgaaagagtatacttttaataaatattttattgttattattattattattattttattggtgtttatatatatcgtatatacttaaagaaattctatggtagagcatgtcattttcccttgtatagaaacaattttgtttttaacatggggacaaattatatagaatggtgtacatgatagtatttattaggctgccaaaaatatatttcaaaataatttatcagatcttcatataaaataaatttcaaaataattcataaaatactattttgaaaataataattattttaatttttttttcaatattgtaaaattattataatttt

SEQ ID NO: 67448 - DNA, 2863 bp, Cannabis sativa
gattagtggataattatcaatgattaacactcaattatgatatatttgtattgtgcaagtaaaaaagctttcttttttggcaatgggtaagaaactgatgttgtcggttatttgcagagttgaatggtgaagacatcatttcgggtgttcttctatcacgtccacggtctgtaatcccattttcatatagtcattgctcagtgtatgagaagccaattgtggaagctacaaatgaggaacacccaaatggttcgtgctcaaaagtatctatggaaagtagagaattgggtggttggaattgtgctagacgggcttcagtttgtgtggaaagtaaagtatgtgatgattttgatcatgctggatgtgcttcagttggtgtttctacgttagatcactgtaatacattcgttaaagatcggataaacgagggtgaggatgatagtattacctctcctcaagatcagagagatacaagattggcagaagttagccatgaggcggctctatcgctggctaagattcaaagatcgaaatcaaggcagaaggctcttgagcttcggactggttccaaaacagctaaaaccagattaaagcatgccaataatttcagtggaagaattcccatttctttccttgaggatgaccttaacaacaattgcactgtggaaggtgttaaactaagtgatccttgtcgcaaggagaatgaaagcaccatgaattctactaaaagctcgaaaaggcaacagagctctttgaatgccggttgttcatcaaattttgttggagaagatgccattgtatttacagattctattggccccttaattcagcaatctagcctggggaaccaggagcaaagagaagttaaagttggggaaaacaggagcaatgagaaaggaagggactcatctaataatgttatcagggaggatggagctgcagttacacaacagtctaatcagcttccaatgtctgttaatcatttttcaagtccttacaataattgcataacagcagaagctgatgtgatagcctccagattcaagggggttactgctcattctgttgataaggatagagaggggagatcgttagaaaaaagctctccacacttatctgaatctgcaggtgtaatagatgaagaaatgtttgagaatcaccaggaaaatattaacttatcgttggatgaaagggaagttttaagccaagaaatctgtgtggaggatgcagtagatgaacatgctgtctcagcagttcaaggaacacctcgtgctgagaagagtgttgctattcagacattgcagcattgttacaaaagttccaaagagaaatattctttgagagatcctttggtttccttacaagtagtcggggaaagttcgcatggcagtgggctgaaagagatatcaagttccaaaatctccaatgttaatgagacaaagaccacaacaccagtgatagtaattccctgttctatttccaaggatgaaactgaaaattcaaaaaattctcagttttgtactcatgatgccactgatgttggtctttctcaattaactgaaagggaaattgcagcaaagtccacagcaaaaaccagtttcgatgccttgcttgagggttcaactcggaataaacgaaggagtggttcttcagataccctgcttgctttgccaggtgaaaaagaaattgcagtttttcttgtcaacaaggattctaaagatcatggtctgaaacatgtcctagactcccaagaccttcaaagtcctcaaggcaatattcaattagatatcagtaagggtcaaattggagagatacctcaaaatgaggagagtggcatgctaaaagggtctaaatcttcactaaagcttctagatcaagaggtattttctttttctgactttggttggatattctgccatattttagattgagtatgctgagttagcaaatcaaaaatggtttttatatgtttcgtaagctttcatgtattccattctctgcatattgtatctgcaggatgattgtaatatgaaagatagggatttaagtgcaactactccgtacacttctgctgatgaagaatcggaatcataccatgtttcaagtgtgctcagaaagtcttctggagccttgggaaaggaggaagcaagagtggaagatctaagtaaagatatctttgatgaaatctcacaaagaacattagaagagaatcaactttcataccatctcgaagataactttcaaattaggaatactgattctttgacttacagtaattccttgcacttgactggtgctgatgagacaatgcatgtgcttgagagtttcatttttcaatcagacgatgaacaatcatgcattgctgatgagggaatcaattttgacaagttgagccttccgaagacttcaattgaacgcgctagcattctagagcagctttgcaggtctgtttgcttgcaaactccagtatcctgttcttcaactttctatggattagacaagatttcaaatctataccaatctgttccaactgggcttctagagggcatggataagccagtggatgataatgatcgtatgagtgaagtctttaactgtgcttttgaaggaagatcatattcagattgtctttccaatacatccaatcaatgtgaatgggacataaagaaaccttgtatgtctccagttcgaaaaggctgggacagaatcatatccaaatcagatagctctgagaatcgaatgagcttaatacccgaacttccatgcatttgtgaggaaaatgagaatgtagatgaggtagctgagacttaccaagaaggcattgtttcagagatccatccaagctcagcaaaaagagaaccac

SEQ ID NO: 67449 - DNA, 691 bp, Cannabis sativa
gacaaataatttgttttatcattttgtggagcaaacttaagagtcaaattaatatattaagggtatgttacaaattcaaaagttgttgtaaacataagtaaaataatgattgaaatttattttaaaataaatgaataaattttgtttatttcttttttatgattttattggaagaggtgaatgaaaaaaaaaatggtaatagtcccatatttattatgagtggttttctcacagcttaaaaaaatatttatgtgtacatatatgtatatatatataacacgaatatatatttaaattcttttataaattatattaaatatcaattatataaaatataataatattgataactaaattaatgtttaaaaaaataaataaattagattttataatttcttataaaaaaatcttaatttttgccgaacttgtcaaaggagaaaacaaaagaagcttttacttgtattttgtcactgtgattaaaatttaaaatttccatttaataatgatttatgttttgtaataacacttatttaattagttgaacatgaatcaatgtccatattatcctaatttgccgtagaaaccaagggacaatatattataatcttccaattgaaatgtaaactgtttgtatgctaattaaaattttactttatattcttatataaaccaaagtgtctccatatcaaaa

SEQ ID NO: 67450 - DNA, 1541 bp, Cannabis sativa
gaaaactaattagtaaagtccaccattgcatgaaaaacatggaaacactttgtttccacttcacatgaaagtgctgcgactgttaaaaggtcatgataaaccactagctgactgttcagcaattgggagagagggagagttgaaattacacgatcaattgagagcaaagtaaaccttaaaatatatatttttttaagaaatcattattattagacatgagtagtaattaatattattttaaaatagcatcagtttaaatgattagctatattttataataactattaaattaaatataatatttaacatatctcttttcttattaattgtggaggttaattcgcatgatttaatttcattatgggatttaattatagtgtgcgcatgcatgaatgataatgccaatataaaaactagtcttttttttttaaacaaacgccccaattgaacccacctctcatagccaaaggctccaaagagatcgggagagggagaggggactgcccaaaaactggcattctactaataataaaaaggccagctccttctagtaaaaaggcgtcccattaagtacaactgcctataaatattgcactagaccttctaagtaaaaggtttggaaaattcattaccataaagagatactcatttgaactgtaaaattccattactaaaaattaagcttatgatactgtaaattaagactagttaatgtttgaaccaaatgtaaaaactctgttatttatcttttaatctttttttttttttttttaatttaaatctctttctgtactccaatattttaatggatatatatcatatagtattaaagttatagtatatatagtatttaagttatagttagaattttggagtagtactatttatatattgcatggactcagctggtcgattcggaattgatttcaaatgatgtttacaacttcaaattaattttccaagataatgatcgattcgatataaactcaattagaaatgtgactaaatatactttattgaaaagattaatcgtgtgtaaacttagaaattttatggtgaaatgtgatcttccttttccacactttcagatatacctatattgttgagatcgaactatatgttatatctagtgatgacggcactcgttaaccactttttattaatccaattacgatggtctgtagaaccaaattatatatatactttatcaagatcttgaaaattacattgaaagttcccgtgctttattttcatgtccaacaatgatatttagaaaaaaataataatttagagataaattattttttattaatagtattagcatttaggtaagcttagagcacttacaaataagatataatagactcaacaaaatagttatgagtgattttacaatatatcccttaaaacagatatactgatgcagtactcctacttattttggcattaagataacttaatttttagtctattttttttttcccataatcacatacgttataatattatttgagacgtcttacaaaattttgaaaaattta

SEQ ID NO: 67451 - DNA, 878 bp, Cannabis sativa
aagaagtttatggaagctaagccaatatagttatattacgtatagtttccttgttcgtagacaaagtagattcagaattgtctttcattccaagacataacttgtatccatgcgcttcatattcgttagagttcgctccctttgttttgtaaaataataatttagattttatattttttaaaatggtataaaatataccttaattttaaaagggataatttcaaaaaaaaaaaaatacaaaaaattacataattacagtctgtacggagttttcaatatttttacggtttattaaattttatttacataaatacggtcttttggtgtattttaaattttaatgttgtactcttgttaatttgttattatttttttgttaattgtatattatttttttatgttattttgttgttgttttgatattattttcttgttactttcatgtggttattttgttattttcttgttactttcattaagaaaccaattttttcatcaagaaatcggttttttcatcaagaaattagtttcgtggtaatttttttagtaatttttccagcgacaatgccaattctgacgactttttcagcgccaacaactatccggcgatttttccgacactggaagctactccaacgactttttcagcggaggcagcaaattttggcgactttttcggcacccttgataaaacttcctaaaaacaaataaaaacattacatatggactttgaaaacctaatttatatatatgacatattaaataccatcaaatacttaaaaacaaaaaaatatcatataaattggtcaaacttaaaactacactaaacaaattttaaaatctgattgtaatttcctataagaagaagaagaagaaga

SEQ ID NO: 67452 - DNA, 1058 bp, Cannabis sativa
gtgtttgtagacaagtactttagtgatatgactatgactcatggagccgttaagcaacattttctgaatagcattttcaaagatgacgagtttgcaattaggatagccgtattgtattcggttactaactatttgataagtaaacctccagctaaatatgttagtaacgggttgttatatttgataggatcgggtgagtttaatagtttcccatggggaaggtttgtttatgacactacattgtattatatgaggcttggtttgaaaggtaagaagggtgctaaattgaaagcacaatctaagacaaaaggaattgataagaaggggaatgcttcaaatagtaaaatatataaattggctgggtatcctcttatcttccaagtttggttatatgaggttattcctcttgttagaagtcaaaacttttgtacctttgacccttctctgacatataggatatgtaggtggtctagtgcaaaaaaagttacttcaagtgaggtggagaggaaaatttacatgtcatctaaggtatggttagtttttttgttttattttacttttttattaattgtctgtttttgacttgtaaagtccttttttggcaatttagatgccaaaatattttttattgatggtgagatttatttgtgctttcagtccgattttatcatctttaatattcaattttattgctcttttctatcttaggaaatattgattttcagttgaacttttcttgtatggaaactttgtaagagaagaaattctcttatggaaagttggcttttaaaggaaactttgactattatcattttccttaataagttcgattgtgtcttgattagatcagatcatacacattgttaatggcgggtatcaagacccaatacaagatcagactcgtttttggcaagtttccttttctgatctgatttgctgcgacagaatctgtttctgatgttgcaaatcaagtttttcttaggaaagtattgtacaactgtaggttcgacttggtggttgtctatagagtttctattttctataaatacaacctagag

SEQ ID NO: 67453 - DNA, 4745 bp, Cannabis sativa
  modified_base (27)..(28): a, c, t, g, unknown or other
ctagtagggcgggcatatgaggaccannatgggactcatatgtctccatgagttggaatactcatggacactattgagtcgacctaatagtacgtctaaaattactgccagaggttagtcggtacgtttccattggcttgtcaatatgccgcttgtacgggacgtgacttaaatctccaagagacgttgtggtgcacattggccacgagtctcaactcgagatgacacaggtagtcattcgtgggctagtttgcatatgcacaatagacggttgcaccatgctggaaagagacagaggtcgaacctatgctactagtttggtggcttatctcgagggcctgccaacattcatggagtgatggtgccttgaggaatggaccatggacgtatgggagttcttgggcgatgaggaagactattcggacaatatcgaataggacatgattagaagtgttggcatcttgccacacatgctaccttggtcacgagtgactaggtgagcgacggtgtggagatttgccttattatagtgagaatttatggacaatgcgagtatcttggctagagagcctcgatgcttggatgcactcatggatgcttgcgagcatgacttagtgggagttgttcgagagacaaaagagtggacgaggcacatggtcgtgtgaaaaatgagtccattgtcactcgtatagttggaaggctgaccttcgcttaaagaaatcaaagtactgcattagtgtttcgctgcctgaaaaagtgagctcgtgacacctagcaataaccagtttttatggaattagttttaaaataactttttttaaaagcaattttaaaataattaattcaacagtaaccaaaaaaaaacactcaaattaatgtaaaaaatagaaaaaagttatattttggtgtcattaactcctcttatgaaaattataatttaaattactatatatttttgtaattgagtttaaaagataaaaaaaatgccacgtagaatggtaattgactttaaagatgacgtatatattattgtctgctactcccgcaaactgatgcatagtaggagaagagaatagataagaaaaagaagcatgacttccaaaaacgactacgtttcgtacggccctctcccaccaaacccttactccgccaccccacaaaacgtcgtcgttctcccatattaccgcccacctccgcgtaaccacacaaaccaccttctccgccaatgcctctgctatgccgccgccttcctctttttctccgccgccgcttacttcctctacccctccgacccaactctccaactcgcccgagtccacctcaatcgcgtccgagtcaactcatccccttatctcaccctcgatctctccttctccctcaccgtgaaggtctacaatagggatttcttctccctcaactacgactctctcgtggtctccgtcggttaccgggggagagagttagggtttgtgaggtccgcaggtggccgaattagagctaggggatcgtcctacgtgaacgctacgctagatctcaacggtttcgaggtcattcacgacgttttttacttgctcgaagatttggcgagaggtgtcattcctttcgatactgataccaagatcgagggaaatcttgggcttcttctctttaatattcctttgaaggtaagtttgcttccttttcttctacaaatagttctgagaacaatttttttcttttattaaacaaaaactatttctggtcatgtttggcattttactgatcctctgttaaatagcggtaatataagaaatggccccattggggcttttccaatgtgtttagaaagaagagtaatgacatgtgcaccaaaagtaatgaattgaaaaatgtgtgctgcgtaattagatattagatgagaagctctgatatgaatgtggggaaagggatgacttgactgcagtgataaaggtgcacgatatgaagcttgtgatcactgatcagtgcccgtatggatggagtaataggtttaggtttgtgaaagattaagagagattaagtaaccacatggggttgtaaaattatgagatattggtattggcttcaattttcagaaagtgtgtgagttttgaatgctagtgaataactctttagatccaggactgatgctttcttaagttcaatcataatcattctgttttaggaatatctcaacaaagaaccaaattgtgtaaactatattggagtattggtttataattatttggtacttcgatttgttcttgtactgaatgtacagtccgaaacacatcttatttgcttgttagaggattttaaactgtgttgtttattttttgccaggctcgagcatcttgtgaagtctatgtaaacactagcaaccaaactgtagttcgcaaagattgctaccctgaggtaagaacatcttttctttcttttttggtattttcttttgattcagttagttggtgttctgtatgaatctcacttctagatgcaatgcaaaaaatctgtttttgtgatatcccattaagttctttgcactccattccattcatagagaaggagtttgttctgagttacatttaattagcttcacgctttcccaagttttcaaaatattttattgctccaaattaagttggaatttttttggatacaaccaattaatataatgtatgtacaattccatgtataggaaattagttgccactatttctcaaatctccattttacaccagtgttttctttttggggggccacaccccttcttttcctctaatacatacaagggagtgttccttctcttgcatttactctgaaacacaagatgctttgaagtttgaagtactttttaatctgacatttttttgtctttaaaactacacttgggactggattaatacaatgtttatgccttaattcttggatggaggtgctttatgattttccttttatttgtatcttgtacattactcatatgattaaataatgagttatcctaattcaatctatctagtttgattgctaaacccaccaacttgtcttattgttttcacagtgatggtatagagaacctagaataactttaatggaacatcataaatacaaggtgggcgcacagcttagagagtctggaggtgactgttgtatgtatgacgattgtggttaacccatgggctattcttccactaatcagttaggttggtcattgatgttaattctatactacagattcagaagtaaagaagtttttttttttcagttgtaaatttgttttcttctgaatcattgtgtacttatttgggatatttctacaaacacgaagtttatctctgctctgtacgtaaaaaaaattctatacgatgaatgaaatgatattatataaactggatccttttcgtttactgacaagttttggaggataaaacttcagttgattgcatatgcatctaattttagaaatgtaatctattgtctggttgaagaatgagctcactaataaatgaatggtttttcaagactttgttagacttgctacattggtaatatagtcgttaatggctatttatgctctctagtaaaaggttgagtttagtactgctaatctggtgtcatgtaatgatcacaatgggtttaccgatttagcaattgcgtggtgtagatatatacatttttaattggatatatattgtaaattttcactgtttagtattgatttgcatatggaattattgtcagttcgagttggatagcttagtagtaaatagatttgaaatgctagttgtgcttggtactgtatctagaaaagttggggagttataggtaaatgaaaatgatcccatttcgctctttccaaagtaacttgctatatatgaagtgattttacttgtctaggtgcaaccccactttggtggtggcttatgaatgaatcacaattaaatacactttttttgtcttttattttcataaaggactctttgcctttgttcgttttaaacgtgttatttatagcagcataagctgcgtgatctaggtttgcataacgtgacgatttctggatttagttgagtattgctaagtaagggcgcctttgagaaagcattttttttatttatggcaatttagtattaagtttcactttatttaatttaaaatataatatatcatatttaatatatattatatattttttgaacagatcatatcgaaaaaaaattctttttgagaaagggttgtatctaaatctaattttatttagaagaaaacccttttagagcatgagcaaaggggtcagtattaatcaacggcatcagccataacaatattttcattacactaaaataacatttagaattatgatcataacgctcaccaaagaagaggttacaaatttgaatcccctcttccaatgtaagaaaaaaaaaaagcaaaataaaacaaaacttgaagtgatattaggcaacataatcatcaaacaaaaattatataacacgattaagtaatatcgcagtataaaaaataaaaatagaattacttcaaattcacaactaatgaaagaaaggaaattagaaaaatataacatttttttttattatgagaaaaaaaatagacctaagattatttaaatgaatgatcaaccttataattaaaaaattggtaaaattgtatgacaatccagattttattattattatccaggttttatttatttgtttgattactttgtaattcaaaaactccgaata

SEQ ID NO: 67454 - DNA, 609 bp, Cannabis sativa
ggtccatattagagtttaagaaaagtgaaaagcaaatttgataaaaaaaaaaaaaaactatttcatccaatatgaattataagttcaagaatctcaacataatgtatatagattaaatctagactaataaataaagagacaatacctcttgtagtctatcagtggttcctcgctatctttccgtattattatcgaacatccaatctaataactttgctgaagagtttcacactacaatcttcaaaaccagcctttatattcgggaatagagtggactattagattctataaaataagtataattatccattcacattatattctctaattcatgagatattgtgatgaaatagggttagatcacaaaacttataccacacttcaatgggtgtggcgtgggaaattgagcatagagagagagtgaaaaatcaatcatattttctctcaaatctgacacttgtttttctctacttgttaattgccttcttatcgttagtttataatgatatataccttatatataattttataaacaaatattttaattaatctttttaaaataaagaaaaacatctaatttgatttaaatttataattcaaatttaaata

SEQ ID NO: 67455 - DNA, 5132 bp, Cannabis sativa
gggacaaaagccgattggaaaggcgagatgatctcctgaaggagaggtctcaaccgattcgccaagatcttagagattattttatacgtgaaattgcacaggctaatagggcggaactcatcaaagcaattagctcctacctttttggggatcagcacaatgaacgtttggttaatctctttcgcaaactcccctgtctcaaaaaaatgagccacagtggccaccacatcacctcccaccgtttcccagtggtctttaaagaatttcccaggcataccatctggccccggggccttaaggggtggcatggaccaaaccactttttggacctcctccgccgtaggaacccgaataagtaactgattagcatcctccgaaatggatcgagaaaccaggtcatcaagcagaggatcagcaggggagaccgacgacaagatagacatgaaattagaccagaaatactccccaacttgttgtctaccttcaatccactccgtatcattcacccgaacaacattaatgaaattcctcttgcgtttgatcacggtagcagcatggaagaacttagagttcctatccccatcgcgataccaaagttccctggatttctgtttccagatctccgcataccgggtttccacttcatctagttcaagtaagatgtccgcttccaatttcagattgtctttcgaaggcatccttcgttgcacttccaccaagaagttgttgagggtcttaattttctccttgcacattccaaagtgggttttattccactttgccaagcaacgacgggtgttatccaaacgagttacaagttgtaagctcacagttcccctcacatcaatggcccacgcctgttgaatgacagctttgcaaccctcatccctagaccaagcatccaggtacctgaacggggtgtgaaacctctcacgatcaaaaaggagatccacaaccaaaggagcatgatccgagtccttaatagcaagagcacgcacaccggccttcggataggacatcatccactccggatcacataacgctctatcaagtctctctttaattaagtcctggaagcacctcccgttagtccaagtgaaatgattccctacgcaacccagatccactccacccgtggaatcaagtaaatcattaagatcgcttgcatcactctcctccacctctcggcccccaaccttatcatgttggcccaagatagtattaagatcccccatcaagagccaagggtgattcaaggccaaaacctccaaggttctttcttcccaaaactctctcctcgcagctctagaaggcgggccatagaaaaaaagacaatgccaaacaggaccattcaggatgttagaaaaaaccgcattagtgacacccacattctcagacatcacctgaacatccaacccagctttccaacaaaggcaagtcccaccagctgacccaacagcctcaacaactgaggcacctccaaagcccaaatttcgccacaccccattcatccttgagccacttaatttagtttccatcaagaataaaacatccggatcttcccttgtaaccaaagctcgaagagctttcttagccgacggactcccaagtcctcggcaattccacgaaaggatcttcatggggctttggggggcatgcatcagcccgcctcctcggccattgaaaaatcttgtatcacagctcttggttcgacaccttgtttccccactctataagtaacactggcatcggacttagtagctctagcatcagattccaaggactcaaaacccctctcagcctgacccatctgcacaaccggtgccctctcaggtccactaatcaaagctctcccatcatctccatctttgattccttcaaaggagccctccaccgatctcaaggaatccaaaaacatcctagctcgtttggcttggtacccactatcttctaggttatccgaatcaccagggacattaactccacttgtctcagcaaatacatctttgactccggtcttctcaacaataataaggcaactgttcccacgactttcatccgtgaatttagactcaaactcccgatctgcctcaactttcttgcgtttagagccagccctactcccgggctccgggatagatttcccaaagatgggaatcttcgggatccctctaggtcccacaacttttgactttttaagcttcttaatctttcctgagtgatccttacccttctccccatcctctcggtttgctccaaacttaatcgggcccaatttctcttgaaacaacttagcaacatgcaccacatgttgggaggggaatttcgacgtgtccacataatcgttgtaagcaacattgaaagaattatcagcacgttgcgagaccaccccttccattttatccctctccactctagtgtggctaccactgttagcaactaccatacccggagtatcttgttctcggccatccttaagaggcatctcatcaagaaccggatcaaagttctccaacctattacgatcatgcaaactctccacttccaacaacgcaaaaccattctccaatctcgagccatcccgcagccaagaaccgaacaaggggatatttctcccatcctggaccgtaaccatacacttcttgccagaacagtcagtctcgacatgaccaatcataactccacatttaaagcaaaatataggtagtttctcatatttaaaaagactccagactttcttttgaccatattcaggtagagaaacccctgccaggagagggactgccagattcaaacgaacttggaacctcaaaaaatcattcataataacaccatttttcctaaccttattcgcctgaagaagctttcccatccgacccgccatctgttgtatgcaagcctccgtcataaacgggagaggaacaccccgagccttgacccaaatgtccaagcatgacaggtccgccgattcccactttccatcttcagggagagctgcaaccagcaagtatccactgcagaggttccaggggccattgtcaagaacatatttaacttcctttgaactacccaagcggaagatgaaggttctaggtttcaccgtttgaaacctccaacctgggttgagtttccacagacccgagagagccttccgaagagtcccattggagaccggctttttcgaatagaactttcccaccatcgagtgagcaatcgtctccttggccaaatcgttatctggggtgacttcgatggagaaatcatcaagacaaaaattctcagtttcctgggtaatttcgtccacaagaggagcaatattcaacgccgccattatcgatatacctgagagtaaaccagaggaaataccacaaacacaaaaaaaaccaggcagagcaggtatagtaactttttccctgaataagctaaggtgactgcagcaaaataccacactaaccttcgacagatccaaaaggggaagggtattaaaccctaagacacatgggctcgtgtctgtaggtagtggccgactacccatggccaaaaatggccggacgtacggtgcgtcctccgtcatacttcgcacagcccagacgggcccagatgaaggagcttcaaattctcacagtacggtaaggaaccagtacggtgacggaacagtacggagaggattaaaaaaacgttctcataaatctaataatagttgtatcattgttaaaaatgacaactcccagacacacattcttacgtggtgtgatcttgaagttatcaaatggaaagaatgttataaatccattaattaggtacgtccatctttatagatattagatacacatgtgacactgacaccgatagtattatttttttttaaataaaactccaccttttattaaattgaaaaatcagccaaagaatttgcaactaactcaagagacacaaaactctccgataatacttgactacatatggaaaataataacgcgcgtgatatgtttaattgctacaggagtaagagctagtctaactctgctaactatatatataatatgagaaatgctaaaaggtgcttggtactctcttacgtgttaatatcgttattggtctaaatgagtatcgagtcacatataatataatataatataatataataatttttagggagtatcgttagccaatcgcaacgcgacataccgagaaagtgctaggcgtgcctaatagccaattctctatatatatatatatacgtgcacattctaattgtgtttgtggtgctcgataaacgattgtatataccaaaaacattaataccaaagataaaccatgcttatttcttcccgaatatatattttctcttgaaacgagccatctaattgcaaatacactaaaaaatgtgccaaatgtatatatccaaaactcagatatatatatatatatatatatatttaaatattattcactcgaacaaggtattactattttttggacaaatacatactaataattttatgtagttctgcaattctaaatttgtgtaggcacacctttatcaaccaaccgccattcacatgcacaattaatactatattttgaaatgggaatatatctatagaaaagtataataatgactattacattttcatactagttttatagctactgtgaattaactcaaatgagttttcttattattttatttagatttttgaattttactcccattttcaacatattattttgaaagtttaccacaaaattatttgaatggatctcattattatagtaatgtcgtcataaattcataaataattatgtagctcaataataacaataacaaatacattgaattacaaaaacgacgtcgttacgtaccttgatcaactgagcaagtggctcccgacgacgggggttggcctcgcggtgtgggaatcgataatcatggcgacctttctgtctgtggtgatgcttcgcaatattcctacttagcgcgtgcattacaagccccaaagatacactgtaaagctcgctaacctcaaacatcaccggctccgacagcaccaccaccgtcccatttccaatacttcttcccactaaaactccgctcttagcctccaccagcccctcatagcaagtctctt

SEQ ID NO: 67456 - DNA, 3576 bp, Cannabis sativa
  modified_base (3325)..(3332): a, c, t, g, unknown or other
ttttttttttaaattttaaattataaatgtagcgttggtataacacttgtctaaacagtcacgttatcgttctgtttcacatgtgacaaaacttgacagaacacaaaaaaagactactttacaacactgtgatatagttcaggaaacatttttaatgtgtttcagggatacaataatgcatagctcatagtttttgaggtaaaaatcttaaataacctaaaaagtaagatcaatgtattatattattggaatattatttacaccgaaagtagccctgatgatgtggacctcaatgtttgacacatgacaagaaagatgacatctcggagttgagtagtcccaagtcatagcaagtcgacctgggaagggtcccctagccctacgcccaggttaacttcgggaactccggaatggaagtttgaactctgataactcgtttctaactcactatcttttattattttgtaccatatgaagacatggagcaaccgcaaatccaagctttgggagctgaaaatacatgaatctacaccccgaaagtcaacatgggcacctggggtttcatccagcacccaggttgacatccttaactagagtttcaatttttgagaccgtcttagtacaaatgggtaaaactttatattgggaaatgaactagaaataccacaagcgtatataagccatcagaatcagatttggagagagttcatttttgagcatccggtgcctgggcacccagcactcaagttgacaatttatcaatttggacaacttccaagtatcagattgacgatccaacttttgcataatcttcgtcttcatcaaaaaagaggaacaagtgcttccaaggaataaaaaacacttcataggtgctagaagcaaaacccaacccccaggttgacactggggctagcccagtgcctaggttgacattttgtcaacatgggccaatttcgataatgttttctgagaactctttcacgcatattctctgttttcagcaaagattaaaattcaactattttcggggaccaaacggaacttccaaggggccaaatttgggacccaacctaggttgatatatattcaacctgggccttttccaatcagattctcgaaaaagtgttccacatggatgttttccatcatcagaaataatgaagattcaagcaacctcgtgttaaaaattatcttcaagttagttatattaaaaaaaagttgtcaaaaattaagctcagggtccttctttttaccattttagaaaatacagtgtcaattttgtcatttaacaaaacagaaggttaaattggtaacttttgtaaaacatagagtctaaaatagtatttacccataaatttataataactacaagataaagacactcttgtaacaatcattaatattaatactaattataaaagaaactaacaaaatgaaaagggacaattatcaatgataaaataagtcttagttaagatgaattgattaaggactaactaatcattaataaacaacttccttataaataaaaactatataactatgaataaaaattcaaattattatttaccaacttccatttgtaatggtagctaaactatgaataaacttaactcttgattacaaaaaaattatctttagtgataactttgtagtcataatatatttttttttgtaactaaatatgacttttaatcaagacaaaaagttatttatgagtaaaacataatatttaaatacaagttgttactaatttagttgcagttacaaaaatgtattgtgactataaacatatttagtcacgataaattgtgatttttgtgactaatacttttagtcacagactttttaatcataacataagaatgatgatttataattagtcacaaatttttttacttttagttacaaatttttttgtaactaaaaataaattttttttgtgactaaaaataaatttttttgtaatgactcctcccatttctatcttttaaagctaaaatattttttaattatagttggaagacattttgtaataatggagtagaaaaaaatataaacaagaaattaaaaaaaattaaagaaaaaaaaaactataagtttgttggggaaataaaaatctgttaaattaattatgtatatacatttagttatttttatatataattaaatttgtttactacattttactttcattcccctccatttgtataaattttgaagagttacttataaatattaatatttgtttttattttcataattattattttgttaataatagataaaataagcaatgttaattttttttttttgaaaaaatgaaaattgtaaaatacaaacttttataaaaattatagaaatatatatgaatagcaatttgtaacaattatttatgtaacaacctgtaactatatttaatgtagtctgtattaaaaaaaataaattctatatttacgataatgttttatatatatatttacaattttttttaatttattttttagtatattttaatttaagattttagacctttttttgtttctttttttacaattcctcaaatattaaaaattaaaagttgcaaaaatccaaatagttaatatagtggccaagagttataaataattaaaaataaaaggttaacatagaaaataataattaaagggacacacagtaagaaagtgatattcatatcaacacagaatatttttaacttaaacatatgattaattatgtgtggaagtcaactaatcattattgtattcaataatttaatataaatcattgcttcatatatgagttagaaattgatcagaaaataacttcatcttattgcatattttttaaatttagagaccaataatttcaacataagattataatattaaaggttaaaagatattattagtttttaatataccactcgagttattatattactattagtttaattaattattagagctcacctattaatttaataattacgagaacaattaattactaactggttgaaagatatcattactcagaagatactactttataatcatatttgatatttttacattataaaatatttatttttactcacaataaaacttgttactaaaagtgaaaaatttataactaattataaatcattattcctatgttgtgactaaaagtttgtgattaaaagtattagtcagaaaaattacaatttgttgtgactaaatgaatttttagtcacagtacttgttgtgactaaaactaaattagtaataatttgtatctaattattaattaatactatgttttagtcacaagtaatttttcattnnnnnnnnaagtcacatttagtcacaaaaaatctatgttataacagaaaaattgtcaataaaaatatttttttgttttagtatttgtaccttataacaatatccaatgttaaatgataacaatacataatattaaaataatacataactagtgttattttacaagtttgcaagaggatacatagaaagtcatatcagtttagttagcaacattatcttcaatattgtttataattttaatcattattattat

SEQ ID NO: 67457 - DNA, 633 bp, Cannabis sativa
tgcgaaagatgaattcgctaagtgtttgtcgttctatgcgggttgctgatttcttcgtcttgagcatgcatatgaggtatcctgttcgaactgtttcttgcgagcagatacccgaagtcgattccacgtgtcaccatcgtgtgatgccacattagagtgcagaaattgggataacagttctttttccaaaactctttgtttgtccccttcacaaccaaatgttaacataaacatatcatcatcctcaaagatcttgatagggaatcgaccatcccaatgctctgccatctgcctttgaagagtagataaccaaactttctttgagaaactcccttctcaatcttcttatgcattcaattcttcacctctataaagtctttgttaaagtttccatcaactagttgagcaaaatatttcaccacggatactcgtagaagaattcaaggttgttaactattcttatcacaaaaggaggaactacagtcttcttctccttactagtgagtacgcccataacaaacaaggccatcccccacttatagacatcatcaacttttgtgcaactctcgaaaactttacacagttggccaaaactgatggatggatcatcgttgaagtactccacaatcaacc

SEQ ID NO: 67458 - DNA, 1110 bp, Cannabis sativa
aaataaataaataaatgatcacataaaccaaataacacattaaacaagtaatgaatttaaatctgtttctttattgataattaaatagaaaagattacagtagttatgttatgctgggcactttggaagtgcagaaacgatctggtatggaatcaaaaaagtgctgaagtcaaggatgttgtaatgttggctcaaactgttcttaatcaatggctatatgctcaagataaaaactttgatccgtctttaggactaatatatcccgaagatggtaatgagcattggacccccccaaacgttgatacgattaagattaataccgacgctgcaatattctcctcaaccaaccgatacagctactcttgtgttgctagatctcatcttggtatactgttggaagccaaggccaaatgtgtgagaggagttgtttctcctgaggttgccgaagctattggaatacatgaagctttgagttggatcaaggacaaacaatggagccgtgtggtaatagaatcggactgccttgttgctattcaatctattcgtagctcttctaccatgtcttcctattttggtagaattattaataagtgcaaaagtttgttagatgatttgaaagattgttttgtttctttaaggtttgttaaacggtctgcaaacaatggagctcactatttagcgagatccacttgttttatagctgatcgtagtttaagtgtgagcactgctccctcggagttcatttctgtattgatgaacgatttgatttaatgaagtttttcttctattgtcaaaaaaatagaaaagattacattgaaatatagttttatttaagtcacaaaaccaacactaagtagcactatggcgtaactaataataatgctgaaacttaattagatgttatggtacacattgaactcttaacatttgtctatagttattgaaagaaataaataaattgaagggtctagaattcagaaaacaaagcagcataggggtaagagaaccgaataacaagacaatgcaaaaccaacagacatcgatattaactaattaagacaaagaagcagcaaaccatgactaaagtgtggaatggaacctctacatatc

SEQ ID NO: 67459 - DNA, 2064 bp, Cannabis sativa
  modified_base (1624)..(1645): a, c, t, g, unknown or other
  modified_base (2030)..(2039): a, c, t, g, unknown or other
ttagggagttttaccgcaaaaattttagaattgggggttagttgcaaaaacctccctactttagggggttttgccgcaaataaccctataaattatctcatatgtaattaaatatacaagtattgtgttcatattagtcctcataattatacatatttctatattataagaaatcaaaaaaaaaaaatctaaaaattaactaaaaaaaatatttttgaaaaaatatctctctttcccgtaaatagcatctctcctctaaatcttaaactttttgtttttttttttattttttattttttattttttctcaagcaattgctaaccattttatagttttattttacttattcttcttcatcattttcttcttcttcatgtagacggtggtcgaatttggacaagagtcaattgaatttgagatgaagtcggtcgaatttggattgggtcgatcaaatctaggttgagatccttcaaactctattcgtctcggctccaatggtgcaaacgtcatggtgtttggacaagttctaacctagtctcttctttttctcactttctttcattggcttcgtgtttctcttacaggcggcactggtttgcatcccgagtgtggctaagacaacgactggatgagtgttgagaggaagacggggctcctatagctgtttcttaatggttcgacgaaggcagcaacttcaaatccacacatggacgttgactctagagaagaaaatatctaagcacaaaatatattatatatattttagttatgatttatgttgatgtacaaaataatttttatcttttatgatttacttcaatttaagtttgtggataatgagaaaattgagtttgataatttcttgatcattgtatttagatgcatggttgtcgtaatttttttttttttatttggatgcatgattagaaaaaaggatttgataatctaatgtgttgtttggtaatacttttgtcttttaactttttaaccacaaaatgaaagtaaaatttttgtttttaaaaaaattgcttttgaaaaataaaaatgtgttctgtaaccacttttgtttttcaattttaaaaacagaatacaaaaatgtgttctgataagtttatttttatttttattttttgattttatttacgtcgggtctaggttcgggaatagatttgggttcaaatcagaggccgggttcagcgccaggactgtgggatttgggtcgggataagttgataaatacttcttttttgtatccattaataaaaaatactctcaaattatatttcattaaaatatacccacttttatgagtgggttgcccaatacatcctcaccttctacttaagtctaacacacaatttgtattaatctaagggtataatggggacatcatctataaaagtgggtatatttttaaaaatatagaaatgaagataaaaattataacatataaactaaagtgggtatataatacaattttctcatttgggtccgggtctgatcgaagttcaaaatattgattaagaaaaaaaaattgtttaaaaaatattgaaagtgacttttttttaaaaaaaaaaaatgattctcaattaagaaatttaaaagtaaaaacagttttatagnnnnnnnnnnnnnnnnnnnnnntcacttttttaattttaaaaataggaaactgattaaaaaattgttacaaaacaccacctaagttaatacattcttaatggattgattaatttttgatgcaacttaatatttaacataaattttaattttctctaatatttaattcacgtatagaagtttagaatacacttacagagtgttgcacaacgaaatataactcatctcgttcaatgatctaactcttgtttctttctatcgcagagtaataacaatcattaagcctgaatcttcttagaactcaaaataatataaatctcttcacaatctttctcagagatctaagtattgtaacataactatgtgagcaagtgttataattgcttagttttatgccctaaataaaacnnnnnnnnnnataatcagatttattagttaataaa

SEQ ID NO: 67460 - DNA, 1009 bp, Cannabis sativa
  modified_base (786)..(787): a, c, t, g, unknown or other
cttttatggataaaatataataaacaataattagtatttttactttttgagcttttagtattatctgattttgctccttaaaatattcagcttgttaaaaaaaatttctaaaatataacagttacataattatgccctttcggttagattttatattttgttttttaacgttaaaaattaatatttttatcccctgaactttgaccaatacacaattttgtcctcttttattaaaaaaattaattttaaaaattataacattctattttttaaagcaattataatattctattaattttgaaaagaatataaatttttttaaaaaagttactaaaaatattaaatttaataaaaaagttaattttactaaaaaaacgtaaattattcctaagaaaatatatttttaaactttattttatttataaacatctttcataaaaagtcaaacaaatattattgaaaatctaataactaatttaaataatctaatttttttttgaaaaaaaataaacttatttatatttataaactcagatcttagcaaataattaaaaattcaataaaaatataaaattatttttaaaaaaatattataaattaaactaaaaaaaatgttatgtttacttaaacaactcaacattttttgaaaaaaaaaaatatactcaagtttgttcccgtaaaatttaatttttacaaaaattaaattttaatatctcaatgaattttttaataaaaaataaatcattttttaaatcacttaattagttttaaaattttaattcattnnttaattttcttaatcattcaaaaaatgatttttttaagatctaaatttattttttaagatttactaaaaatatgttgaatatttttcatttttatttttagggggtacaatttgatagttgtcaaagtttagggggcaaaataataatttacaaaggcacgtcaacatttaaatagaataatgagacagaacttaacagaaagactaaatttctgtaaatgt

SEQ ID NO: 67461 - DNA, 1402 bp, Cannabis sativa
ggtccaaataattagcatcaaataaattactactatgtttcacaccacattataagcttatacaactcattagttcaaccaatcaattgtcgaaaaaaatatcctcataagtgagagcaaatatcatgtttttactaaaaaatcctatatataatatatatatatataatttatttgtaccacaaattcctaagctatatatgttttggcaagttagtctctaacatttatttttttagcaaaatggtccccaaactatattaagttttggcaagttggtcctcaaactttattttttagtaaattagtctccaaacttttattttcttggaaacataaagtcatcactcttaaatgatggtattgtatttatttatttatttttttatttattttaaatacttttaaagtaatatattatcaaattaaataaatatatattttttatttttatgtatttttttttcaaatacgccaaaataaaaagaagaaaagaacaattgaaaaaacttaataatatatatttttttttatataaattactaaagtaaaataaatttaaattttatttttagtttgtgcttcgcgacgaacccatgaaattttaccagtgttgatgcatgtaaacgctaagttttcaataatctatctttctctattaaggttgatttaatcttgatttaaacatgaaagttaagatctaaaatataacaatcaacacacaaaattataagcttcatctgcactggaaattcattccagccgactagtgcttgggttccccgaactagaaaaataaccttcactatatcaaagaatgtttgtatagtaactaatccaaagtacaccagaataacaaaccaatatttatagtagtgactttttaccctaaataacagaatcccttggttatgaatacaagatccctttgcttcttgtttgttgaaattcgttcaacaaagctctagatctgtaacgccaaatcttagcttaaatcctttcagctctcactactttacttcagaacttactctgcaacttcaacccacaataatggagtttcttgctagtacctgcaatgaaacacacaggcgaaaataagaaagaaaaaaaaacaaatcactaatctttgataaaaaaaaaaaaaaaaaggttaatcaacacaataacaagaagttgtatttatacacaactaaacaatgaatcccgaaatggacaactgttatcggcaaatcgaataagcacccaaaaaatctttatgatgacgcggattatcacaatattataaactccaaatgcaactagacctaatttgttactacaaaaaatactaattcttataatgtaaaatttaaataattaataaatatatgtacaatcaaaaaattattaaaattataat

SEQ ID NO: 67462 - DNA, 1302 bp, Cannabis sativa
  modified_base (1069)..(1069): a, c, t, g, unknown or other
tactttcaagctcatcctgttcgggtatacactcaccaaccattgcatcaagtattgcaaaaaccggacgcctctggacggttgctcaatgggtagtacagttgggccagtatgaaattatctttcagcctcaaacaatgattaaaggtcaggccttagtagattttatagttgaatgtacgggtaaagaagagagcattttagaatgtaacccagagccagtacaagtacctcagccgagcaatagtgaagacaagccaacttggaagctacacgtagatgggtcggctatggatcaactgtctggtgtaggaattgcccttgtcactccttgggggcagcacctgcacggcgcagccgaattcagatttaaggcatctaataatgaagctaaatatgaagctcttattgccggcctaaaactcgcttgggaatttcatgccgaacacattgagatctgtagtgattcacagttagtggtaaatcacgtatctggggagtacgaagctcagggggaaaagatgataacatatctgggaaaaatacacgacctgctcgcacaattcaaaagctatgcttttaagtaaattctaagggaagaaaacacaactgctgatgcactagcccgacttgcgagcagcaacatacatgatgaagcaaatcagattcctatccagtttcttgacaaacctagtatcaccggcacagaagaggttgaaatgattaatacatccccaaactcgatgacaccaatagtagcctacctcagcactagggaactcccagatagcataaatgaagctcaagaaaatgaggagaaaggctgcacggtacatcattgtagaggaagttatgtatagaagaggattctccatgctgctactcatgtgtgtcacacaagaagaagctggacgacttttatcagaagtacgtgatggattctgcgacaaccatgcagctgggccgagtttatccaagaaaattctaaggcaaggttatttctagccaaccaggattgaatactccaaggcctatgttaagaaatgtgataaatgctagagattttcanagatacctcgtgcaccgcccaacgaactaactcagatgcaaagtccttggctttttgccatttggggaattgacttgatccgacagatacccaaaggtaaaggcggagtgcaatatgcaatggttgcagttgattattttaccaagtagacagaagacgagccgctggcaaccatcacgtccaaaaaagtgcaagacttcattgtgaaaaacataatttgtcagttcagatta

SEQ ID NO: 67463 - DNA, 1457 bp, Cannabis sativa
aaaaagttattaattatattaatgtgtaataaaaagtaaataaaaaaataatgtttaattatgtattgtaatgtacaatttagttcatgctatatattttgtgctaaatttaatgcaacttttagcatgtgccaaaaattaaaaaataaaataaaaaagggtttgattagattcttttccaatattttggtttgaaaagggatttttttagtatttttggccaaaccttttaacatttttagttgttacaccctaattaaagaaagtggtgacaaaactatcttattttttgacagttcaaaaacatgtaaataaattaaaaaatttcattcgaatttgtatatttttaagggagtttggccataactattctttttcttaattaccaatcaaattactaggttatttatttgtttttgaacatcctttttgcccgaggaaatcttacatttttagttgttacaccctaattaaaaaaggtggcgacaaaaccattttaaataaagtagttttttccattcaaatttgtatatttttaagggagtttcgccatcattattccatttttttttattaccaatcaaattacttatttgtttttgaacatcttttttgactgaagaagtttatctaatattggtgatatgtgcacataaattggaaaaaaaaaaaaataactgaagataaaatgtatgtaatataggtaatatcattccaaattgaaatgttaaaaatgaatttgtaataatatcttgataagcaaacacatttgaaaagctcatcactttatcataatattatatagtaaagagaggttgacattgaagatataatatccctcaagaagaaaatacagaaacaaaaaccctgcaaaaggaggcaaaaccatggtttaaccaatccaaattaccccaaagatctaatcttttgattccttaaaatccattttgagcttcacccacagccatgttgttgttctctgtcattgtctgcaatggcactcttgtggtcttctctagttcttgctacaaacacacataagaaaaccagtgtaaataacaccaatagtaatattccataagggtacaattcaacaaagccacaattcatcatcatcatcataccttattcttttggttgtttagtttttctttgagaattttctgtagttgccttagactcttttcttcataaaagataattttttgttctttagttgtattctcatttgtcttgagaatctcattctcacataccctgctactgtcatcttccataatcatttgaatgacagcttgtttcttgcttgatgattttcggggtgttgttgaaatggttggacgaggaaattgcccagaaagtttggcagctgagaccattgatgatggtgttgacaaagaaactttggaatctgcttcttcttcttctgatgattcaccttcagttatttcatcatc

SEQ ID NO: 67464 - DNA, 3077 bp, Cannabis sativa
actaccattttccctgtttttctctgtttctgtattttggttttagtttctcaagctcttagttatgatagcactaaatttctattacaagttacttagaaaccagttgaaaatatagcaaaattcttctatgaaaataagcaaataatgtaatgctcacattaaatggtatttgctatggtgaattcaattttaatccaatgagtttagaaaatgtttaactgaaaactattatgtgaacttttggtttcagcttcaaggaggtaccaagcagcacaatggcttcgtcagatggactatggcgcctcggaaacactctccaaagagccatccgaagaagagttctgtctctcgcttcgaaatggcctcattctctgcaatgtcctcaacaaagtcaaccccggtgctgttctaaaggtgagcatttcgctcatttttgtgtcgaatgaaatcggtttctcttttctttttgcctaagtttgttacaaattttcttgaaaggttgtggagaatccaataataccaatacaatcagttgaagcagcagcacaatctgcaattcaatactttgaaaacatgagaaactttcttgaggctgttaagaacatgaagctcttgactttcgaagcatctgatttagaaaaggtgaaatcgaattctttctttctttcttaacacattaggaaaatttgccaaactaacaacatgaaaatgttaaattagcaaaataactacattgaatttacactctgcgaccaagattatggttgcaaaacgaccataattgtctttttatggtcgcacagtgtaatttttgacaatctggtgagaatcatgaggttccataactctttcaacattttcaaatttttagggaggatcgtcgagtaaagttgtggattgcattctatgcctcaaagggtattatgaatggaaacaagcgggtggaattggagtgtggaggtatggaggaacggtgaggatcacatcttgtccgaaagaatctccatcctccttgataggaagtgagagcacagatgattcattggatgaatccgaatcctcacaattcgaacaacttctagagttcatccatctttccaacgaggtttcggttgaagaatcaagaattgccaatgttttgactttcctattcgatcgctttggacttggacttctacaagcttatcttcaagagagtaatggattagaagaattgccttttaatgcaatggtaggtaagactcttaccttagtttgatcatgttaatgtaagccaatgttttttgttaacattaaggttttattaacctctaacatttgacatgtttggttggaaattttaaggttattgacacttttctcagtaaggtagtcaaggatttctcaacattacttgtctcccaaggaactcaggtactcatgacattttctcttccgaattacaatactaatgtactttgattccttaaagaaacatcaatgcaagtacacttaatgattttttgctttgatcttcttcttcttcttcaaagcttggattgtttttgaagaaaattttgaaggatgattatgggaattgctctacatccgaatttttggaaaccatttcgcgatatcttagccaaagaactagtttggtttcgaatgatttgtccacattttgtatctgtggcggcaagcgtgagcttgttcaacacatagttagtcactcgtctgatcatgacgaggcgattaacatgagtcaaaaacagcttgaggtaaaagattatccttacaacaactttaatgtataaatttttgtcatgtcaaatcttacaatgttgtaatggattcatcttcatataattgtctacttttaggagctgaaatcttctttcaaagagacaaaagttgaaattcatcatttacattcacaatgggaagatgaccttagaaggcttggtaagaatataaagatttggtcacctaattatataaaggaaattaatttatatatatgaaaaacagttaagggtaactagtaaccagttaccttatataaaaatacatgtttatatacaaggagtagatgaacttgtaactttttctcttctttcttttttagtgtatcatgttaaacaccttgaattggcctctaattcataccaaaaagtacttgaagaaaatcgtcatctatacaatcaagttcaagaccttaaaggtgaaatcttttttcataaactctactattttcaatacttttcttttagtatatttgagcttgattcataattctcttttccacaggaacaattagagtgtattgtagagtgaggcctttcttacatggccaatctaacttacaatcaaccgttgattacattggagaaaatggaaacatcatgattgtcaatcccttaaagcaaggcaaagattcaagaagaatatttacatttaacaaagtctttggaactaatgtcacacaaggtatgtgagtatgttactcggggagataccaaactgtctcgagaagtaaaaaattacttggggtgataccaggcccaaccttgagaataggcgggctaggcctgtgcttagagtccacctaactcaggcgcccaaacaaaaattatccccttttaaacacatttttttactaattttttctaaataaggatagaaaaatatttttttttctatgactcactaaatttgaggaccggcatttaaagataccaaactgtcttgaaaagtacctttgatatcaatgcaacacctatgtgctaattctttttcaagatctaaactaggacaatagtgtgttgaatgtatcatcactttatttcttctaatcattacataatcatgcagagcaaatttatggtgacactcaaccactagtgaggtctgtgttagacggttacaatgtctgcattttcgcttatggacagaccggttcgggcaagacttacacaatggtaacatgctagactagacttgttaccattagtcataaccagtttatgtttatgatgtgttgagaaacttgacaagtttatctgcaatttataacagagcggtcctgatttaacaac

SEQ ID NO: 67465 - DNA, 763 bp, Cannabis sativa
atagctgaataggcatatgttttaattaccaaattaagcggtaaatagtaaattattcttgatcgagatctgaccaggctagctcttggtttcgtagactgttctaatagaatggccgccaggcaaaacactaggagccagggtaactcggtcagatccagtgttggtcagggagctcaaattcctaaaaatatgcgtggccgaggcagaagacctagaggcagggcacgcggttggggagatgctaacccgctgcaggttgcctaggaatgggaaaataggtttgcagcaatgcacgccaggatcaacgagtaagacgaagaaattagacgcctgagacagaacggtgctcctggaatgcctactccagagatgcaagtggctcctgcccctactgtgcaggcagggccgattgctatagtgaatcagatggaaccactatactaaaggtttcgcaagcacgcacctccaatcttcctgggaggtccagattttttaaaagccaagcaatggttgatagttattacaagaatcttttattttatgggcatcaccagtaacgacagagtggcctgtgccacattccagttctgggagaatgccctagtttggtgggacatggtttccctaactcggaatgttactaccattacgtgggaagaattctaggacttattcaacgcaaagtattataatgaggcagttagaagtgcaaagaggaaagaatttactcagctgacctagaaggagaatatgagtgtta

SEQ ID NO: 67466 - DNA, 596 bp, Cannabis sativa
gtatcgaatggtattattcttttttctgtttctaagaaaaatattgggtaaaattttgtttgatgaacttttttttgcatagataaaattctctccatgccactttgtatatatatttgtgcatatacattatgtctcttttttgtagcagtagtttgtctatctcaattttttaaaggttgctttgggatactatgtaaggcggcccaaatattttggggactttgtgcaaaattttaaaattggaatctttagaaagaacaaaattgtgtacattaaaattacaattgtattactagcttttttttaagatttgttcataaatttttaattatatattttttatttatgtatatataataagaaaaaagagacaaaaataggtttttctttcaaaaaaaaattgggccttaaaaaaatgggagtcttgtgcaatagctcaatctgcctaatacttgggtcggtcctgatggaagtagtcatagatcaaagcttttaatatcttttaattgatttgtaatatgttgtttaaatttgtattcacattaatagtgtttagtgtttaaaataccttgttgtacaattataaaaaataa

SEQ ID NO: 67467 - DNA, 1105 bp, Cannabis sativa
  modified_base (78)..(78): a, c, t, g, unknown or other
ggttcgaacccggttgggccctttctttttatgtatatatatattttaaatgcaataattctttttttattattattnttattattattattatttcaggtttttctcatattttttaattttaatttcaatcacgttttagtataatagttgattacatcatttcttatgtaataaattatttcattattttactaaattatgacaattattatatacaattaattactttaataaaaaaaaatactattattaattatataaactcacaaaattaaaatagtttattatatgaacactactacgatttggtattttagtgacactatttagtgacccgcattttacattttgtgtgggtcactaaatagttatgaataatttttagtgacacacataattagactttaaattttcaatattagtctcctataatgtgggtcactaaaaatttgaagtgtcactaaaaaataatattttttttatttatttttctttttattaaaaaaactaacctatagagtcacgctaggagagactgcaggaaaaatatatccccacttagcgtgtcactatatcatacgtttaaatttattataaataattaaatttaatattaagatatagtgacgcactatgagagtaggtacacatatacccacacattttgctcgtcactaaaagaataaaaaaatgtgataataaaaaaaaactaatttccataaaaataaatataaataaataattatattaaaaaaatagatgagtataaattcatctctttctaattaaaaccttaaaaattctaacctagctatcagtactctctctccccctctctacttcgtgcgaaccagaaccccaagccccctccaattcgaaccccaagccccctccagttcgaatcccaaagccccctctagtccgagaaccccgaccgtcaccttcctccaatccaagaacctcgacgaccgtcaccttcctccagtttgagaacccaacaccccgaccctctttcttggtcgtctctccctctctttgtttttgcgcattgaaggtcccatctccagcgacgcccaacaccctatctctctctctctctctc

SEQ ID NO: 67468 - DNA, 1120 bp, Cannabis sativa
aaaattggataagtattaaattttattcgataaaaataaatttaaagaattatttagtattattttaaaaaaatatatatagtcaatttattatttaacaaaataaaaaattcacttaataatttttctaaaacagaaaatttaaaataatatttatctattttttatttcattaattcttgattcatataatttgtggtatttgaaatttataaataacttgtcaatattatattcaaaataacaattgaatgattatatcaaataatccaaacgtatataggataagattttatttggaaataaagttcaaactgatcttgtttatcataacactctcatatagcaaaatatttttaatctttaattatagcactgtaaatttgtaatatctaaaataaaatagtatttgattttttttgaaataatgatgactcgagaataattatgttatttttgtgttgttaatgggttaagattatttcatagagtagttgtgacaatgttttaaattttttaaaagttgtattaatttcggaggtaaaatattgtggtattttcacaagatatatgatcacttaattgaagcctaatataaaaattcattagggtgttttataatatatttagtgggtttaattaattagttaagaaatttgtagtttagaaaaatttacaggtttaaaaaccgttttagcaaaacaatcatatctagttgtataactccgatttaggtaatttcagtggcgtttaaaagatatttcaaagatttataaattttgtagaaatagctatatcataatttaaaaaatttctaagtcaaaactaaatcctaaagttacaaaatagagagtttacaattcattaaattttaaaattaggcattgatttatttataaatttatcatattattattattattcagtatatatatgttttattctcactcacaaacaaactgctcattcttaaagtcatcttcaacctcactagctattatactttttgccaaatctatgacactccttgctctcataatcaatcaccattatctaatgtctcttgatctaagaagcttgaaatttttgagggagtagtgatatgataacaaaaacttta

SEQ ID NO: 67469 - DNA, 939 bp, Cannabis sativa
aatcgagtttccacgattgtcaaacccgaaaatatttttatttcataaataacatatacaatgcctatatattctattaaaatctccgtaattgataaattgcacttataattcattcttgtaataatccctaatttcaaataattagcttaagaagattataatcttatttattatgccctaaatattcatgtaattccatatttgataaaatatgcataattatacataatcacattttaaggatattacaatatatgtcttgcttagttatcaagaagtagcagtcgaatccaaaccatctgtccagttctacacgtgggtctggtggtaaacccatctaggcttagtgaatgggcccccagattgaataggccgatgtaaatatccacctgttacctatccagaaatgccaataacaaaagtcatctaaggttttttccaattttaagtccatcttgaccaaataacaaaccatgttggccaaaattttaagttcatgtttgactgaataacaaatcaatgaccaagtgattgggctcattgaattttcaaatttattttaatgagttatttgcggtaataatactcaaatctttttaattgttgcaatttattttcatataggttttatatgtttatttgtagttttaatttttttttttattgtttaggtgtttgatgtctgataatttcttagttagttgtattagataatcggtttccgtgtttaattgttactttattgttttaagtaattgaagtttaagttttttctttcttttgctaatttaggaaactagtttcactatgcgaaaattttaactagctgataaatgtatttgttgtgagttattccaacagtctaactctagtgacgctgacagcttcgacaattttttagtaatttttttttggcaattttgacgacttttctgg

SEQ ID NO: 67470 - DNA, 2043 bp, Cannabis sativa
cccgaaattgcagaagttctcagtatcaaagaagcacttagttggataaagaggaatagcatgtcaaatgtcattttagagacagactaccttttagttattcaagctattcttagttctgtatctatgccttctatttttggtttatttgttaaagactgtcaaattattttatcttcttttaagtaatgtttttattagtcatgttaaacgatctgctaacaaagccgcgcactgtatgacacgtagtacttgttattggtcaggtcgtcttttttctgagagtgatattccccttgctcttcagtcctttgtattagcgaatatttctatataataaagattattttcattaaaaaaaaaatatacaatgtaattttctattgtatctttgtagtctttatggatgatgaactcaggcaagcccgtatataacagactccttattcctcaaagtaccaaagaccaacaaatctatacacacctatatgggccttgattaaaccaccaacccaagcccattacaaggataacacgaaaattcatttaaataattaagggtgaaaagttgaaattaccaaatatttgttttaatattaagagtggtatagatagtttacattagcccacggttttggatggtctattttgttagatatgtagaactgactcattcggcttcaaatgaaagtgaaaaatcactctttagtttcttttgatttgtttattaattagtttgaatatcaatcatgaacatagatacacaaataaaatgtatattatatattcattgaaatatcaagttcatttttaatcaaaataattggcaatatgtacaagttataaggatggctttacatggatatgtttctcaactaatgtggttaaatagcttgtatttgctaaaatatatagtgaaataacataaaagaatattaccaacaataatgcttagttgtaatggaaccttctcataatattttgtttatattgcttatattatacaatataggatacctaaaactacaagaaaaaatatgtaacgttaatgtaacaattacttatgtttgcaagtaattacacctataagttgatgagattaccaatatatttaaaaacaattagagtaagaaacttattattagattttcttaagatatatgttatatcattttataatataataaatcgattaaaatgtgtcacatgtatattatcatgtaaataatatatattaaagtatttaataaataaattatatattctatagtttattttaacgtatatacatttgtaacataaaaatgagttacaaattaattattcatttgtaactcttttgttaatcacaaattaagtgtaataaaagaattgttacctaaattaattatgggattcaaaactatgatcttatagttgttaaaaagtgttacacgaggagtcgaaaggagttacaaaactctatttttgagtatgttgaagtcgcctaaagaatttgttagagtaaaatgttcaaaatgttatggctttaattgggtttaatcccaacttttttctcatcgttcataactcttatttcacctatttatatgtctacaaataggagtgtggtggaaatagtcatgatgtgttgtgtgtgtaaatcttcattatgatcatcctaaacactatatataaatgtctaaactcactttgtgacaactaaatttctaccagtatagtattttactagaaattttaagacttgataatttctaaagctatttccatagaagttttcttaaggtctgtttggtacgcacgattggattagattaaatttgtataatttgtctagcccaatatttggacatgctcaaggtctggataactaattcagttaatctcatctgtctaggactatttatctcatttaacagtgtaggataattaattgcatataggtgaaattttttctatcattttaaaaattgaaaaataaataatcaattgatactaacataaataatatgatactaaaatgaataatttacggcataaata

SEQ ID NO: 67471 - DNA, 1115 bp, Cannabis sativa
acacaattaagttgattatcctaactaccgtaggtaaattaaaaaaattaatttaccatattatcataattagttatataaatataataaaatttataagaattaaattattccacagatgtaattaattataatctatgtctattaatgtgaattttaattaatatataatttttatataattaaagatgttatgactactctctaattatttaaaattatattttcacttacatattaggtataaagctctaactaaaaataatttcgttatgattataatagataattattgagattggtgctcctaatgtggtcatccaaagataattaaaaattgttgtagatatgagtatttgtctcactttcatatactttcttatgttaaactacaaaattacttatgttttatccatattaaaattttatgaatgtcttatttatattttataattttttatgaaactttatgaaatttaatgtactaaataaaatattcaaactatcttaatgtttgaatatatacttaatatatctagcactattatggaataaaactagcatttaactcatataaaattgtaattaaatgcaccaataataaattttcagaatgaataaatataaattagtacatttattatatgataataaattaaatataaattgcataatatacttaatggaaaattaatcgaaattaaatcatttaaacaataaataacttaattttagtaatattataattacatattacttaattgtaaaacataaaattattcatattagcacaattattacaattattacatgcctaaataaatcatgtaattagttaccaatcaaacatttctaaattttagtttattatcatataacatataaatactaaatatatgttttaattaaactaaatataaggaaataaaataaaattctaaaatatataaaagtataattttttttttttttttttcagaatccctctttttttctgaaaaaaatgccatttaaaaaacaacatgacgttcgattcttctccaagtgttaggttatttttagattaattttaatgtatttttaatttagttttactcgtgtttggagaaatttta

SEQ ID NO: 67472 - DNA, 1493 bp, Cannabis sativa
aagagagcttttccaatagcatcaatgaaaacaccctctccaacatgaagtagagtgattccctaccgtccatggcatggtaattggcaacactttgccttggcaattgagaagttgaccgccaatagacagagtatacataaggaaaaaatattttcatagtgtccttatatgtataatctgatattctcgtaggctttggaaaaaatgggttttgtttaaattgaacatgccctttggggaaaggtccaggtcctattgggatagaaaatttaggaaagtaggcctcactatcaagattccaagaaatcagcccatgaactaaaattattaaacccatccttaactgtggatccaataacttgggctcatgacctccaatgataagtgggcccatgtttgtatttgattgggccataatttgggttgggtcaaaagtaaatattctaacaaaagagcctttttccataacacgtgaaaggaaacttaccccgctcttcatcttctcaggcgactccaccaagaaaaccagatctgatgggattaggcctctctgattgcccttcttcactggcggctccacctttaagccgcgacgtgtctcacccctccaactaagaatctccgaccaacataaaccgagtaaggaaaagaagataccgatgttaggatcctttagttgagcgcctatcatctcctttagctccgaagagctgcggttcgtcttcgacggcgtatctcgaagagccatctcgtggtgtttagctggaagcattcgcaaggcgcttctcagatttgaaaccgacattacttcatttttaacggcgtcgatgactagttggtcgtgttttccacgatcaaagagcttgtgagcctccattgccataggcaaaagatggcgttcaagctgcgtcgccttcccttgccaagcttgacgaatttttggaggaatattctagctcggcttctccttgtacaacaccggtatcatctcccaatagcacaaccagtgtcgtctccagcactccggcatcatctccagcaccggtgtcgtctccatctcttctttcctcggtgtcgttccccgctgcgttttcttctctgaccttatgtcattttcatcgtcggtgacgtccgaagggacatccccttctgacttgaagggcgtagttgattcgtctacggtcttcacaacctcagccgaaaatccaggctggttgactccaccattattgaaatttcttgccatcttcatttgttcttccactatgagcgctttagcaatgacctctgtcaatgttttaggcctatattcgtgcacccctattgcaatctcaacaggcagattactaaagaatatatcccgaagaaaagttaccggaatatcagggagttggtttgctgttgtctcaaatcgattacgaaactctgtcacagaaccttcataccgtagtgccatcaacttatcatatggatcatctttgattcgactg

SEQ ID NO: 67473 - DNA, 878 bp, Cannabis sativa
acgttaaccgtctgttaagttaaacgtttaacgttaatagtctgtaggctaaataaaaaaaggaatcgttaaaaaaaatcgttaaaccaataattaccgttagatatccattttatatatataaagatataacacaaaataatacaaaataatacaaaagatataatcaattcaaattattcaatacaactttttatattcttttctatttttaccacaacaaattaatatgatagttactatataattaagtccacataaataattaaaatctaactctgattaatataatacgaaaggtaaattaattaatcattttatttacttattttctataatataaatattctattccataactcatttaaaaaaaaattatataaattgagaatatccaatatatttgataagacatttccaactaatagaggtaattctaataaagttagagacgtgcctcgaacgtgattactatctagtttatatacatgtagggagtgtcactcagtataatagtattatttacattgatagtatgggtcatgttaattaaagattaatgataaagctttctgatatattgtagacaattatacttttaaataaaaagtataaatttattcaaaaaaaaaaaataataaataacatataacctactgtatccaatttttcttattggttgtgttgacattaaactattttgagaatatttttataatatcatgtgttttggatagagataaaagtttaatattaatatattgttataaatatgaataattatgtggatgtctaaattttttatttgttaccattaattgtaatcaacattcctctttttcttagtttctatctttcttagtttcttaatatttgac

SEQ ID NO: 67474 - DNA, 740 bp, Cannabis sativa
acacgatcgtaagccttactcatatcgagtttgagcgccatataacccttctttccattagtcttccttttcaaatagtgcattacttcaaaggccaccattatgttatctgaaatcaaccttcctgacacaaaagcgctttgggtttctgagatagcaaagtttaaaacattcttcattctatttgcaactaccttggaggcgattttgtagataacattgcataaagagattggtctgagatcacccatctgagaaggatttttcttcttcgggataagaacaatatgagtgtcatttattgtgtccggaaactgtcccgaatcaaagaagtcccgaacaaacttgaccacatccgtcccaacaactccccagtacttttggtaaaacgcaggggtcataccatctggccccggagacttatctggatgcatttgaaaaagggcactcctaacttcttcctcagaaattgtcctcaagagttcgtcattctgctcacggctaacagaaggctgaataccatccaagaccgttcccatgttgatgctagaagtggagaacagctcatggaaatagctagttattacattggccaaacctgactcccaattgacccaccctccattgctatcttgaagccgagtaagactattgtttctctttctagaattagcaattgagtgaaaatacttgctattcttgtcacccgagtttaaccaaaattgctttgatctttgctt

SEQ ID NO: 67475 - DNA, 707 bp, Cannabis sativa
  modified_base (35)..(44): a, c, t, g, unknown or other
ggcgtcgtaaattcacgagtgattctaatcacttnnnnnnnnnnaaaaaaaaaaaaaagataattatttattttgtattggctttaagtagagaagtgatgggatcaacaaccccatttacctccaattactattggtgttttcatcaaatggaaaaatatatttttaatatagataaaggctataaatttaattggagatagttaaatttaattgctttaatatatttttttaattattataaatataattttattttaaatttaattatttaattttattgtaattttgagtgagggtcatttattacattaatctaaaggaatatttgacagaaaaagcattattatttattaatctttattaaaaaaacattattacaattaaacattcgtaacattcaatactattgtaaaataattatcattgtcaataatcaatttacaacactgtaaattgttcggtgatcatttttaatatactgaaaaatttagagacataataatacatatatcatggttataggcaaaaaattttaaatatcttaataaaagaataattatgatttttattccttgaactttaacgtaccaaagcatgctcccgaaattttgacgtaccaaatcgtgtcctttaattttttttaaccattaaaaatcttctccaaactattgatattattagatttaaaaatatttgtctaattt

SEQ ID NO: 67476 - DNA, 613 bp, Cannabis sativa
ccatgcaatataaaatgattttcaatctttattaattaataaatttgattatattgaaatgagttttatttaggcataaaatcctcactgtggcacagtttaaaaccgtcgcctatgcttgtgtataggcgacagtttataactttgttttatgctataggtaacaaattaaaattgtcgcctatagtacatggtatgattataaatcgttgcctatacctaagcataggcgacaattttaagaagtttagcttggcgattgttttgcccgttttgcgatggtcaaataggagacggttatataaattaatatgaatactttgcccgactgtttaacagcttcaggaaaaaccaatcttgtagtagtgatgtgaagaatattttaaataattagacaatacatggtcatttacaaaagaaatttgagatattttctattgtctgccaaggtgtctcatttctaaatgcttagttgtccgaggttgtcttttttctctagccaagcccaacgactctccctgggttaggcgtggcatggtctcgaattgtggttttgctactgcgattaggttattgtaacttcaattagtattgtctatgtgacatgattttg

SEQ ID NO: 67477 - DNA, 906 bp, Cannabis sativa
cgcttcatctgggaattgaagaaaggttagaggcattatctgcccgctaactagacatacagagtctaatcaagtgtcattgatactctgcccgaaggtcgtccaaccccgcatgtcgagggaacccatgtggccaagttttttataactattagtcagcacacaactgaattaaggtcatcgcccaatcataaagtaatggcgcgaatacagcagacaatgaggaaaacttcaaagagtgaccctcattttccgagactgttcgctgtagctggaatggaataagcccgacctaggtcgacaaagaaaatgtcattgagagagacgttgaggtccaagaagttgaggagcattgcgaggtccgtcatgctactccctttgaggatgaaggagaagaggaagagagggtaatctgagtgatgccttttggtggctttaatggaaaaggagagcttatttctgaaattggaaaagttctagaagctggctaagattacatagaggaagaatacatcgaggctcgcccataaataggagggatctgaagagatctcgatgggtctctccaccatccgtcctgacattcaagagattgaccaatctcttcgaggaaggccttcttgggtaggtcgagtgtttccttccttctctcggaaaactcacaactgatcctagagagggttactgtgtgggctgggtcctcatgccaagcagggtgcaatgtttccattgtatccatacttcaaagagattgaaaattactaccacatcagtctgacccatcttactcccaagggcattaaataccttttgccctattcgtgttgtacgcttctcaaggatgggatcagccatccacccacgtcaccaactggttatttcacctgaagtccagccccaagcaaa

SEQ ID NO: 67478 - DNA, 827 bp, Cannabis sativa
  modified_base (47)..(50): a, c, t, g, unknown or other
  modified_base (305)..(305): a, c, t, g, unknown or other
gaagaagaagaacagaagaggagcaattactattacatgacaccttnnnnttcatgttcatcagatgagtccacccatcttctaaaaagaatagctacttcatgttgttcttgttctgtaaatattttacaaggaaaggtgtttgataaatagtgggacatgggggtgagatttttaaatctatttaaataaaaaaaaaaaaagagtaaaaaaaacatgtcacttttgtgacagctcacatctcatcaaccatttaatcaaaagataatataataattattaaatattaaaaataataaataatnatttttaaatccattaaaataaaaaaaaataaagaactagccacttttacacaaacagtcaaaaaaaacaaaaaaaaaaatatatagttgaattaaaaggcagtacactacagatctaaaaaaaaaaaagaaaatgtgtaagaaattggaataagctaatatataaaaacctataacttatactgccaaataaatataaacagtaaaaacgtaaatgtaagcgtgtcacagtatttttgtaataaatggggaaaaattaatacatcatgtaaatttctaaatttgtatgcctcaaatatattagtggccatatttggattccgttgaatcatggccgttgaaaactcatactaaaatccaatggtttcaatagaatattggtcaagtcttaatgacaactgccacttgtgtcagttgaatttcaggtgagtagatattaatgtcatgtttactaataagtaatgggaatcaatagtaaggtaatcattcccttacatttgtttacttgcattattaaaatta

SEQ ID NO: 67479 - DNA, 2959 bp, Cannabis sativa
ttcattataatactgttatagaaccggttctattttcagttatatgtgagacatctacttctggtaacttttctggcgacactgacttttccggcaccggtgacttttttgacgctgtgattttttcaacaaaatttattattacaggttttattaaatttatttattatttttttccccatattttaaactttaattattttttaatcttatatattttttttcattatttatttataccataaaaaaaataaactatactctcaattcctatatttataaaaatttctcttattaaatttaaaatacaagtacagaatcctgaaagaaataatctaaagatgaaattagtattttcccactttttattacttcattaattattcttgagtttatcttgaatacgattatagtacaataaacaagccacaaatatctgatccatcatgtttatttaatccctatggtactatctctgtaaaagaaattaggcatgaattggctaattgcataattgacccctatctactacatctataaataatataagaaacgaatatggtttaaaacaaacccattcaagcaatcctattattctactatccatacgttaaaatgatatttaacaagaatatataataaagtttttgtggagaaaaaagaatatacaataaagttatgcaatagctatctgtttcattaattaactactaccatatatcattattatatattagttttaggtcattatatatacttgtcagaggactttcgattttataccctcgaggattgaaatttgtgtttttaatatcaaactgtcgttatataataattcttagaagagatattatgacaggttttaccaatacggacaaaataaagcgtagcagaaaggataaagtcacgcatctgtatgctcgaaaataattgttctaatttaataaatgactcattttcaagtcccttaagctcattattgcatgataacgtaaccctttgattttaattcaattaattaaacaataacaaattaaattggtactacttaacatcgatatacatgagctgagaaggttatgcaaactgccaaactatcaaccatcatcatcatcataaataaaaatccaaaactttaaaagatccaaaaaagaaaatgtgaagaagcaatcgatttgagatattatttgcacaaaagaaaaagaaaaaaaaacaactctacattatctcatcctccctttatatctatctgcaagtgggagggtaattaaactaaaaaccaaaatgacacatcagaccaaaacagcttttttccaaggcaaaaagatactaaacaataagctaaataacaattattattcctaaaaaaacagatttaagtgactttaatcaagaattgtgataacttccataataatagtaagtatctcgagatctctgcttaaaaacaattcttgtaagcatcatcaaattctgcatttccatttccatctaacaccatttcttggtaacgacattcacggctacaaaaagccttttcacctctgcatggaagtaaaagaaatacaagattacaatttattattttaacataaagtacaaaattttaattaaagaaagaaaaaaaaatacctgtaaatgtaaatatcaaccttctcctcgaggttcttcttgcaagtgtgacaaaagccaaggaaattactatctgggaaagtgttagagttatgattcgataaagaatagaagctttccactatgcagttgtcaaaaatatgtgttgttcttggcacaggtccatgagagatcacacatgtgtagtcctcagaattctccacatcactcacagagatccaaccaccaccagctgtgattgctttaggagtagtagtcgaagtaataatactatcctctgttgaagattcaatacatgaagtattattcctggtcttgattccaaactcagctgtagattttggagactggtcagtggaagaatgtgtggaacatggtggtaaaggtgggatttgaactctaagcttattagtacccaacacaactttcctattattattattgttgttattacaagatgggttggaagatttgtctttggtgtgtgttgggtcagttagaacaaggctgatgccttttgcctctgttctttcccatgttgagcgttgtttgtttcccgggaaattaatcttgggcgatgttacttggttcctagaatatgatgagaaggggtttgaaagacaagagaatggttttgtgtctaggattgaagtgggacttactaataaaccgttgtctttttcagattgatgaccttttttagtaaaagctctgaactttggtgaaccaaagaaagatgatggagtttttttgttgttgtttggggttggagaaggttgagagctgtgatcagccattaaagcttgctgcttattgctggtcactgctactctagatctattcctcaacatagctcttctttataaaaaaatctgcaaaaataaccagaaaagacacctcaattactcccaagcaaaaatattcaataccctcttaatcttaagtagagatgagtgtgtgtgtaagtgtttatataataaattacctgaaaatcagatgagtaagaagcacgagcttgagattcccttctcttaaatacttgaaacagttttaacaggcctcttcagagatataaaaatgagtccttgttaaatttctgtggcttccatgtccaggttgaacattaaagtaaaataaaattcaatatagaaacaaaggagtcggttaatatgtctgactagctatctttattttgtttttgttgaattgaactaatagctaaaaagaagagaaaagaaaatactaaattccaatcataacaggtcgcatgcaagccatgtgatcaagatcagagctgatgcagaaagctctgctggcattttattca

SEQ ID NO: 67480 - DNA, 864 bp, Cannabis sativa
gatttggttagatagttattatttgggataattgcggcaaaagtccccaaaaacttagagttgaagcagattaatccccaacttcaaaaattggtggtgatagtccctaagatcacattgtttgtaagtccgttggtccctctttctaactgatccgttaaatgccacatgtcaatttttaattagtccaaataataattttaattaaaataatttaaaaaactaaaaaaaaattatatatatcagcctatttgtctctgaaaataaaactttggttttagtcctaatttgtcaaattgtcgagccaaccctgtagatgcttagaaagattctatatgcatcagcctatttattatatatgcaaagacaaataaataattaaaacactaacttgaatcaatattaacttaatttccacacctaatataaaaatatttttaaattttaaataaaaataaaaataattttgtcgatttagagaatgggcaactgaacagcatttcatttgataatgaatggattagttgatttcaaaaattatttgagatgaagtgtaaacttgtgtagtgactcgctccaactaaattcaagattattactacactatcagatttaagtaattgtcaaatctttactcaagactttcttttaaaacaatgataatagggtcttactatttaattttacagcctaagatcaacattatcatagggcacaacaaatgtgagtctctcacctagtagtgttttaaattcaacattcatcatattttattttctctcatttttttactactttctcattagacaaacagagataaaacagaaaactaaacagaacatcttttgcaaaaaaaaaaaaaaa

SEQ ID NO: 67481 - DNA, 1719 bp, Cannabis sativa
gacttgtccttgacaaaacaacaactcttgtgaaattgaagaaagacattattatcattagtgagtttagagacactaactaaattcttattgatttgagggtccttaagaacagaatttaaatgaatgactctagagttataagaaggtaaggaggtagagccaacatgagtgataagaagctgcttaccatcacctacagcaacagcttcagtcccactataagaggtggtagagtctagaggttcagacccagttgacacatgagtcgtggcccctgtatcagcaaaccaaatatggtcatcatcaaaatcaaaatagcagaggaatatacctgaggttcattatcaatgtccacttcagtgagatcggcacgagggttagcagctcctatttttgggggaacccaatttttatcaaaacggtaatggcaaactggtgcagagtggccatacttcaggcaaatttgatagatcaatcgggcttgaggtggaatgtaggcacgaccattccctttaccagagaattttgaggatgattcacagttgtttcctcaaacagttggcggagaaaaacgagtgttattggatttaggagcaccaaatagaagattggcttgcgttttaacgaaaagatcagtcatgttgttgtgatgttccagccggctttcttgggacataagaagagcctggacttcctcaagagacaaagaatcactacgggatgtgattccagataccacaacatcaaactcaggtccaagaccatttaagagttgaagaacaatgtcttgggtgttcaaagaagtaccagcaatagcaagagattctgcaagagattgaactttggcaacataatcagaaattgacaagttacctttctgaatatgaggaaattggcctttgagttgcagaagccgtgcacgagactggcttgaaaatttctgctcaagagctttccaaacagcagaggaagtgtggtgatttgccactgatgcaagaacaccttcggacatcgaaggtctgagcaacgagagaaggagctgatctcttttcttccattgaagatagttcgaattgatagtaccattaaccaagttttgcggaggaggaacaccagaaaatagtatatcgtcaagatcatgcccaatgaccgtgggaacaacttgtgatttccacgacaaaaaattggtacgatcgagcttgatcgtgagggaagaagataaagaacttgagaacgaattccatatcggaggagtagatttggaggattgagacgagttttcttgggcaattgctctgctagatgaaaccgcaggaccagacgggttagaagactccatgggaggcatctgataccatgtagaagcttgaccaagcttcaattgaggtaaaacctttaggtaaaaatcaaagaagaaacagaacaaagaatagcagagaaaagttcaatcccaaaagttagttgagaactttatttatagggatcattcatacaagaatcagttacagaaaaggcaaagagttacttaaaactaactattacaactgttacaactaatcacgaaaattaaaactaactatttctttatgtgtaacattaatttacttattttttagcttttgtttatttattattagtttctaaaaatttcggtaaacactatcggcttgccgaaaaatatgccttagagaaacattagaaaaattaaataaatat

SEQ ID NO: 67482 - DNA, 1129 bp, Cannabis sativa
ctttgcttgtcaccattgatgaaagtttctgtatgaataatctctcttaatcatatctagtataatagggatttgattcatattgagaattcatcagttgttggcttcatgtctaaatgattccacctttttaatttgactgtctgctgcgagcttcaaaaacttatttttccatgcccaagatgaatgctctgataccactgttaggacccaaataaattctcacagaggaatagagaacattacaggaacctgttggtatttgaaagaccacccctcttccaagagcaacaactctactccaaattcatatagtagatgacccctttcaatcactcttgcactgtttatgtatactcaatatttctaggactattacacttacccgaaccccttacttttgaatgacaaaatatatactctctttttgaagttcttgcacactccccactacttgatttatttccatttgtttgactcttgctgcctaatagtaacctttttgcccttgcacacctactacttgagctatccttgcatggctgagaaaaaagtaaccatggaaaattgagatgcttgtcctttacccgcaaatgctatttcgaaaacaaacatatgtaactacctgttctcactttagctagtgttctttagcccctattctattatacatatcagttcatgaagaataatattatgtgacatttcttggaacattcaagtgatgaaggagaacatgtagtgttccatggaaagtatgacttaacaacaaaataacactgtagcgtgaaggaaatttaaaacacaagtctgaaccacaatatgagatgattttttatttattttttttaaaagagccacaacttttcaaattttctaccagattgaaattttccttcaaccatttaaactaagagcaacacaaaaatagtataattctgaagcaccttatacatttacttgtgccctaagtgcctattgtgaaaaaatgaaaatatctcactagttgtagaagctgtgagttgtcataaccgaacagtgtggtcccaatgtgttataaattcttgttagaatattccctgctgtaatgattaatttgtaattgtgtaaaaaggtctaggtcattatt

SEQ ID NO: 67483 - DNA, 602 bp, Cannabis sativa
gtagagacacaagagtagggagacaattagtaagaccccgccaaagaaaattcttcaccttaggaggcaatttcaagttccaaaacatcctccaaaaactcgaattaccttgagtattccacctaccattgcttacttgtaaggcgcgataagtacttttgacggaataatccccatgagtctccaacatccaaaaccaagcatcctctactgaagacggagacaacggaatacaacggatcaaatcaatatccctttgaacaaataaatcgtgaagaacttcctcatcccactcaagagagcccacttttaataaattattgaccttacaatcatggagagctacatgagaagaggtaacatacggatgttcctcacaaggaagtcgtggttggttaagaaccggtatagaaacatcggttccaacacgccatctcgcacccctcttaaccacaaaatttgcttctagaacactccgccacacgtagcttggattagcacctaattcagcatcaagaaacgaggaatgggggtaatacctggctttaaacaccgagccaagaaggaactattattcgtcaaaagccttcaaccttgcttac

SEQ ID NO: 67484 - DNA, 790 bp, Cannabis sativa
ggagttctaattacacctctcatagctcaatgagaattaagtgtaattacattgtgtaattactacaaactttttattttaaacattaactattaaaaaatattatttttttgtgtaattacaaattattttgctaataatataaaaatttatatataattattacttcatatatccaaaactacttgtgtaattatttccaaacaccaataattttatttttaagcaaattaatgtaatatagatgaaggttacatgctattgcatatgtcagtgctattgaatggttgatattgttttagaaatatttaattactttttcaatgaaatgtaatgaatgaagatgatgaaattaaaaatatatattttttattttaaatttagttttgattttttcttttagaataattagtaattttgctctctaaattttggataatattaattttcttgttaatatatacagcttgttaaaaatttctctgaacttttacatttttaaagaaatttagtcatccttttagattctatctcatttttccgtttaaattttaatgtgtctttgcaaattaataactttgcctcctattattcaaaaaaaaaaaattaataataactttgcctcctaaattttgataactatcaaatcgtaatcccttaaaataaaaatgaaaaaaatttgatattttttttagtaaattttaacaaattaatttaaatattaaaaaatattattttaaatgattatgaaaattaaaagaaaaagtaaaatattttatataactattgt

SEQ ID NO: 67485 - DNA, 782 bp, Cannabis sativa
ttagtatttccaaatttactcgtgacaacaatgtcactgttgaattcactcctgatttgtgttttgtcaaggacaatcaatcgaagatccctcttcttcagggtgcccttaaagatggtctttaccaaatagcacctcaattcactcacaagatcaaacagccaccaaagcataacacagcccctgctgctgccaagaatgcttctttttgtcaagcaaatgctatttctacttcttcttgtactgaaaatactagtactacaagtgttttgaattcttgtaataaaaattccaaacttgtatcattgtggcacaatagacttggccaccccaatcaacaagttcttaataaagttctgaattttctcaaaattcctactgctgaattgtctctttgtcatgcatgtcaatatggcaaacttcaccaattttcatttcattcctcacaaaatagaactcattctccatttgaaatagttcacactgatctttggggaccctcacctcatccttccccagaaggatttaagtattacatatgtttcattgatgactttaccaaattctcatgggtttttcctcttacagccaagtctgaaactgcaagtgtcttcactcattttaataactatgttgagaggcaattcaacacaaaaatcaagtcaatccaagctgactggggtggggaatatagacctctcaaacctatcctctatggtttaggcatcacctttagacacccttgcccacatacacatcaacaacaagggagagtagaaaga

SEQ ID NO: 67486 - DNA, 948 bp, Cannabis sativa
aacatttactaaattaaaatatttattttagttaattaaatataaaataaactaaaagattacttttgattttgaatgacttatttgataatagtaaaaatatatatatatatacttcctatgtattaaaataaggctaattaggatttttgcctcttgaactttgatatataccaaatcatgccccctgaacttttaaggtcgttaaaaatactccctgaactattgagattgttggatttaattaacctattataatataggttgaaatagtactttacttaaatccaaacaattaatgatgtagctatagttattttttaaaagtatgataaaaatagattttttttttaaaaaaaaagaagattaagtttttgatgatacaaacaaagagaaaacagaatgtactcaaagaaaaaaaaagtggcgctaggtgaagcttaagaatagttgatctctatctattatttttggaagctccgtatataatagacgtcattttatgattaaaatttcttttgttatttgtataattatttttcaaattaggtatataattaaaagaacctttttattttattagtttcatgaaaaaattatttaaaagttaatttattttactatattacatagatatttcatatatttaatattactcacaacctgaaactaaattaatgctttaattcatgaaactataaatttagtagtaatagtaatatatgatgtcaaactataaaaagatttttagatattactagtacaccaactaaaaaaatacaatgcaaaaattatggttgaatacataatataattaaaacatataattattatttgttcactagatgaattaatttaatgcgaattagaatatgatgcaattatattagattagtggttatgtttgttatgttagttactagttataggaagttagtttttaaaaaa

SEQ ID NO: 67487 - DNA, 788 bp, Cannabis sativa
aaaatgggaaaacacagtaaactgtgtaaatttcccattagtatatttaaattaattatttttttaaaataaaaatttaatgatttagaccaatcataaattatcatgtgacaatttagtaaacacttactagttaagtacttaccgttctaaaattataatttaaacattaataacgtcaaaaaataaatttaagtatttatttataaataaaaattaaacttaaatatttataatacaaattattacatgataataaatttatttgattgatttgattataacccattttgctttaaataaggtaagttaaataaacttcaaattattacccttgtcttaattccctttaactctttccattatcacttttgtgttttaactttttgtccttttttttcttttataaatgaacttttgtccttttccatttaaaataagtatataatttgctttaaaaaaatatattaactaaaacataaatttaattaaatacattttattccttccaaaaaaaaatagaaaaatttaatacatattaatttattgttttctaagaaatcggcaaatcctcgggttataataatatgggcaaggaactccgccgaccactaaattacgccacgtcatcgttcaattggtcctgctctgacgtggcgtgaatcatagttttggtacagggagtggaccgtggtctttgtcgcagaggagtcaaactttgagcattgtcgtttgcttgcctacaaaacagagactgagccagagttcgaaggaaagagagagagaga

SEQ ID NO: 67488 - DNA, 943 bp, Cannabis sativa
atctgactggactaacaccctctcggctcccatttcctttaccagttttatcccgtggattagagcttcgtactcagcgtatgatctcagcttttgttactcccccgttgaatgtggagtgcgacgtccgaaatgaggcagtcccggaagaatccttctttcaccagacgattgacctgtatcttcaactgcctgcactcgtaggttgcgtggccgtgctctccgtggaaagcacaatatcgccccttatctctcttgacggggtccgtggtcattcttgggggccatttggtttccttcaatccccgcagtcgttttatcaactcagttagggtaatggtcatccgtggtagctcctcttctccccgctgggcgtgcgactgcctcgcctcgccaatactcaccattactgtccctcgggagttcctttcgttggccgagcggttgtcagttctattatgaggccgtgcagctggtgtccggttcttagattcgaaaaggaaagtatctcctgatgccaaagtttcacgcgaaacttcctcattgtgtcgcttctcttctacttccaaggccacatatcctcttgccatagttagggcccttgtgagggacaagccaggctccactatgatcgccttctttaattctgaaccatgtatcaatccttgcattaatgcttttgtcgccactgaatcggtgcatttcaggatactgacgtattctttgctaaacctggtgataaaatgttccagaggttcgtcgaggcgctggtgtattaacattaagtccgtatccaccttagcggttcgcacacttatcgcgaaattggcctggaatcttaggatgagatcctagtaagaatttactatgcctgatggtaggttgtggaaccaacgcagagcgggccctctcaatccttgcgtgaaggtcttgcacttgatag

SEQ ID NO: 67489 - DNA, 1038 bp, Cannabis sativa
gatttatcttgagcagtacgccaatggtcaagtgtagtccatgctgaatttagaacttgagttggagatgaggctttcttttcccaaacaagcttgttttgtgacttccaaagtgcccaacaaagcatgatggcacggcaagatgtatcatcaccatacatttcgaatgtagaatcaagccagtggccgatagttgatgaagtatcggattggatggtgaacccacaatgctcccagcagctgaaagcaaaggaataatttaaaagcacatgtgaagcagtctcgacagcattgtggcagacagggcacaaggaggagagatcgacattctttgaaaccagttcgaggcatgtggggagagtattggtgacagcacgccacatgaaattcttcactttcggcggtattttgaggtgccagaacttgtgccaaaacccctagtttggttgtctctgctgtccatgtttactaagctccagcatatcgtaggcactacgaacagagaaaaaaccagacgtctcacccttccaagaccaacagtcttcggctggtatataactcaaagggattccaaggatcaagtgtgcatctcgggagttaaacatatcattgacaagagaaatatcccaagatgtgtcatgagtatccatgagagagctcaccattttattttcaagacccagggtagtaaaagtcacaaacgggtttgcagaatcgggaagccaaggatgcttcaaattgtttgttgtaatcccattaccaatagttctttgacaacccaacttcaccaaatgttgtgcgctccagatactacgccaaacgaaacttggattattaccaagttctgcagtgagaaaatcagagttgggataatacttggcttggaacacacggctggcaagagatgttggggaaactggcaaccgccacccttgtttagccaacattgcaagattgaagtcatgtaaatgacgaaaacccataccgcctgaatgtttatgagtagccatacggtcccatgacatccaaatgattcct

SEQ ID NO: 67490 - DNA, 5953 bp, Cannabis sativa
  modified_base (432)..(437): a, c, t, g, unknown or other
cgtggagtccacttggaacatctgctcaggaagtatagtccgagcaggataccttgttggcatgctcagagcaagatatacagcaatctgcgaagagcaatccctataattcagggaacaatttacgtggatatggcatacacacgatcccgatatcagtgtattcagcctcaatcccatgatccttgcattcaacattgatcccacgatctttctatttatacccattgtaacaagaggggaaactcttcctccccaaacctcctagccctataaatagtgatgtatgttcactaggcaggggatcggtgagctaagactataccttaaatatattatctaagaattatatattaagagatattgttgtaagagctataagaaaaggaatctttttccttgatcttaagtcaatacaaataatgaggattnnnnnnttaccgaactgctcggggctaaacctctataaaattcctgtgtctttttattgttttatcatatatttgttattataaatcatttatcgcttgtaaaacagactcattgtcgttggctaaaagtgaagtcaacactaccttaactagttagaaaatctcgtataggtgcccaagccaaatggctcatggcgcacatgcgttgatttcattaatttaaacaaagcatgtcctaaggacaattttcctttaccaaacattgaccaacttgttgatgctaccgcaagtcatgagcttctcagcttcatggatgcatactagagatataaccaaattctgatgtatgaaccagaccagcagcatacctgcttcattaatccagatcgaggtttgtattgttatatggtaatgccatttggtttgataaatgcaggagcaacgtattagagacttgtgaacatgatgtttgcagatttaattggcgagacgatggaggtgtatgttgacgatatgctcgtaaaatctcaacatgtgaaggaccgtctcattcacctggaggccatgtttaaaatcttgtgacaataaaaaatgcgactcaaccccctctaatgtgtctttggagtgggcttaggaaaattccttgacattatggtaaataaccgaggaatcgaggctcatcccgcaaaaataaaagctttggtggagatgctatctccaaccaaaccgaaagaattccaaagccttacaggtaaagtcgctacattaaatcgctttatatcacgttcctcgaataaatgtaaagagttttttcaaattctacaaggaaataaaacatttcattggactaaaaaagtgtgaagaagcttttcaggccctcaaaacgcactcagggcaacccccgatactttccaagccgattccttgagaagtcttatcaatctacctcgcagtgttcgaatacgcgattagttcagtactaatccacgaagaccaaggtagacaacatccggtatactatgtgagtaagcatctcttagatgctgaaactcgttatctacgaatggaacgactggcatttgcattgctaatcacttcaagaaagttgcgaccttactttcacgcctttgcagattttaaactcgaatttccaaatgacggagtggcagtaatcacagaatagcgagttgatcccgacgtactaacgggcaaggggtggactttgtacgttgatggggcatccaacagtgaaggatcagggggtggaataatcctcataagtcccaacaatataaaggtacacactgcccttagatttgagttttctgcatctaacaacgaagtcgagtatgaggctctgatcgcaggattaaaactcgctcttgagatgaaagtcgagtatcttcaagcatttagtgactcacagatcatggtttttcaagtcaacggagagtacctagccagaggaggtcgtttggccaaatatctttcttatacttgtgagttatgacaaaagttcaaaaagatagttgtttgtagaatacctcgtgcttataattctcatgtagatgctctcgcccgattggccttgacaagagaagctgaattactctatgtaattcctgtagatgtattaacttacccaacaatcaatcgagaggagatgatggaaattgatacagtcaaaaaagtcatctggatgaccccgataattgactacttgaaaacatgaatgcttcctgaagataaaacttaagccaaaaaactgcgatatccagcggctcggtatgtcatttatgatgacaagctctatcacagatgctttagtcaatcgttacccaagtgtatcgatgggactgagtgcaattatatactccgagaagtgcacagtggaatcagcggtaaccatgctggtggcaattcccttgctttaaagatcattaggccaggatattactggccaacattgtgagcagatacagctagcttcgccaaaagattcgacaagtgtcagtgaacagctacttatgtacacaggccactgagccaattaaattttatcactagtcactatcccttcgcggactggggcatagatttaattagacaattatcaaaaggaaaaggaggggtaaaatacgccgtagtcgttgtttattacttcaaaaaaatgggttgaagccaagcctcttgcaactataacagccaccaaattgcgcgagtttgtctacagcgccatcatctgcaggtttggcatcccttgtaagttaatttctgacaatggtaaacaatttgactttaaggagaagcacaaactatgcgatgaattggggattcaaaaagctttttcggcagtcgcatatccacagggtaatgggcaaacagaggcagttaacaagatcattaagcatacaatcaaaggtaaactcgaagaatgaaaagtgacatggccagaagaatttcctaaagttctatggtcgtataatacaactcctcgatccacgactgttgaaacccccttctcgctctcttatgggtgcaaagccatggtgccagtagaagtgggagcaggatctctaaggagatatgttttcaacatcaatagtaatacagaaaatcagttgttacaggtcgatcttctagaagaaaagcacgatcaggctcatttgaaaaatgcagcctatcagcagtgaacaactcgttattttaactcgaaggtcaaagaacgaaggctgggagtaggtgatttagttttgtgaagggtcatgccaaacacacaaaactcagcacatggagtttttggggataactaagaaggaccatacctaatcgctgaaaaaatcggtagtgcaacttaccgattatcagacctcgatggaacagtgatcaagagagcttggaatggagagagtttaaagtattactatcaatattactcgcattgtttttttacttagtcaatttattttgataaatttactaagtatagggggtataacctaccattgtactattgattattatattgaaatttttgaagttttcataaatttttatcttcttcgcaagttttacattctaagttattacaccaagctgtaatgataaatttattgcgaatagaagtatcatcaaaatagcagtttagattatgcgagtacccatgtgccgcttaataaatatgcaaaagtaaatatcctcgaaaggatatagtgttagataagtaattaaaatttgtctgaagtccaaaactcgagtacccatgtactgctaactaaaaaaaagttaaagtttgacaattataaaaaagaacataaaaaagttaaggagctggagttttaggatcatttgcgaccttgcttgcagcaccatcagtgacttcctctgtatccgcgttcttggcctcttcagggaaaagatttctcccacatccttgagtttgggtaggcgacatagcacgaaaaagcctcggctattttagctgcttccgccccaaggactatgaagtaaaaattgacaatttggacaaagttatgtggatgtagttagaaacagctgattgtactatctcttcccatactcatcgcgatcacgagtccattcctcaactctcaactctgagagcttggctttttcctctgcttgcttagccttctcctcttcctactccttggccttcctgaggtcttcgacgtctttctcctttgaagtcacttcaaacttcaattgcctcatattctcctgtagaagggtgttctgcttcctcaagagattgagctccttagtacctgtgacgaaagccttcgagaacatggtcatgaactaggaggccagttctacggagcgcgacatcaattcctcagcaggaaatcccttgaccttggacacaaacacatcactcacgaacttgtcctagagagttatgaagttgtgagccctaatagcagggtcgatcatgaccttcttcctcttgtcttgggtgattttgacctacttcgaggagtcagccacgggagtcaccaaaaccttgctcttcctcttctactggataacaggagaagtcgtcgcagttctagccttaggttttcggttgagaatcggagcctgcttcaggaacatcatttctgcgagcaaagcaataggataagtataatttttatactgtaaaataacatgtatatactcaatgtattacctgatgttggtcttgatgtttgtttacatagacgcttgtctattctttctttttatttctcagaaggctccttgtatatggctctcgttgaaggctggcgttcttaggaataggcttgtgttctcgaaatttggcagtcgtacatagcaatcgccaatcgcgatcctgaataggcaagttacctagaacttcagcaatttctctgtgaacagggtccaaaacaagtcgagttggcctatatgcgatcaaaaaaagacaaacattagcgactttgaaaggtaataaaaatatactaagtgttgagatacgtgacgtactaggtcgataattgaagtcagtcctaactcctggtactttaaacgcgtagaatcacttagatttccaatcccccatattggaaatcatgccttctaccccattaatcttagaattttcccatgtactaaagcagtagaagccattgttgtggcctacattttttatatcgtaaaagtagctaaagtcctccatcgtcggctccccttggacatactccatatacatcgcatagaatcctagaactatgcgataactatttggggttagttagaagggagagacatcataatgtctgaggatgactttaacgaaaggatgaaagggtaaagatacctgcatcgaagaatagggattgaaaaaaccacgtcttacgtggtaatgatcgcagggttggtaaaggggagatggggtcttagagatgctgaaggatgcatggtccctattcgcaccaaattcaaccatggaaatgtgtgcaggtcagatttggtaactcacgagaccgggtcctcgcaagagaagggttcattcagttgagcatcgtcaactgagtttgtttcactaccctcagcaccctattcctcctctaacacgtagtcagcaaactcgaactcttcttccatttcttcgacttcgatgtcaggggcatgcctcgaatgagtgagatactcatgagctcacaccgtagattcactattgcgaatctcaactgtcactggctcagcgagttcctaaaccatcctatctatttcgtcagtagatagcgagccatgacgcatagccctggcatcaggaacctcctcctcaaagatcaaggtgggtataaagctatcgctcttctccagttcatcagcgaaggccccacctccaaaatcgggcatctgactatctgacaggactctcatctgaaagatagaagatcttttcagtgtggtgaaagtgcgagaataacacaagtgacctcacccgcataaaaaaattcaaaaagtataaaggattaactagacatctc

SEQ ID NO: 67491 - DNA, 809 bp, Cannabis sativa
cagccctgaaagactcaaccatctgtgctggaaatgaaccaaggatattgtagtcgaggttttgtatccaaactgcgtataacagacgctcaatcttgtcctctaactctttcgtgttccttgccttaatagtgaagaggcgatgttgcagcttgccaatcctggctctaagtttctttgtgcgaacgtgcgaatgcgagagacacctctagtgaatggagacagactccccgagttactgggtgagaatggccactgaggactgctcgttggtcagcaaaacttggaggcaatccacttccccttgaagagcctcgcactggtggcgagactactataaatcacttagagcctgttggaggcgctagagatcctcctcccctagagggttagggacgggagtgtatttcagcaagacggatgcctacaaacaaagggcacagttaaaaaaaaatgtatgaaaacagcagcacgtgaagaaaataaagacaatgatagcatatactaacccatatgttacacttaagagcatcctcttggcgtcactccgccgaggagttgcgcaaccaagtctaatcaaagggggtaaactcacccaggtaccagttatacccactcaaacatttgttcatttgggattgtgaccacgccaagtcattggggccgtaggatggatgtgaaggacctaccgaagagccaaatgggttctgaaaaatctctagaatattgaagccgtcgaatgacacgttacaagtgtaaccagagcctcccaagttcatctcctctggcgcctgattatcaaggccaac

SEQ ID NO: 67492 - DNA, 770 bp, Cannabis sativa
cagatagactttgagccgtgactggctggcagtggctcccaggcggaacctccactctctctgccacagggcgacgctcatggttcgctagttcgccggaaatacctcctcacttttcctctctctcatctttactgttgctgttcgcatttctaaaattttttgactttttccagtgaaccacgaacttgtctcagttggtctcttgagtctcacttttttttcctttgctgctggacgattcccaagcaaggctggaggtgtgcaccgctttgatctcaagcaacgacgtctctctctgctactcaggttattttgtagtttgttatcaggttatttagacattggatgactttgcttaatacgtttgaatttgattatgtctttaacacacacaaactcacaaaggttcttttatacgatttggacattatcatctatctccaagctgggttaggtttgtcctctcaaattttaagttttttaaatagcgagtcggcaaattttgagctgtgatgatgacttgtgagtatggatgttgctaaactctattttttaaaagctatatattggtaacgatgatgatgatgaaaaatagtttcagtcatggacatttggcaaaattttatataaaaataagtttaatttttgtaaaaaaaaaaattataataaatactataattaaatggcttaactgttaaaattattatagtagggatttatatataaataaaaaataatactgcttataaattttaattgctaaaaaa

SEQ ID NO: 67493 - DNA, 925 bp, Cannabis sativa
actaattaaaatacatatacatttttctctcgatttttttttcagggggggcgactgccccccctcgctacaatgtgggtccgcccctgagcacgggccagttgccatggcagaagatatgtagttgaagtcattacagccatagggattaaagaagctcccagttgggtaaagaccaataataggcaacatgttcaaattgagacggacaatcttgtttcagtacaagctatgtgaagcaaccaagcaatgaggtccactttcggtcttttaatcaaagactgccaacttttattatctaccctcccaaatattaatttatttttcattagacgaccagcaaaccgagtagcacattattttgctagacatttttcgtatcaatctgatcgtagcatttctgatattcctatttttggtgaactcttatatcttttgtattcataatgctaaattattcaatgaagttgatatttcatctcaaaaaacataaaaattgcgaggtctcttttcactacctttcgtaacgataaagaaaattcctcacttttttcgacaggaaatagagtaagagaagacttatctatattctttcttgttctacattcttctttctctttaaaaacagttcagattatttagtaacaaaatttgaaattttaagagcataatttgatacataaagttatgggtgcacaacttgatacataaacaattattatattattaaaattgaacagaattaaataaaagttcataaatctaaccatctcaataataaataattttcacaatctaaaaagttaggaaaagatatttatattaattaaaaatatttaattatacaaaatacaattttacatctgccaacacttttttcttttaaataaataaatatatttttattaggggtgttcaataaaat

SEQ ID NO: 67494 - DNA, 1113 bp, Cannabis sativa
ctctaaatttatgaataaagctgaatgccttaaaaataatattttcatgccactcagggggtagtaaggcataccacacggaaaaatgtaaaataggccaaaagtgaaagcaacatcaagcagaatatgtatctaaacgaaatatatatttaaatgtaaatataaaagatgtcctagcccaaaaacaggtcttaaaaaaaatattaagggcctggggacgggccttaaagactgtctccccttagaagataataattaaattgtctggaaaaaaggaaaagagtctgtaaagataaaaataattatagtggtgaactggttgaactggttggcctaatcaatgcggggtggaagacgagacccccggcgctcctcgagcaaggcgtcaaccttttctttttctcccagaagcgaacgaggacttcctcaggcttgggataaaagttgagtttgaggtagcggccatttgactgccaggccatatatacgccatcgttgaaacgcttgacgcagtgcttgcagacgacgggggtcaggagctcatcccttttggcctttttcaaggcttggtctttaaagtccctcagctccttcacttccatagtgaggttggccgtcgacagtaagtccgcctggtgcagctcctccaaggattttaacttagcagccatctcatccatagcctccctgacttcccgcaactcgcgcttggccttggccgcagcctcgccctccaccttcagctgctcctgatgcctcgcctccgcctgagcctccctctactgggcctccttccggaatgccctcctctcagccgacaagtcccgcaaaatcttcacggcctcttccatgcccccgaattcagaaatggcgtacccgtgatcaatcagggtctttgagaggcggtcggtctctgcaatgatctaaaaaaagaaacaagaatgaaatcagatgccttaagacaaaatataagcaaaaagaaaggaatgaatcgcaagagctcaccgcagcccgggcagcgctgatgtcctaaacctggtaaacagagttcaccgaagcacaagccgcgtatctcttggcttggaattaagtcagatggcagacaaactggct

SEQ ID NO: 67495 - DNA, 2114 bp, Cannabis sativa
cagcttatacaattacaagaaaaatagtctattttactctatagcttataagcccattgcataatcatcaaataaccctctagatagttgagcccttgcaacaagagagggaaaacagattcatatttaaaagacagctcttgatagatgagttttatatcttttaaaagccagcatgactgcatgcattaagactgatctatacaaagtcgatgcaatattgagcatgagttacaatgaacgcaatagttaaaacaatatttagtcaagaaaggtaagaatggtcttaccgttgcgacagctgcatgagtgatgtgaattacgtcaacaacagcaactacattcccatctgcctccgaaaaattaaatcatatcagttactatgataaacagacgaaaacgaaatgaacaacatcaaaagaaatggaatccttattgagtccatatgctacctctatctagcacaggaaggtgcaaaaatttcccatcatgcatggtatgcagtgcatcaacaattggtgtatcaactgtagcacattctggatttggagtcattacctgtcagtatgatgaaaagcatgtagctgaagaattagattatttcttattatagttcaccacaaacaatcatgcacacatcaccagagaaatatagctcatatatcagcagtttcagagtcgataaactattattattttggcaaactacaagtctcatgcttcggagaaaaacataccttttctacaagagtcgagtctggaggaagattttgggtaatgacccgcatcaggatatccttggaactaataaattcaaatgtataaaatttctattcattaatcatcaaaatttaacaattaaataaaacaacattagtatttttgttcgatcaagaggaagcacgatttaattagcaagagacttacgtgagaattccacgtggtttattatcaacagttacaactgcagagcttagtttcagatcaagcatcttctttgttgctgttaaaacagtatctgttggtgtaactgttgcaaccctgtacgaatgaacttgctgttagacaaataaaatttggatgattttacacaaaatcgtgtgcaattaatagataaacaaagaaatattacctactttgaattctctgcaatgattgtagacaaagatggtctaaacatgcggtcacgaagtgtttcaataaacgtatttggacctgcaaattcaaaaaaaaaaaaacagcatgatgctactacacaactaaatacaattaaaacataatatataagatattacccgactaagtccaagaaacactagataatactatcgttatatgaaatgaactaggatgggaaaactctaccaaccagaaatagtggtgccccaatgcttttcaacaccttcaacagcagctgcaatagcctttcctttttcagctgccctttccatgcgagcaatagcatcgtacaagcactttgctatgtcaagcagcgcaatgacttctccattctccaccacaggcaaatgcctaaatttccctgtagaaggaggaatcatcaatgaattaaaaggggaaaacagaaaagagttcaatatgccagagagtgaaagtaactctgcaattgctaccaaccttgtaccatcttctgtagagcttccacagcatgagtatcagaaagaacaaaagtggggttcctcgtcatgacttttgaaacgggagtttcctcaagattcatctcacgagctataactcttgttgctatatcctaaaccaatacgagagaatagataataaggtaagcccatcaaaagcatcatacatgtgcttctatctctctttctatgtacgttcgtcagcaaatgattgcatctctataacataccttgtctgtaagaattccacaaagcaatgcattagaatcagttaacaacaaagcatcaactctacgagcagccattcgacgacaagcctctgaaatggttgtactttcaggtattgtcagagccttggacaacctcaatcttttcacggtacgctctcccgttaatcccctattgccagatacaaaaacattaattttttcctcattttctatgttctaactacaaaac

SEQ ID NO: 67496 - DNA, 1153 bp, Cannabis sativa
taaaaaatgtagatattttattaacttttaaaatgatataaaatctttaaaaatgaactagaattttgagagattttcacttttatgaaagtatatttattgaaaatatgaaaaaaaaaaaaagaattataataaaaatgtgaagatattaatttttgacacaaaagaacatcaaattggtgaatagttttttcataaaatatttataaaatcgaattagcattccaatggtatcaagatcactggaatcatattaaaattgagacaaatatgactattttactgagacaacaattttaaaaaaataaagatattgggatttcgaacaaaatggtactgtattagaaaacatggtcactaaactctaatagttatttctactcgctatcaatagaaataaataatatttattattatacaattaatatctcaataaattttgaacattatttttgatttgagtattacatttttcgtgttgatcatctcattatataaaaaataaataattagtcaaatacataataggtcagacagaataattacaatcattaattacatttaaatgaaatgaaaacgttaataaaataaatttaagaacaattttgattgttcttattaaagttcgaaatgggtgtgacaatattgatcgcaaccgttcatatactagaaacatacgaacttgggggttcaaacgagttattgtgtatgttcggtcttgggaccaactaaagtgaaggtgaaaccttaacaaagggcgctggagagaaacatttggtctccgcatataatcaatatatgttgcaacttttgataacttctctctatatcctgcttttattctattatattatgcgatgcacaacgtgtgactagatcttgtctcggtcacaccttcttacatgtttctatcatgcaaggattattgcctttttggaattatagtttaacacgttatccttcttctaagagcaacatgtcaatgtgttaattaaatacgagattgcactcgtcatttaaatgaagaaatcatctgataacaaactatactatccaatcccatacacttaacctatgaataaaacatgacttacatgatatatattttttttggaatatttgtggtataataagtaactaaagttttaagttt

SEQ ID NO: 67497 - DNA, 2210 bp, Cannabis sativa
taaagcgaagtcatcgcttgaattatttttgcaactgtagccttccctcgcgaaagtagaggtccacttattaaaaatttgacatgactcttgcatgcacgtagtttttcatgcctgagagatcactggggttaagacatgtttttaatcatccttcccagaagagaaggactgcttgaagtctttcacccgcctagtgatgattcaccctttggtcttttaaagcaaagtcatcgtttgaatttttatacaacttttttcttcccccaaagaagctgatgtctgccacataaaattttgacatgactctcgtatgcacgtagttttttgtgagtgaaagatcactggggttacaacacactttcaaccctccttcccggaagagaaggactgcttgaagtctgtcacacacccagtgatgtttccccctttggcctttgaaagcaaagtcatcgcttgaatttttatgcatctcttgccttccctagcggaagtcgaagtctccctcataaaaattctacatgactctttcaggcacgtagtttttcatgcgtgaaagatcactaggggtatgaagcattttcaaccctccttcctgaaagagaaggattgcttaaagtctgtcacacaaacagtggtgtttcaccctttggtcttttaaagcaaagacatcgtttgaatttttatgcaattgtagccttccctcgcggaagctaaactatgcctcacaaaaattcgacaagactcttgcatgcacgtagtttattttgcgtgaaagatgacatggggtacgacgcatcttcaaccctccttcccaaaagggaaggactgcttgaagtttgtcacacgccaagggatgtttcaccccttggtatattaaagcgaagtcttctcttcaatttttatgcaactttagccttcccttaaggaagtcgaagttatcctcgtaaaaatttgacatgatacttgcatgcacatagttttttgtgcatgaaagaccactgagagtaagacatgtcttcaaccctccttcccagaagagaaggattacttaatgtatgtcacacgccgagtgatgtttcaccatttagccttttaaagtgaagtcaccgctttaatttttattcaaatttagccttctcatgcagaagccaaagtctgcctcataaaaattcgacatgactctcgtaacaacgtagttttttgtgcatgaatgagcactagggatacaacacatcttcaatcctcattcccaaatgtgaaggactgcttgaagtctgtcacacgcgccgtgatatttcaccttttggtcttttaaattgaagtcattgcttgaattttaatgcaactttagccttccctcgcagaagccgaagtgtgcctcataaaaatttgacatgactcttgcatgcatgtagtttttcgtgcatgaaagatcactagggatacgacgcgtattcaaccttcctttccaggagaaaaggactgcttgaagtctgtcacatgcccaatggtatttcaccctttggtcttttttaaagcaggtccatcaccttgaaatttttatgcaactatagccttccctcgcgaaagctgaagtctgccttataaaaattcaacaaggttctcgcatggacgtagttttttctgtgtgaaatatgatgaagggtatgactcatcctcaaccctccttcctaaaagagaaggactgctcaaagtctgtgacacgccaagtgatgttttaccctttagtattgtaaagctaagtcatcgcttgaatttttatggaactttagccttcccttgcgaaaactaatgttttccactttaaaattcgatgtgactcttgtatatcgaagtagaccctagcatgcagcgatcgctcaagtgatggtgcagttttagcttccctcacaagaaaccaaaagcctgccattccatgaaagctcctgcctccaccatgaggtcttcatcatggaaaaggatcacatacataacttgtggatggaaatacctcttggaagaccagcgtcacttcaaccttccctcttttagggatgaaccacttgaagtcttccatccaacatggtttctacctataattctagaaataaatctttggcttaaaaatttagtcccaaaacggatttccgccatggaagtcaagagatcattgccaaatttagccaatcctctcgcaaactttggga

SEQ ID NO: 67498 - DNA, 1322 bp, Cannabis sativa
cagggcacatcaaattggtatcagagctggtaatcagggaagaaaatgaccaataccagaagttcaaagaaagtaattgaagcagttcaatcggaggaggaagaatcgcaaactccaattcctggagaatggaactcgatgaaggagaaaattgtctctcatgaacgcgacatcgctgtaattagtgagaagcttgatttgcttctacgggggcaggcaagaatggcgacggagcttaccgatggtccacgaagtccaattggaaggactgctcatcctccgattgggtcaagcggttcgggaactcagaaccgtgaggaagctggtggctatggaggacgaagatcacagttccgtccaaggaatattgaacttcctctgttcgcgggatcggaccccgatgattggacatatcgggtggagagatatttcaggttgcaaaggctcacgtcggaggagcagttggaggccgcggtgttgtgtttggaagggtcggcacttcgctggttcaggtgggagaatcggaggcgagaaattcgcagttggaatgaactgaaagatctcctcctccggcgattccttcctgcacacgaggggacggcgtatgaccgtttcctggctctgcaacaaacttcgacggtgcaggaatatcggcagcagttcgaggcattaacggcggtgctgggtacggtggcagagccgttgctggagtcggcgttcatgaagggcttgaactcggagatacaaggaacacttcgacttcttgaaccagtcgggttggagaagacaatggagcttgctgaaatcgtggaagctaatccaaaggtgatgcgggcttttgggagtgggccgagtaaaagggtaagcccaattagaaattcatcttttaattcaaatgggctcactcaaagaaatgttatggggctgagtgggataagtaataaaagtccatctgcacaaaatagcacttatcgtgcatcaactccattaaaccagagaagagaaatggagtggggaagaggattcaagagacttactgaggctgaggtgcaagagaaaaaggctagaggagtttgtttcaagtgtgatggaccgtggacaaggggacatcaatgtaagtctcctgaattacaaattattttggtgcaagatgaattggaagaaatggaagagttgactgccatggaggaattgggtgttaatgagcaacatgggttgactgaagctcaagtggtggaagtgtcacttaattctgtggtgggattgacttctccaaagactatgaaattggtgggtagtgttcatggccaggaggtgactgt

SEQ ID NO: 67499 - DNA, 1446 bp, Cannabis sativa
tatagaccaacacgagtgtttctattatgctttgtctcactcgcatgcatgcttaactgtggaatttttttgtgatataggctaccaaaaaataagatgtaccttgttaatataagtaatatcaatcaatccatttaaaccttcttcaaatgtgtagtctcatatctacacaatctcagaatcatcacacttgaccttctccaaacaatataaaattacatagcttacccgatatttttcgaatcacgggactattcattaacacaataagagtatgtcataagagtaaaagtcttgacagtgtgacacactatacaacagtatataatgtgtatatatatatatatcactacaaaaaatagttacttttagtgacaaatcacaacataaattttttgtgactaaatgtgacttttggtcacaacaaaaaactacttgtgactaaaatatagtatttagtcacaagttgtcactaatttatttttagtcacaacaaatattgtgactaaaactacatttagtcataacaaattgtaatttttgtgactaatacatttagccacaaaccttttagtcacaacatatataaatgaagtattattagatcatacacaatttaatgattaatttttttaatagaatatcaccaatattgtaatttaggtagtacttttagtatttctcttatattatctaattaataatagcaataggttgattagggtacgtagattgataaggtgagctacatatataacccctattagtatccaaaatttggtgattaattaattaattaaagattattaattattataaatataatgactaatttattattataaaagtagtattattagtatatatatgtacattcaaaccaacccttctctacaaaataattaataacttattattactccacttttcatgacagttgtgatttgtgtcatcaattgacaaaatatcaccctccaccaacatattacatccaattaatgattattgttattcatttatgaaatattgtgttttccatatattaatttatctttttaataactgtaatgaaatagtaaatgtaaagacttgtagtaataaattggtaatatgtgactgtagatagcaaaattacagtaacaagacagttgtaaaaataaatagtgtagaatttaaaacttgatacaagtttataattatacgtggtattaggacctaacaatttatttcaaaagaaaaaaaaaataattactagtgtttaatcatttagtactattatgaagtgacgtcttacaattctcgcataatttaatgtgataatttttatacttgctaattattctttaggcgctatgataatgctagacattacaactggtgcataatagcaataattgtaacatacagtgtcttaacatatattgttattacaagataacttattgt

SEQ ID NO: 67500 - DNA, 815 bp, Cannabis sativa
aaaatgtgtctcaaactttttgggaacaagggctacgtttggttctaaattaaaaaaataacattttaaactggaaaaagagattgaagataggttttttagtgaccaaccaaacacccctttcttggtcttatgtcacgtttttggaccaaggatcgtgtttggctggtcacagaaaatgttttttgaatgctttgtattttccatgaaccaaacaggcgtaaagggttattagggaaaccctttcatcccggtttttatttaaaaactaggatgaaagggtttccttaataaccctaaattatattcacccttttcacatttctggaggcttcttctttggcaaatcaaaaggcagccatggaagccttttctccaggtatgcctctctcattctcccccctttctcattctccctcccaccacctgttagttatatctctcacttacatctcaaatatggaatctccatctcgttattcctttccctttctaggtgcgctgactgttggagaacaatgtctgacttagggacaacgagccatggacactgatatgaacactggttagtgcttcttcttctctctgttctcatatctatatcttctctttcatttgtgtgtatatatatttgcaatttgtatttatagatatgtatttttcttgtttgaaattagtttttttcctattagttatacaattatgtatgtatatattcatattatgtctatgatttttatttttattcattttgatatgaatttggagattttaatattgttgcaggtaaatttatgcatgcttgcttttctttt

SEQ ID NO: 67501 - DNA, 736 bp, Cannabis sativa
ctccgtcgagctcccacggtcgcctggcccaaaaatattttacttaaaaaatggtatctactaatacccacttaatccaataaaatctccgtaattactaaattacgctttatttattcacatattaaattttcactaattatcacacaactagcctaagtaagatcataatcttaccccaacattaattcaatcacatatttaataaaatatgtccaattaattatcataataattttctaagatattacaactattccctccttatagaaatttcgtcctcaaaatttatcgaaaaaatttgggacactgttcccgtagctgtgactttaatttctaagtcatctttaatcttgttgttcatccatagtacttagctaacgagatattctttgtttcgcagaactttctctcttttttttttttataaacctaaatcaactatgtcacatatgtcaggtctattcaaaattccatattttcgtaactcagtatgggaatcgtatctgcctcatacttctgaatattgatatacaaaatattaactccaggtaaggaagggagtatggctaactgataagctatctaacctccccgtttacagaaacccaaaatagaccgataaatttgagatttaactttcctttcttcctaacttggaatttcatgtctgtagactttggattaacatagctctcccatccactctataaagcaaacatataaactcaaatct

SEQ ID NO: 67502 - DNA, 809 bp, Cannabis sativa
accttttattttttatttttttaattattaactacattaatattacaacttttaagataaaaaaatacattaatgttacaactttatttttctttgtttttttttttcaaaaaaaattatgattacgatttagtgatgcactaggtgggtgggcaaatacttatccaatcatacctagcatgtcactatatgtcagtatttttcaaattagtaaaaattcaaaaattttgaattttactttttagtgaccctctatatttttagtgacacacattataagagactaatatcgaacaattagcgtctaattatgcatgtcactaaaaattactcctaactctttagtgactcgtacttttatgtgggtcactaaatagtgtcactaaaaggctaaattgtagtagtagatgctaagtgtctctgtttttcattaacgttgaccatgtctgctaaaaattggtggaagagattggctccctaatcaatccatagttggaaggagttacaatccaccttattttggaaacaatttatagtcgcgagagattgtgatatggaagttgggtcactcaccaacatcaagcattaactaggtgaaagcctgaagacctttattcaaaggatgatggaggcaacaacaaagaccaaggtcaacgatgacatgaaactcgtagcccttcagtctagacttacagttggctccttgttatgggaagagatgcaaaggaaaagggctgagagttcatgcccaaggcacaaggtatcattaatttgaaagatgctcaacaagcttttggagtccctccgac

SEQ ID NO: 67503 - DNA, 1082 bp, Cannabis sativa
  modified_base (109)..(132): a, c, t, g, unknown or other
agtacgcgaacccacacccagagcctgatctagacctaggctaaaatccggacccaaacccaaactaaaacaaggactcaaactacgacccgaactcaaacccaaactnnnnnnnnnnnnnnnnnnnnnnnnagaaccgaactaggactaggactacggcgaggacttaaacccaaacccgaacctagatcaaaaccccgacaaagacctaaacccgaactgagactaggactcgaaccggaacctagaccgggataaaaacccacacaataatcgggacatggaccaagaatcatgatagagacctgggaaacagaactaggaccgggacatagtatacgacccagacccgaacttgaacataggacccagctcatgacctggcactagaaatggaactagaatggcacccgagattggattcggatcttgatccagggcttggacaaaacccttagtcggtgtcattatttgggacctagcccctgacacgaagcctgataaggacccgaacccacacacggccctgaacccagtcccaaacccaaaagtggacccaaacccgtaccctgcgaccaaaaattggaaccaaaaccagaagttgaccaggactggaacgaggttttggacttggaatcaaaactgaaactggacctagatcgagaaccgtaaccggacaaggacccggactacaaatcagacctagacccgaattgggagccgcacccggatcccaaccaaaacctggactcgggactcgaacacgaacctgaactcagaccaaaacatggaaccagactagggacacgataccagggtcaagacatagaactgcactccaatctcgatcccgaaccaatactcagaaatgggacctgggacctgaaccagaactagaccgagacccgtgacagtgattcagatcttgactggggattcaggtaacggggcctggaacagaatagtagccggtgtctagatctaggactcagaataagaacagaaccaagacgaagaactaaacccgaacctagacctagacctgggatccaaaattagaacctgaataagaatcgtcgaac

SEQ ID NO: 67504 - DNA, 779 bp, Cannabis sativa
tcagtcaccgtgggctgaatcccattcaaagtcgtccctagctcaaaaccagaagaatggaaaaggtcttggaagtaccccttgataacatcttgcaaacccgactcccagttcacccacctacctccttgatcttgtagttgagttattctattattccgcttacgagaactagcaaccgagtggaaatatttgctatttttatctcctgaattcaaccaaaattgcttcgaacgttgtttcaaaaaagtgtcttgctgagttaagacttcataaagcttagatttaccttcctcgtgttgttgaatagacacatgatctctaccccacttcgagtttccaatttgcgctttgcattcagctattcgtttcttgaagctacccgtgatatcttttccccacttgcctaacacttccccacaagaccgaattttctcctgtatagtacaattgcccgatcctacccaacaactttccaccaacaccttacacatcagttcccgaagccaagcgttctcaaaacgaaatgaagaaaaggtagttagaggagcggtaccttgaaacaccagcagtaaagggcaatggtcaaaaatagagacttcgaggttgaataaggaagcttgggaaaatagattcagccacccattgttcaccagagctttgtccagcctttcctcgatccaattatcgctattcctccctttctcccaagtaaatgggtaaccttgaagaggcatatcaatcaactcacactcactaagcacctctctaaacccatc

SEQ ID NO: 67505 - DNA, 1065 bp, Cannabis sativa
gcctcataaaacattaaagaatggtagacatttatcagttgattttgaaataaatcagtttaatgttgccattcttcctgttaaggcctggacttctttcgactttgttggtgaaggcatctctataaatgccttgattttttctagatttgcctcaattctcctcgcattaactatgaaaccaagaaattttcttgaggagactccaaaataacttttcttcaggttaagttttatattgtattctctaagaatttcaaagcattcttcgaggtcttttgtatgatcatcacattttatcgactttaccaacatatcatcgacatagacttccatattttttcaaatctgctttcgaacatcccatccactagttgctgatatgttgccccaacattctttatctaaatggcatgactttataaaaataaagtcccatgttggtcacaaaacttgtatgttcctgatcaggaacatgcattttaatctggttatatccagaatatgcatccatgaatgtcatcagctcgtgtcctggaactgcatccactaacaggtcaatcgttggtagtaggaaacagtcttttggacacaccttatttaagtctgaaaaatcaatacaagttctccaagtgccatttggtttcaggacaagaataggatttgaaatccacgagggatagaaggcttcgtgaatgaaatcattggttaataacttgtccacttcttctttaagtccccttgtctctcagaatttaagggttgccttttttatcttttggccgggtaattggggtctatattcaaatgatggcatatcacttaagggtcaatccctatctcatctgaatggctctaggaaaattgatcctggtttgccttcagaaagttgattagctgctattttaatttttcatccagtcttttcccaataaacacacaatcagtgggattctttggatctaaaatagtctcttccagttcttcaatttcttttaactggtttttctcatcttggatcctagggtctagatcctcttctttcttctcgccttcttctgttat

SEQ ID NO: 67506 - DNA, 1204 bp, Cannabis sativa
tacatcaatttattttttagtgatacaatcttataaaagattaaaataaaagtacatagtgttgggagggagagtaccgaatgttagatcatgtaaatctgttatataatctagaaaattgcagttttatctagaaaattactccaaacaaaagtgcacaattgcagttttatctagaaaattggttagtacatcaatttattttttagtgattgtgtacaccaatttataatatagaaattttgtatcaaaaaaaaatttataatatagaaattaatatttaaagtgtatattttacacgtgtataaaataaaaaactcatgcatgcaataaattgtttaaactttatttttagtgtgttatttattcattttttttaattttttaaaattttgtagaatttattaaataactacaatatacacgaatataaaaaaaaaatttaaaaatttcttggatgaagataaaagctgcagaagttttcctattttctatttaattatatgctttttgcttctctttttacttttatgaaaatgctaaattattgtgttaaagtttcatgaatccaaatttttgaacattgctattacgcattttaaagtgctcaacatcacacaaaaatgtgacacattgtaaataattatcgatcgatttctcatattatttgtttcactaaaattttgttagaatttatgccttaaaaagtgtataaaaaaaattctatttatagataggagtcaaacatttttatgtatacttgattattcaattattaatatttgatattaaataatttatatataaatatcagagaattccttattcttacatgatgttgtgacttgtattgtatagagaattaatatcacttagccttgaataatgtaacgttcccacttcaagcctttattagatacttacacccacagaatgaatggctcttatacatgagtacgccactctggctgcttcctggatggatgactgaccctacaaactaacatgagtgtttccagcgtgctttgtcctcactcacacgcttcttagaaaaacttcccaggaggttacccatcctgaaattgccccaggtcaagcacatgttgtgcctaaaaaatatttttagtatatatatattacttattgatgaatactaaataaatttaactataaatattaattttaaaaatattaaaccattaaa

SEQ ID NO: 67507 - DNA, 885 bp, Cannabis sativa
  modified_base (631)..(644): a, c, t, g, unknown or other
aagccactctgtcattgccggtgacgcccataaaatttagaattctagtaataatcgtaagccactttttcagctttcataacatcaggacctcccaaaaagactggaggtgcctacttacggaacctttcatacagtggttccattcggttcactacagcgactggtcctgctttcacagcaggagcacgagccacctgcatttctagagtagggattgcaggggcaccctgctgtcttaagcgtctgatctcttcatcttgctcagtaattctggcttgcatttctacaaacctatttttccaatcttgggcaacctaggcagccctgtggcaggttaacatcacctcagccgcgtgctctgcctctagggcctctaccttgaccacgaacatttggcgtaattcgaactccctgaccaccactagatccgaccgaattaccctaactcttagtgtttcgcctggcgtccatactattagaatagcctgcgtaaccaagaactagtctagtcagatagtgatcaagtaaaacttacgaattgtcgcttaatttcgaaatttaaaacatgtgcctattcaactattaggctactaacatgcttcataacaggcttttcttaaatcatacnnnnnnnnnnnnnnactaaagcaataaaagcttactaaaccgtgaaacgagctgtcgctgatgatgattgtacatgtcgtgacgatcttcagaagataacctagcggctctaataccaaattgtaacaccctaactatattagtcatgttaacgtgattttaacttactgtacagctcgttgctaatcaacgaggttattgaaaaccgtgattaattaaaactttacttaattaattaaaaacataaaatagcat

SEQ ID NO: 67508 - DNA, 1733 bp, Cannabis sativa
gtactactattgagatttatgatagaattattaataaattctatttggttccaatcgagtaagaactctacaaatttaaattgaatatttttgttgctcaattaattaactaagattatatatgtgtaccttaattgactcattcaataatagtacacccacccaaccatgtaccatgatcatcatcaatcaatttgattttatttatgaatgaatgatcaatcaattgaaaaaaatgcttgttgttagccgatgttaaggatgagatagatagagggggtgcgatttaaggttattacacattttttaatgaaccattatagtaatacggcatatgtgaataattaggaagagtaattattatttatgaaactaatacaaaattataaagccaatgaaaaattaagaacaaataatgatcttagagtctaacgtcagtgcctcatattttctttttatatgagaacaaataatgttaattagaaagatcttactcatgtcacaatcttatatctcttatataaatatataaatttatttataatatttatacaatatcaaaatataattttatttttattttaattaataaaatataaactaaattacaatttaagattttttgaaaataattaaaaaaatatattataatgagtcaatataataatataataaatatttttttaaaaaaaataatgtataattcacccgcacacaaatatatataaacatataatttttttataaaagaaatactaaaacggagtattatttgtataaaaattttatactatgcatttatacaataagtaaatgtagagaatcagcatttgatgtagctaagtatcttgttggaattataattattcaagtagaattagagagtgctccaatctatcctacataattatttaacataaattgtatctaagctttttattaagtatttaagcatgacaattacaattacacatagttggtttaatttaaaaattattattaaggagctcatgtgtcaatctctagcaataataatgtattattaattagttgatcaagcatattaattgaataatgttgtcctacataaatgaaatgtaaaaatattgagccatatataagaatatgggctacttcattcatgactaattggttttgagatggaactcatgattctcaatatggtatcagagtcatatctctagcggactttcgatctacaccctatcaaagagttatccagccgcaagcgatacttatgataaggtagtgattccagattggtgagcaaaaatagccacttgaggggaatattagacaatattgagctatatataagaatatcaattactccacttaaattaattttgagatggaacccgatgattctcaacacaacatagtagaactaatcataatctgtacttttattattgaaaagttttaatgggggatgggataattaagttgataactccacatataacatgatcttaaaattcaagaaaggcgtgatgcataaaatccggaaaagagaaaacctgctctacctccttcagtcaacccctcacatattataaatagacctctctctattttttattgtcaaatttcacgtgttctgatacacctatatatagtcaacatatatatatatatttatatattatatgtgctgatcttacgttcgatcgattctcaggcgtactgattaacctaaccatttactacta

SEQ ID NO: 67509 - DNA, 863 bp, Cannabis sativa
agttacagtgtaattacatggtcaaacaaacatgtcaaattgtgtaattacctccaattacacacaaatccaattacattgtagctttcaaaacgcaccctaaatagagttacacataggacaactctacactttttttcttcatatttttcaacttaaattaaaatttgaaaaatcagatttgttttaagcccaattaccaatttttctttcagcccaaatcatcacttgaatcccgacaatattatggcccaacttttaagggtctcatatttttcagcgttttgtctggcacatctttttaggcaccttaaatttaaattatagaacaaaagctaccttatagtaaataatgagcattgtaccaatataatgaatttaaaccaaaatccatgaacaagttcagttgttacttttttttttttttcatagaggagaattcgaacttgatacttctttttttgtgagaaaaaatataaaaccactaactaagtttatatccacaaattcaactactacttaataataatatgataaaataatggaaattaatatagctaatttataacatatgttttccatatgatgtgaagaaattatagttttatatatgataatgtatgcggttgatataattaaactcgcctatatttcttagtaaaagaagttggggtgttaattctgtattgagtcttgaggaaagagaaggtgcatgggagaaagatccttttatccctatcagtagtaagcttatgaactctaatgcttcattaacatgccaatcaaaggtgacaatcttacttgagacaatcatcgggaagggtagtggcatggtaattaagtcgaatttggataaggtgttg

SEQ ID NO: 67510 - DNA, 750 bp, Cannabis sativa
aaaagaggtatgtttcaattaaatataaaatatgggtagatttagttaattgacaaataaaagaggtatttttcaacatatccctaaatagactaggtctgtacctagggcctgcctagccctagcccaaggaccaaaaaaaactcccttgtaaaattatgtatttttcttactaattttaaaaactaacacatttttttttaataggagctcaaaaataatttttttcctatatctcactaaatttcagtgccgtccctattcaaatatgtcataatttcataatattagttctaaataatcagtaatggcagatgatattgttctcaacatataaagaaagaaaaaaatttcctttaataaatgaagccagccaggctgtgttgaaagcctaaatagccatggtgaaattttagccacatttaagcttgttctttttctttttctttttctttttctttttcttttatgttaataatcttctcatttttgcacatgaacatttatttcagtgtatgaacttcacatgggtcttaaagagtataccctgcacccaactgtgccatattcaatgcactcagattagaagacatggacactaaatggagaagtttgaactcactactgttatggattcatatgtcacttttgttatgaattataagaataaggtaaataaacaattctgagttactttgaaaatattcttggaagaaaaaacatgtggtattggttaatggtcatgttttg

SEQ ID NO: 67511 - DNA, 951 bp, Cannabis sativa
tttgttgtgatggaatcaaattaacagcctaaaaaagtaaaaattattagaacaagtaaggagtatttgaagaatttttagattcaatgatttgaaaacatagaaacataatttttttttttttttttcattttttagcttaaaactcaaaagcatattcaaatttagtttttgtaaacaccaaaccaatcaagtattcttatgtggacccccaccttgtaaattttaaaaacataaaattattttcaaatctcaaaccaataaatcttttgtcttgtatatgtcttccatcttggacgtaagtcattcgtcttggatgtatcttccatcttgaatgcaagtaatctgtcttggatatgtgtaagtcatcatatccaagatatgtaagttatctcatttgagatatgttatcttatctaagaaatgtgagttatctcattatagatgtttgagtcatttcatatgagataagccatcctatccgagatatatgtcattctatttgagataagtcatcctatctgaaataaataatttcatcgaaaatgtgtgagtcctcatatcagagaagattaatcccatcaaagatgtgtgagattcatctcatccgagattatatgagattcatcatattcaaaataaactatcctatcaaagatgtaagagtcatctcattaaaattatgtaagtcatctatctagaatttatggtgtaactctttcacctaaataataacgtataggatgtaactcttataagatatatatatagttcttataattatttttaaataagtctttttgtgtgttttggacttttgggtccgtttagcacagttttttgaaaagctaaaaaatgctttttaaaaaaactgtgataaaaacgtgtttggtaaacattcaaaaaaacaattttttgaagaatttttggaaaagttacagctaaaagctg

SEQ ID NO: 67512 - DNA, 726 bp, Cannabis sativa
agcaatgttccttctgctcttcagtctattgtgatagcggatagtgctatttaatgaattacttttgttcaaaaaaaaaaaaaaagaattctttgatttttgtaaaataaatttgggtaagccaatgacacgcacatgtttgcagtacctaaaataagatccaaccttctctttagcgaatgcactaatcactataaatatttccaataattttgatagaaattatttatttatttatttatttatttatttttaccaaatatagggtaagtgcagtagaattcttttcaaaacacaaaaaaaaaaaagtgtagttggatggatttcgtgcaagatcctagtattttgctattcatgtttaaatatcattgagaagactgaatttctcattgcacacctctaatcagtaatcacattatcttctcaagaatctgaaacaaaaaggtaaaagcttttcaagtcacaaatatttgagctccaatttttctttttgaaaatttccagaacatataggaatttgattgtatgttcttcatctttaaagactcttcttctttcactgattggtttttatttattgtttttgattcgcggtctgattccatcaaacctcaacatagttggtgtttaattttttatgtaataaggtctctcacatgggttttgtgttattgttcagaagaaaatgggaatggaaaaaagattctttgttcttaacacgggagc

SEQ ID NO: 67513 - DNA, 1047 bp, Cannabis sativa
tcaatagttcgaggggaatttttaacggccaaaaaaatttagggggaaaaattattaattagctaattttttttagttgaaatgtatatttatttatttggccaactaaaatatttttgtaatattattattattttttttaattaaaactgaaaaaatcccttatttcattagtaaaactatttttggagaagtgaagctcacaataaaaaattcaaaaagtgaattgggtgtgaaagtgtgaggtatgtgtgaataagtaattatttgtggtggagtgagttgtgataaggtcgtttccacaaaaggctgcatttctttcagttcgagtctggggaatctaacagtaatcagtctgactatccaataagaaagtgaaacgtgtcctgtttcctgtcttgggtgtacgttttatggtacttatgggcatggcacactgtctctgaccttaaaaagtttcaaacctaaaccaacaaactctcctatccctatcctctctacccttttttcattattactcaacccaccctcacacacactcctctctctcctaatccttaaatatgatgtcataatattataggattttatcaacaaaagaaaaaagaaaaaggtaggatttgaatttcaagctttataaattcaacaaagaaagaaacaaagccctttgttatataaatatgtataatgtataatatggtttaggtttttaagtggcttgttacatgaattttgattgtgatttaagttgcttcgttagttactatgagatttttatgtaaaattccgtaaaaataaaaaaattattttaaagtgtataagtaaaaaaaaaaaaaagtctaataaaatatgtattactttgttcttttgaagtaacataagagcagcttcaatgctgcctatattctagttgcccatctgtttttgttagaagtattgctactaggaagagtagctaatgcattggagcaaaaatagttgactactccaactgctacagaggggcaacgcactagtaatcatggagttaatattttatattttttt

SEQ ID NO: 67514 - DNA, 907 bp, Cannabis sativa
tataatcaatatacaccttattgacagctcatacacggtttgaagaagaccacaacccactagaaaattccctaaaacagatatttaatcagcccaggaatgtccatttctgtacctacagaattgtgagcagtaactctgacattccttttatagaaaaggaaagtttagctccagttttctcctcaaaaaatctgctctaacaaaatagaaaactcacacagaatatcacagctggttagataaaaaagaattgagtaaccaaacttacaatttttacattattttccataaataagattgactctaggcttctttccctttcgaatagtgacaatttgctcccaaatcatgtcagccaaatcaatttttgcaccagtagaaacattacataaaaagaaagcaagttcatttgaaacatttaccgaattcgagcaaggaaacaaattggatagggcaagcctcataagagcagcatgatggtaggtaggttgagacaatcggtattgtgtcggagagttccacatcattgtcactattgagatatccgaacaccttttgatgataaaattccatatcagttggctcaatttccataggtagattgagagcttcagccacctccttcacagtaaaggaatacatgtgtcccctgacaaagacatttccaaacataaaagagtcctcatcgaggaactcatcaatgatatcagtataaaactccttgacaattcaatccatatagccatcaaaaccgatcaatgtctccacccattgtctttctttcaacaaattatataacctagaagtccccacagtaaaatttctattctcataaaatttcatatctctaccattatcattgtaaaaaaaataatgagaatggggcttgaagttttcaagagta

SEQ ID NO: 67515 - DNA, 1010 bp, Cannabis sativa
accagttgctcattcaccttaaggactgaccgagtcatgtagtgggtgagcatatccttgcctctcttagtctctcgatgcaatactggaggtggggcaggagcccgaattttcttacattcgttcttgaccagctcagatccgccctttgactgctcgagcctgtctgagctccctcctcgagagtctttggacttagttattttcggcatagaagggtccacgacggttggctccttggaaagatcgataactgcttcacccggcgtcctctctctgaacagagttgtctcaccggacttcttagctggaggagacaggcccgagctccctcccattctcttctttagagcttcgagcattttctgagacatgtctgcatgaaataaaagtaacatggttaggaaaacttactagaaagcataataataaggaaagctaaaggcaagatggagtatcttgcacttcgacagaagcatctgctcgagcatgacctgatgagccatcatcatcaaacgagtctctttgctcctccaggattgctttcccctttcctactctaggattggatggccgagtaggtagactgggctccctgatctaaatcgtatgttcgataggcccgtgctcggatgaacgtttcttcttccttttgagcagagtcacctgctcttcctcaacctcgtctttctgctgaagatgctcctgagcatactgcttggctcccgcacctcccttcaaattagcttcacgcttgagttgaatgagttcattctcctgatgagctccctcagccctgccagcactagatttcctcttcttctccttcacaggctgtggaatgaaatcctttgggtagagcccgtactccacaaagttgtcctcggaggtcaacaaagttatatttcgggcaacacccagcagctgagcaagtctttgagctctatccctgagagcaagtgtgaagggtggacggtgatatataaggatctgctagaaccgagtgtagg

SEQ ID NO: 67516 - DNA, 1132 bp, Cannabis sativa
  modified_base (885)..(889): a, c, t, g, unknown or other
gtaggtggatggcaggaccttgaccatattaattcataaacattcaaatatactatctgttaacgcagattttcgttaactaaatttgaacctcacaatggtaattcaacatagaaataataaaagctatagaaaaatcaaatatgaacactggaagtttttttacgtggttttgcagttaaaattctgcatagtctacgagtcaatcttattcagatttctcagtattttttttcagcgcctcttgcgtaagagtttttttcgtctcccctctttgatcttgtatgccactatttatcattgcatagtggcagttaattacaaggctgaccaaaatataattgcagtcattatcccttaaatcgtgggatctgattacatatcataaaatataaatgcggtgtatgtttttgaaaatcatttagttgtgattttcccgcttttaccgggccagaatctggagatgtctcgatagaaacttgattgcagtgatcccaatggcgagctggaaccattcttctttccgaggtcgacatggtatgttttacgtcaattgcaggtatatgaaaatcttctgacttgccagggttatgagtctcgcttccgttagttggatgaaactataggaagtttcctcgtagcgagatggtcatctcgcattcttgtgctccgagccgatccgattttgacacttaattttgccttatgtagctaaggtatttgttacttttctccggtgcctcgctattctcctttagtgacttatggcttctcgttaatacaataagtgccaattcgtacattgattcctcgcttaagacctttcagtcagcgggttgcaaatatactcttgtacttacgcaattaatgagttattccataaannnnnacgacaccgattcacattcccttttaccgtgacacgtgtcctccaactgaattttgggtataacactatcgtatctttttcaaaaagtatttaagtggaaaacttatatacaactcaagatgtatatattacttgattgggtatgagtgtatattatatatttgtgttccactattatatttttaaacaattttttttttactaaagaggagaaattatggctgttcatccgatccaatccgc

SEQ ID NO: 67517 - DNA, 756 bp, Cannabis sativa
tttttgcttcctaaggaaattagttgtagcattgaaagcatgatggagagttactggtggcagtcaaacaaggatagtggaaaagggatacattggttgtcatgggataaactttgcaaacataagaatggggcggcatgggctttcaaaatttgcgtaatttcaacatggatatgctaggtaaacaagggtggaggcttctcacaagtcttaatgctttggtaacttaggtttttaaggccaggtactttcctcaaggtgattttctttcagcttcgcttggctcgaatccgagctttgtatggaggagtatatgggaatctcaagaattagtgcagaaaggagttccttgatgtattgggacgggtcatagcatcccaatcctaagctctccttagctgccaaataaagttaatccctatgttatttcagaccacccagccctttcgaatgccacagtaaggaacttactcacacatgatggttctggttgggatgtggaggtaattgacgacctctttgttgatagagccaagcatttgatcatgtccattccattgcaagtgaataatatggacgatcattatgtttggtataaggagactttaggtctttacagtgtgaagagtggatataatttactccaaaagcttaaagggggatggtatgataataatgactcaagtttttggggtaaactttggaatttaaagctgcctcccaagattaaaaatctgatgtggcgtgctgcagtag

SEQ ID NO: 67518 - DNA, 763 bp, Cannabis sativa
tttgtactatggaaacgttttcattaatatgagatcatttatagattatagagcaaggcagaatttaatgtgtatattacactccaaacaatttataacttcaagccttaaaaaaatatatacatatactttatatcaaaggatattaagttatgtaatcattatatcaaaatatataacaaggatttttgtctcttgaactttgacatgtattaaattatgcccttaaatttttaaagtcgttaaaaatgcattctgaactattgagattgttagatttaataatttttttctaattttagtaaaaaattaattatcaaagtctgagaagcatgatttaatacataaatgagacatgatttggtacatgtcaaagttcaagaggtaaaaatcataattaattagccaatataaccaaaactaagagctttgattataaaaaaatacatgttgaaattatttttttttgtggatagatctaagaagagagatatgtataaaaaaaaaatgcattgttttttaacttcgccatacgagaatttttgaatctcaatctctatttttttttaaaaaaaaataataataatcaaactcttaattttaattatagtttatattttttgataaacaatttttaagaacttttagagagagagaaggaggagaagtaaagagaagtgaatgatagtttttttaacatataattatatatgtaaaaaaataaataaggaaataatatttaatggacataaaataaaataat

SEQ ID NO: 67519 - DNA, 2416 bp, Cannabis sativa
  modified_base (1217)..(1219): a, c, t, g, unknown or other
gtttccattggcgagtcattgtttgtccttatctaccgttggtgaaccgcgcgcatgtccaagatcttctaggtaagtgggaccagaacatgcgaagactcgatgatctttctcctattgagatagcgacccttgagtgtcgtgagatgaacaaagtaagttatctcatatccattctttgtttggcttgtaatttttgtacttcctctaacttagatgctatgggttgtcatgatatgcaataatgattgcatagtacactatggtcaatccaagattaattatgtggatcacaagtaaacaaaccaatctaaaatatgacatttgtcattgactgatggagagaatgtaaaaaagagtctctttatagcaatcttttttttaaaaaatttttttattgtcttatataataaaataataataataaaattaatgataaaattattattttttacactataaataaaaatattaaattttgcatcaagttttacaattttgtattagaaaataatgctaaagttaatgtaaatatatcataaagtaattttttttgtattaaatataacatattttttatatctctcgttagagatggagcacatgatgttaaaacttactgcaacatttaatatttagttaatactattattaaaattgtaaaaaaataataactttattattatttttatcatgtaaaaataatagagttaaaaatattaataaaataatacaataacataaatatatataaaaaaaacgtaatatatttattgtgatgtaaattttgtatcataatacaaaatttattatatgctaaatttatatcatcttttagtacagtactattgaaatatgttttttttccaagctatatattaaattataatttatggagattcattatatatctcataaattacagcaaacttatttcaaaggaggagaagagaatttaatctattgatgaggtggagttacaactaaggaaaaggaaccttcctacaatatgatcttcctctctctctctctctctctatacatttttacacttaaaatcatttttttttttttatatttttatgaaattctatatcgaaactcatattgcaaatagcgctgcaatttaaattgtaatgaaaaatcatacagaaattcctattgcaactagcgctgctaccactttagaaactcaaactataaatttgaaaaaaaannnttaaaaaaatagtatataggataattccctttttattatatattttgaaatattatattatgtgagcatttttaatattaccaatatgatattgtttattacgtgatgaattctaactataattatacttgtttacttacttaaaataaataaacaataatgaattataaatataaaattatcaacaataatattatgatataatataaaattacacgcatatatattaaatattttttatatttatatataatgaaaattagagtttagtttttcaaaatttaaccaaagaaaaatgataacttgtgagttataacaaaagttgatcacatacattttatttatttatttttgctaagaaaataattgggaaaaaaatgtatgtaatcaagttaatttggaacaactaaaaggcaaaaataaaatttcttttcaaaaagaaaaaaaaatatgaaaatataatgtaaggatcctattattctttacggcaagacatagacaatggttctattatatacaggccagttaatatgttggacccaagtagcacagtgagccaatttttcttccaatccacgtgtcccaccaatattgaatacaaaacttgggtgttacacttgtactgatattactaaatgacaaaagaaatgtcatttatccattctttcatgcttataattatataataaaataattttccacataaatagttaataaatttaattatcaattaaaaataaatgattaaatttaatttttaatcgtaataatacttaagttataattctgtaatttttatagatacttaattgtaagtgttaaataaattattacgtgacaattttaattgctctcagtcattaattttttttaaaaaaaataatttaaatatattaaaaaaatgatacatggataatgatttaatatttaatgttcaggtatctacatactttcaaaaatatattattacccttaaaaattaaacttaagtatttatgaaattaaacttaaatatttatacctctaattacttttatataatatatatggtaccataaattaagtcgttgtcgggcaatcaatcagcctgcatctatgttattaactagggtaaatattattttgcaccctctattttacaaaagttactaattggaccttgtgttttgttaaatgacaaaatggaccatgtatttt

SEQ ID NO: 67520 - DNA, 2265 bp, Cannabis sativa
actctcactggttcgatagggttgtcaatgtgattgttgatctccaaagaagtggatggggtagtagcgttaaaatatgacatccaattcctttaattgagccttgcaacgttgctccatacagaattccatacaactcatcatggatcaatgaattcaacaagctcttcatcaatcatagtgacgatctctcactgaaatctctctttgatattctctcaatgaaagcaccaataatataatactaattgtatctgtttgcactcttagagtcattgctaaactctaatagaaataatcttaattttctctcatttcattcattgattctctatttgtgaaataactttacatatttatactaactaggtaatactaaaaattactaattagtccctatactctttcatgtatagtctcaagccccttacataagtgtaacccatccaattgtataaactaaaaaaaagacattttacacaaaataatattcttctttttaaactttatatttatacggtaaaagattttttacatttatactaattgttatctccaaaaaagttattaagtgcaattttgaaaatctatagattagtgagagagaaaatctcaaatatactttacgagagtatttgcaagaaaagaagagcctaactaccaagacgggacaccgcacgagggggagagccaacatgaggaagggccaaggcacgaattgagctccccatgtaaggagctccccactcccctctgcccgctttctctccctgcactctctcctcgctctctccccgctcctctctctctctccccacttctctctctcccttgctcccttactcagtcaatccccttagtcaccacctaatagtaatacaccctgctccatggaaaagagcaagaacacttagagtatatatgttacaagggagtaactcccaaagggattgaggaggaagttcctattaagtttgaacagcaagactaacctcttatagacccatcacttagctaaatttcctaagtgttatacttgcatcattagcataagctatagagagaaatatgtcaagggaaagtacaacaaaggatgggattctggtagatccaatgaaaattgaaagtgttcaggattggccacgacctaagacaccaactgaagttagaagtttcttaagattggctgggtactataggagattcgtagaaggttttgccaagatttttactgctttgaccgagttaacttgaaagaactataaatttgtgtggatcgataaatgtgaagatagcttccaagaattaaagaagagattgattaccacaccagttctgagtttgctagtcagtaatgaaaagtttgtgatatacttgatgcctcgagacaaggcttaggttgtgtgttaatgcaatcagggaaggtcattgcctatgaccctaggtagttgaaagactttgaacagcgctaccccactcatgatctagatttggcagcggtggtttttgctttgaaggtttggcgtcactatttttatggtaaaaagtgtgagatttataccaaccacaaaattttgaaatactttttcactcaaaatgatttgaatatgaggcaaaaatgatggttagagttagtcaaagattacgactgtgaaatcctctaccatctcgacaaggcaaacgtggtggcagatgcacttagctggaaaggtccagggcaaatctacgagttgaaggaaatctctccaagattggctgaggatatggccaggatcgagattgagttcgtagtcgggaagttgataaatattatattgcagtctgttgaaaggataaagattggccaccagatgatcctgaattgattgaacttagaaagaaagttgagatcggcgctacgaaggatttcattgtgactccaagtggaatattgaggtataaagatagaatttgtgtctcgacaaatgaccagatcaagaaggaaatccttgatgagttccatacaactccgtattccctacacccaggaacaacaaagatgtatcatgacactaagccagtatattggtggccgggaatgaagagtgatattgttgaatacgtttcaaagtgtttaacctgtcagcaagtgaaggctgaacatcaaaggccgacaagtttacttcaactttgaggatgcctaagtggaagtgggaagacataaccatggacttcgtagtaaggatacctaggtgattagtggttaaaaatacacttttatttatt

SEQ ID NO: 67521 - DNA, 1421 bp, Cannabis sativa
tctaagatttgttgcacattgcgcttgtatgtcttgatctataacgatcgaataagtttgaaaacatagcatcatagcaatccaaatgtttatttgagcgatccaccgagtagtaagtttttgctacctaatttataacgatcgagtaagtttgaaagcttagcgtcacagcaaagtacactaatttgagcaatccatcgagtagcaagtttctgctacctaatcggaccgtaggatcattctaaaataccccctaattaggagaggcatccaagatttactgcacattgtaccggtaggtcctgatctataacaatcgagtaagtttgaaaacatagcgtcatagcaaagtacaattatttgagcgatcctccgagtagcaagtttctgctacctaatcggaccgtaagattattctgaaatacctcttaattagggtaggcgtccaaaatttactgctcattgcgccgataggtcttgatatataatgataaagtaagtttgaaagcatagcatcatagcgaagtacagttatttgagcgatctacccagactagcaagtttctactacctaatcagactgtagatttgttctgaaatatcccctacttaggaaagacgtccaagatttattgcacattgcgccggtaggtcctagtctataatgatcaagtttgaaagcaacgcatcatagcgatccaaatgtttatttatgcgatccaccgagtagcaagtttttgctacctaatcggatcgtaggattgttctgaaataccacgcaattaggagaggcgtccaagatttactacacattgcgccagtaggtcttgatctataatgatcaagtaagtttgaaagcatagcatcctagcgaagtttagttatttgagtaatctattgagtaacaagtttctactacctaattggaccgtaggatcattctaaaatatcccctaattaggataggcatccaagatttactgtacattatgacggtataatgatcgaataagtttgaaagtatagcgtcatagcaaagtatagttatttgagcgatccactgagtagcaattttttgctacctaatcggaccgtagaatcattctgaaataccccctaaataggagaggcatccaagatctactgcacattgcgttggtaggtcttgatctataacgatcgagtaagtttgaaagcatagcatcataaagaggtacagttatttgagcgatccaccgagcagcttgtttccgctacctaataggaccataggattgttctaaaataccccctaattaggtgaggcgtccaagatttactgtgaattgcaccggtagcacctgatctaaataagtttgaaagcatagcgtcatagcgatctaaaaatttatttaagcgatccatcaaataataagtttgaa

SEQ ID NO: 67522 - DNA, 843 bp, Cannabis sativa
attcctctagctcctgctcccatgctagccaaccctggattgaccctgcaaccacatcgagattcaatttttgagcagtttttcaagctacaacctcaaacattcttgggtggcactgatattataaaggcagaataatggatgagtattactactcgtattccggataatatgggggtagtaggaactgagcgggtcaactgtgccactttcatgtttcaagagcatgcccgtacctagtgagatttagtaggtcagtcttaagacctcagtacggtaacctgggaaaaatttaagaatttatttgaagaaaagttctacaacattgccatccgtataactcagatggaggatttcctgaaattagttcaaggtgataagtcagtggctaatatacactggagtttgattgcttgtctaagtttgctggcaaaatggtaccagcagatttcacccaaaaacaaaattatataactgggttggatgccaggattagtcgggatttaaagattaccattgatcatgacactttgtataagaaagtggtagagatagcactgattgccgaagagggtaaacaacaaattaagaagcagactactatggatgccggtacgacatcaattccaagtgctagtggtaacttcaataaggggactggtggtggtattccttatcaaaagagaaagactgagactttcagatcatccagatcgaacaagagattttggggtaataaaggtggtcgtcaaggtggtggtgatacattcatgtcatacccaaagtgtcccaaatgtaagaaacactatcagggtgaatgtatggtgggccactttatcagag

SEQ ID NO: 67523 - DNA, 646 bp, Cannabis sativa
aaaaaaaaagataatgataaaaatgaaaaaatactaaaaataatattccaaaattatttattaaacggtttatggtaagagctatttacaaaaatataggaaaaaaaatataaattttgatatatataacataaaaatttaatggtactaaatatgatattcttctaaaaaaaaactttaaaatatgaaaaaaaaaaataaggaggaatgccatacaaaaattttaaattgtgtttctctttttatattcctttttttttagaaaataaaaacactgtaattaagaaaaaaaattatctcaagtaaattttattttacagaattgaaataatactaaaataattttattaagacattaaattaataaactaattaattcggtataatcaaaagttggtttctgaacgaaaaatcaagtattataaataccaaaactcatatataaattttacatgcttcttagaggctctaaagacttgaccaccaaccaactaccaaaactaaaaccaacacaagaccaaaattaaaatcatttacaagtttatgagcagtttcaagactcgaccatcaacccactacacaaaacaatcactgtctattaaaataaaatatttttcgcaataaaagtagaaaatagaatgagaat

SEQ ID NO: 67524 - DNA, 7167 bp, Cannabis sativa
ttaaaaacaatactagttccacaataaagtgaataaacacaaatatcacataatacctcagaaatcgattatgataaaaaaatgagaatcaattccaaaaaaaaactgaggtataaatataaacaaaactggttctataataaaataagtgaaacaaataatacaccataactcaaaatataagataaaaactgattaaatttatcaactggttaaaatataagacaaagaaactagttctgtaaagcaaccaagataaatacttacacacaaaaatcagttaaataaaaataaataaatcaaaaagtggttccttaaattaactaaattaaaaatcaattcttgaaataactaaatttataaccagttctttaaattaattaaattaaaaatcagaactgaaataaattcaagaaccctaatttgaaatgactaaataaaaaataaaaaaaataggtgagacataaattaaaatagaaccagttccacaaaaaaaataactaaaaacaacacacaataacttagaaactagttataattaaataaaaaaaaaaacaagagataatcaattctaaaaatacatatacataaattaaaatagagcttattccacaacaaaatgagaaaataataataataataactgaaaaatcggttctaattaaaaaaaaatagagggaaccagttccaacaatactgagacataaattaaatagatttggttccataacaaaataagtaagaatatacaacacacaattactcaaaacccagttataattttaaaaaaatatataatatatatgttatgttggtcaaacttttcaaacgctaatctaggaatctccacaataaacatttgaggaaaataagtataaaaattacaatataaagagaatcaatttttatatatatatacacttattaacatctaatgcaaccagctatggtaagatatacatttattatcaaattcaaattcaatatattatatacacttattagaaaatatatataccataatacaaaatatatataccaccgactagaaaaaattgactgagactttggtcgttgtttgggggaaatcattgtaatttggagatgtgagaaaatcagaagaagaagaagaaaatgagtagagcttcgtcgctttcgattctaaggacttaggagaaaatgattggatccaacgaatgaatcaaataaattgatgagagaaaaatatttcatcgccttttgggagaaatcacgataataccaattttttttgaagaaatccaaactaaccgaaaaaaataaggagagggaggctttgtcatttagattttggagcagagcttctgtttctatttggagaatgaatataatgttaataatacccttatataacttagggtattttaggtactaaaaataataaaggctatttgctatattatttttaaaaagggacattaagcttcagtaaaaagaaataaagggccatttactactgtttcccttaattaattggttttaattattcaattagaattctaaattagactatgtcttatttataaattttcactaaggaatggcttaattgagaagaaaagagatttcaaggtttgtttattaattaagagactttgaaaggtctaataataaataagttaaatggtaattttatttaataattaattataatttattaaatagataaaattgacatttatagagttagagttaaaatatagtatttgagaaagaaagataaatttttaataaagtggcgaaattaaaacctatagggcccacaaaaggaatttggccataggattcaatttaaagctattttatcttttttattctatatttaaattcttatataacccaatagacatcatataaatagataattataggctcttattttaataacctgataacctagttttactttgtcagaaaaaaataagagaggcttcttataatttcaaaattcctagtcttttctcctcttgaatatgtgccctatagtgagagagtgcttgcccccacattttaagatagtactcaaaatatagtgtggaagattgtgaagaattccatcacctaaggagaaaccaggttcagatcttggtaatactttgcgacagaaaggaacaagggtaagagatctgaacggaatgcgtcgttatattctgctaccactaatgtaaggttttctataactttatatgtgtttatttaattgttttagaaattcatatttaggatgttagattataatcctataattaacatacatgttaataaatctagatcctcgcaaaacatgttccaacagtacgacggctagcaaactttcttcaactctcaattaaagcaccaaagtatttactgagatttttggaaactaaataaagagagcttcaaaaataaataaaacaataaataatagacaagtaatttttttacgtggttcagacgttaataatacctagtccacaagtcagttgtattagccttttaggcaagtatttgggtaatataagtgtttatagtataaaccttagctcttcactccttttgtgtcaaattgttcaccattttgtacataaaaaatgagggtatttataggcttacatgtgggtaaggacattccctttacccacctagggttttgtaacaaagctcgttgcaagggtagaaaaatacaattgtagatctagacgtccagccttgaagaattttcttgatcatgcaatgcgcaagggcagtggctagtaccatttcgataaaagacatgtgttgcttaaaggtttctcctttacaaaatactctctagacaagccgttgggcaaaaggcatgtcttgaggtacgtatgcgcactaccatggtctggtatgggggacaagatctgatcctatgtcagataaaggtataaccgcctgtaggtcgatttccatatgaagctgacctcgccatttgccttggtgcatcaattatgattcgtgatcagtctgtaaaggtccttacccagaagtcattcaactgaatagtgttccaggacttcttagagttggggatgaatatgattcttccgtgtcccggagacgctacgtgagctagggatggctctccccattaagcatccataaaaatcctcccatataagcaagacatctctgcgaggaatcttgatggtcatctctgctaatttgggaggttaacaaatcttctattctaattatgctgcatatgccttgttcagaaacacggataacagtatttgtgtaagagaaatgtgtatataattattattatatgataatattgtattattgtgtaaatgtttttgtgttgatatatataaatacattttttaaaagaaaatcatattgtgtaaattaatttgtgtttatgtatgtgtgtgagaatgtgaatgtgattgttattagataataatattgtattattgtattttaaaaaaaaatgttacaaaaataatttttctcaaaaaaaaaactttttttttggcccagcccaacctgaaacccgaccccaccccacccgagcccgtctcaacccacacctgaacttgaaaacccgtactctcaaacgggcgagttcggtacacaaaatctacacactcaaaattcaaacttaaaaaatctcaaatccaacaaaacccaaccatgtgtgaatcaagatccactattaaaaagtggtattccatattacgttaaacttattttattctgacaagtcaattaatttatatattaaatatactaactatttttgttaacttatttaaagagtcaaacttaaattgatttaacataatagaaacatacttattaacgagagatcttaattcacccatgtacacctctactttcaagtattgttcatttccacaagtcaacggctcctataatttttctcattgactattggggtatttccgtaattttatacaacctttcccgccaccctcccctctcataaaagcataaaaacgaacaaatcagtattccaaattcaaatgccacccttgaggaaaaccaagaaaccagagtaaagaagaagaagaagacccctttcttcaatctcccaaacatggctatttgctcaaggatttggaattttgtgatattcttactctccctttacatctacctcgagtttgctaagcaacacaagttagtgatgaaagagaaactatttcccgaacctccaaacaattcacgggataactcctctgagtttcgaccacttagaattcctcctcctccatttcctattcggcctatctttttgtcagccaagagccagttacttgaagaaactgatcatctttctcatccgcttgactatgatttctaccgccattcatgccccaaggccgagcgaattgttcgaactgtggtccaacatttgcatcgagttcggcccgatgtagcccctgccctcctccgcctcatctttcatgactgctttgttcaggtatttctttttcttgtttattgattgtgatctttcgggtttttttacttgttgaattgaattattttaaaatgttgcattttgaccgagttttcttcatattttctttgtttaatattaagggatgtgatgcttctgtgttattggatccctctgatgaaattgattcggaaaaagagtctcttcctaatttaactttgagaggttttgatttaattgacataatcaagtcaaagcttgaagaagagtgtcctggtattgtttcttgtgccgatgttcttgttttggccgccagagatagtgttgccttggtaataatccttcttttctctctacaatctacatggtcttttttttatcaatagtttcaatttttttttgtatagaactttttagtttgatgagttaatgaatttcagtctggaggtcccttctatcctgtgtatactggtagaagagacagtgttgctgcatactcaaacctcgcaagggatgtgcttccttctccccatgataatatctccttgcttctacacaccttcgcttctcggggattcgacgaaaaggaaaccgtcagtctcttcggtattactcatctttttccttttgtttttaaacgttttgtgatactaaatttgtatgaagatctttacatagttcaggtactgctgtatgttatccatttagtttgaacattatggggtgacctttttctcaagattttagagtacagtttgtggtagtttgaatgcggtctttcccaccctttttctttcttgctttttttcccctttatcttttcttctgttgggagtttagttgaaaataaataagtgaaagcattaacgcaatcaagatacaatttattctttgaaaaagtaggtctcaatgactcaactaaagaaattgattattttaaattaaaattgtgttgtcttttggttatagtgttatcctattcaactatatctacgttctactatagttaaagctaaagcacaaagtttcttctgtgtgatctttagctgctcacagcattggagtgatacggtgcaaattcttcaaagatcgtctctatgactttaatcggagtcatgagcccgatccatccatggaccccgaattggtacctcttttgaggacaaaatgccataagcgtcgttcagtatcttctcctgaatcacagccttcttcctgtgatttctcaactgaggaggagccaggaattcttatgaaccatgagggatcagcttttggtatccaatactatcacagcatcttgcaaggcagaggaatcctctatactgatcagcagctgatggcagccgaagcaactggaaactgggttagagcatatgctgcagatgcctttttattccgccgagactttgctttgacaatgatgaagctttcagacctccgtgtcttgacagctccaacgggtcagatccggttcagttgttcaaaagtagcataaaggagaggaagagattggggactgtaaatgattttggcattgtttaaaatgttaaattttatgttcagtttgctcttgctatgctgtagttttaccataccgaatagcaactgcagacatcctaatcactagggatagttcaaacaaatattgtaaaagccataattttttcaatgaaattgatagtagtgacatacaatgctggtcttaatgcagagcaacgtagttggataaaaaaacaaaaaacagtagaaagtgagatttattaccagactatggaaacacatgctgtctgaattgaaagaaaactattttaataaaaaagaagcatcattaagccaaaaataaataaataaagaagaagaagaagaagaagcatcgattctcatcaaaaaggtggaacaaactttaaattcctcagaatttttattattattattttcaatggtgacaagactggttcaagcacatataaataaaaggttaagaaataaaggccaacaatcactgaatgtaaaacaaaaatccaacaaacttacacacaaaatggagaagaatgacaaaatagtgaggagaacaaaacagatccatgtacacaaggaaaaaacaaacttacaaacatggccaactacaacctaaatgagccgagtctccgctttgagctggtgacctttgttgaggcttgtgggacagagaagtccgagtacatatccaggaaaaacttgtcaacaatgtcaaggtaaaccgggcttttaaggcgggaatagtagtgaagtgcctcttctatatccaaggcttgttccatatcagctgcatctaccatctccaattccttcatcttttgagccaaaacatgtcctcctctgtttgtcttctttgagttggactcttttcctttcccaagataagagcttccaatcttctttttcttctcctttattcccaattcctgtttggtcttaacaggactcttctgtgagaactttgtgaggcttccactacaggcattattatcttcttccttcatttgctcttgtaatgtggttgcaacattattatccttcttactcatcatctcatctaaataatgagactcccattcctcataaaaatcagaatagatttgatctgtcttacagcttttcatcttgctgctgccacaagaaaaagcgttaaaagaaagagattt

SEQ ID NO: 67525 - DNA, 1522 bp, Cannabis sativa
attctcccaccttcttaaggattcgagacaaatattccatgcctagaacaaaaagcaagggagacataggatctccttgccttaagcctcttttagcaccaaaaaatccacataaagttccattgagaagcaaggaaaactttggggtacttatacaattcattatgagagtaatgaactgatgtgggaacccaaaagctaccatcatttcctcaataaaaccccactcaattgtatcatatgccttccgaagatcgattttaatcatggaacttggcttacaattcttccttccatataatctaaccaaatcctgacaaattaggacattatgtgcaataaatctcccatgaacaaagccaccttggttatctgcaatcaaatcaggcaatatagttcttaatctattgcaaataacctttgtggcaaccttgtacaacacattacagcaggatattggtctgaaatccgcaacagtttttggacaagtcgacttgggaataagagtgatagttgtggtgttgatctcttttaagatcttcccagaattcaggaaagaaaggacagcctcttccacttcagctcccactatattccaattatcctggaaaaaagcactcccaaatccatctggacctggagacttcaaaccaggaatagagaacagagcttccttcacttcctttggggtatattcagcattcagaatgcctctatgaatctcattgatcttagggccaagatcaacaacacactgcttgactttcctcctttgtgccatggaattccccaacaacccagtataataatcaagaaaggcttgttgcaccccttccaaactatcacaccagatgccattcccatcttcaatggaaagaattctgttatgaacccttctaactttcagagatgcatggaacaaagctgagttttcatccccatatttcagccatgccatctttgctttttgcgaaaggaaaagaacataggccttgtgaacctcagaatacctcctgcaagcttcctgctctgctagcattttttcctcattaagcggatctgtactcaactgttgctgcgcttcttctaatgcctcctttgaaattttttcagctttatgaatctctgagaagccttccctatttatgtctttgaacacctgctttagccttcttaacttggtgacaattcgaaacattttggatccctctaccatctgattccaacttccagccactttatcttcatatccaggtgccattttccacatattgaagtatctaaagggttttttcccaagatgcctttccatgtaaatggaaaccagaatcgggctgtgatcaaacacaccttcaggcagaaacactgctttagattcctcaaaggattctatccaatctgaattcaccaatgccctgtcaattttggaaaatactctgtcatctggtttttgtttattattccaggtataaaaattacctgagaatttcaaatcactcaagccacaaacatctacacagtc

SEQ ID NO: 67526 - DNA, 3679 bp, Cannabis sativa
  modified_base (86)..(86): a, c, t, g, unknown or other
  modified_base (302)..(322): a, c, t, g, unknown or other
  modified_base (789)..(792): a, c, t, g, unknown or other
  modified_base (1602)..(1611): a, c, t, g, unknown or other
tcatatattgattaaatcactttagtcaaataaggtttatatattgaattatttttgattaatgggattaatcaatatatgaacantaatttgaattaatcttataatcataactttataaaatatgcataaataatcaaatagggttagaaatacggtaattaaagaaaatctagaaccctattttttttttttttggatttaatgggatttatttgatttttattttattatatataaataaaaagtgacccatgaaattctcataaaccattttatttttaataataaatcattttatnnnnnnnnnnnnnnnnnnnnnacccataaatttctcataaatcatttattaagtatataattaatttataatattattaatatatgttttggaaaaaatacaatagattttctaaaagtatttgttatgcttaaaagaaaaagaaaaaataagtgggattaaaaaataagtgagatttaattagggtcatacacgtgtatgtttttttacacgtttactatacgatatttagaatcaaaataaattaatagagaaatgtaacgaaataaatgaaaaataatcggaatcaatatttgtaatatgttgtttactaaaattttttagaaatagaatagttatgatttatcttgtttactgtattacgaaacgtaatcggaatacttaaattaactaaattgctcttttgagttaaattatgttatgttatatagtagttatttgtaagatatattttaaaggacaaaattatcattatatatttaatattnnnnaataaaataaaaataattaaaatttattcccttaatggtattctttataaaattagtggggaatcaagttctcattttcctaaatttaataatgtaagtaaacaaatgtaagggaataattaccttactattaattctaattaattaatagtaaacataggaggaatagtagtaatagaatgagttaaaataaacgtttggtattttatgtgtcgaaaaaaaaaatatatagtatttaagtataaaaaattaaaaacatatggtatttatactacaaatttcccaaaaaaataagaagacagtaccaggtattaattttccaagaaattatttgtccttatatcatcttaattaaattatttaagaaaactaacaagtcaatattatgttttcgtaataataatagtaataataataagtagcagttggatgatatttttgcaattgccgagacccacaacaaatggtttctcaaggcacttgcctggttttgattaactcgaagaacattaaacgagaatgaggggattaaatattgtgatagataataatgtgttatctcaactatactacatattttcagtgccgacccaaggattggacagcttgggctattgtacaaggcgcttattttttaaaagcctatttttttttttttaagaaaaagcttatttttttttcttttttttcccctattatatatacataaataaaaaatttataattaaaactttatgaacgtattttaaaaaaaaaaactaataatagaattatagttttaatatacatagttttttttttatttttttnnnnnnnnnntttttttttaaaaaaaagacacaattttcaaattttgcagaaggcccccaaaatgcttagacgggtactgcatatttttgtcaggagcattgctattaaatattagtggagcctaacaccttctaaatatatcctgttacgattgactagcaatacttactaaaacttattacattaaactatatggaccgagtcccttttaccatttctcttttgtcaactataatttttctaatcaatttgaaacttcatttgcctggtaggcccttattggttaggtgtatatattatcaaagaattttacgcccactaaacgtattacttcaatcaaattgaatgtgcatcaacgtatcaattggtgcgaagacttattgaaaacacaactgtacatcagatagacatattaaggtgtaataaccaatctccattttcaagcattgctatatattaaaaccattaaggtacttaacaccataggtatatcctactgctaccattcattagccatgaaacttaagagccccatcacttgtgctttttggcttgctttttcgttcttgtatttgatggtgtcatttgatgtcgtgatgagcaatgcattcggaaacgaaactgatagatttgctctgctcaagttcagagaatcagtctctaatgacccttttggagtgttgagatcttggaatgattccgctcacttctgcaattggaatggagtcatatgcagtcacaggcatcaaagaataataagcctggcgttacgagaccacaacttgagaggtactatatcaccttacattaaaaacctcacatttttgaggaccattgaccttataaacaatagcttctccggtgaaatcccacaccaagtttgccatttatctagaatgcaaaatttgagtctcgctagaaacatgttagaaggtgagttgtctgcattgaatcttagttattgctcgaaactaagagtgttatctctcagtcgaaatcgatttacagggctcattccctcagaacttggctctcttacaaagctttcttttcttagtctctacgctaacaaattcgtaggacaaattccaccatccatggcaaatatttcatcacttgaactgttttctgtaggagacaatactctgataggtactgttccagaagagtttggcaagttaaaaaagttgaaactcttttcagtagggcctagtaacctgtctggtatcattcctccctcactttacaacatatcatctttgataagtttatcaatttcagattgccaatttgaaggcactttgcccccctacataggccttcaacttcccaatctcatagaatttcatattggtggtaataagttttctgggacaatcccagaattttcaaatgcttctaagcttgagaaacttgatgtttcgaaaaattattttgtggggaaagttccagctagtttggggatcaatcttccgcatcttaggatactaaatttagagctaaatcacctaggaaagaacttacccaacagcttggattttatgggatctttacaaaattgtagtaaaatgaatatattgtctttagcaggaaacaactttggcggccctttaccaaaatctttagctaatttgtcaactgaaataacttatctttaccttggtgggaatcaaatatctggaagtattcctccaacaataaaaaacctggtcaacttaattggcttagccatggaagataatcttttcgaaggtgtcattccaacttctatagggtcattaaggttcttgcaagttttggctttgaaagggaacgctttatcaggaaagatcccttcatccttaggaaacctcagtcaaatctccgtacttagtttttcagagaacaacttagatggaagcattactccaaacattgtagattgccaaaatctacagtcccttcaactttcacaaaatagtcttagtggaactgtacccaaagaagtttttagttttccttcacttcttgagcttgacatatcacaaaactcactctacggtagcataccagcagaagtgggcaagcttaagactat

SEQ ID NO: 67527 - DNA, 1497 bp, Cannabis sativa
aatacaataattagtgggctttgtgttgaaccttcacatattggacctaaataagtataaaaattggtatttttataatatgcagtgcgatgcagtttgaactgcatattaacaattcaaaatcgcaatccgcaccgcaccatgcggtttaggaaaaattcaaactgcgaccgcactgcaaaaaatttcaaattacatttttattgtggtgcgagcagtttgatgaacaaccttacttaaaattctatttcaatagtgtgctaaattgtgatgcaaatatgtcacataacaaaaaatgattcaaatttttattacaatatagcatgatgcaaaatttacatcacaataaatgttatgcttttatatttaccattatgccatttttaatattttattattaattttagttaacaagttcctttactttaaatgacttgcattattattattattaaattttatatttatctttgtgttatgagtattattttatatttttttaataaattattaagtggacaatatattaaattttacatcaagatttgtaattatatattggagcacaataataaaagttgatgtaaaaatatcacagaattactttttgtatcaaatatagttcatcttttacatctcccattagatatgatcttaccattactattaccactattattctatcacaccaaaccaaacactacttaacttcacaaaaaaatcataaaaattaaaaaatatgtattttttttaatttatccaaacatgcactttaaaaaaacttttttttttctttctaaaagctaaaaacaatttaagaaaacttatccaagaaagagacctcttacttctattattttgtatgctattataatctttaaaatggatattacttactcatcaattgcgcaccgaccaaatatagaaaaaaattttgctgcctcaattaactgtcccattcctgtcccaaaactagaaaatgcacaactatcttgttttttttttatttcacaatggtgtgtaacttccatcctagtctgttattttttttttaagattaatcgtggcaaaagttctaaaaaacttaaggttgatacaaattaatttccaaccttgaaaattagcagtaatagtctccaacgtcactattttcgtaagtctgtaggtacccaattaacagttctgtttgttatttttaaatttttcatgtgttaaaagtttagtggtccacatcataaatattattttaaaataaaaaaaaatattttttctttcttttctttttcttattttcttattttttttttatttttcttattcttcttctcgcttattgcccatatacctgactgttcaattggttaccaaaaatccaccaccatgaccaccctccacccacaatatgttcatcgacctttctcctgggtttcatcaacttctcaactgaatgatattagtgaaagtttcaagagttttagagaggttgaatcccactat

SEQ ID NO: 67528 - DNA, 773 bp, Cannabis sativa
atcacaaagtatttgaactaatatatatattaatgaaaaataaacatgcatgcaatgatgaatgaccttaaagtagccgttcacattgtatccctaaccactcaatctttgtaactctctcttattacatctttatgatttttgttgtttgaatattagaaaattaagatgttgtttggtaatatgtttatttttaaattttttaattatgaaataaaagatttttttttttttgaaaaacaaaatctcttctataacaacttttactttttaattttaaaaataaaaaataaaagtgtattctctaaattttgtttttattttttgaatatatttatgtcaagttcgggtccaggctcgggcctggggcccgaagctcgggtgtgggtctagatttgggcccgcgatcggggtccgactcggaggcctagtctaggtttggggcagggttcaggtttggggtcaggtgcggggcgagggtcgaggcccacattcaagtcaggctctaagtcgggagccgaggcaagagccggagtgcaagttcggtttagcgtcagggtccgagagtgacggtcatggtccgggtccgggtctgaatcaagttttaggtctagggccttggtttgggatcggggcccgagctagggttgggtctgagtttggatccaggttcggatctgggttcgagttcggggttgggtccagggtcgaggttcgagtccgcatttgggtctgtgtccaaggctaaattagggtttgggtctggaattttg

SEQ ID NO: 67529 - DNA, 561 bp, Cannabis sativa
cgacgaggatctgatttaatccaaatgcaggcaagtttaagtttatatatcattattatcattactatatattttgttaaaagataaattatgcctttatattttttaaaatgatacaaaataatactaacctcaattttcgtcatttttttaatataatagtgaacttaatttttagttgaataaaaaaaaataaagtaaacattctagttaatatttttagatcatgttattattaagttttactttacaataatttaacttagcgtattattttatatcattttaaaaagtacaaaatccgatttatcatttaataaaacaaaaaactcaatcattaacttttaaaaaacatttgtctaaatgatttacccttatcattactttgatttgttatattaactttattatttagaaaaaaaaatatctttaattaattagataattaagacacaactttactataattagaatttggtattttattaacaagtacactttagagaacactcatatcaaatgctctaaagattggattctaaaatatttgaagaaacaaat

SEQ ID NO: 67530 - DNA, 645 bp, Cannabis sativa
cataggctctataattttttcggaccccatgcgaggatccagctcatcttctgccaccattcctggctcaataacttcccggaccatcaaaatgggtaggtgggcaccgatgttataacagagcctggcctctccttgattgcccctcacggtccctattccagcctcttgagtagggaactttaggcacaaatgcctaattgacatcaccgcgctgaagtccaccagggccggccggctgaggattgcgttgtaagccgttgggcagtccaccaccacaaatgtgcagtacttaaaagtgctttggggtgtgtctgggcacaaggtgtctgggagccttacattgtccattggtatgagtgttgttccattgaaccccgtgagctgggaaccactcagcgagaggtctcgatccatgaggccgattgccgtgaaggcttctttgaataataaattcacagaactcccattgtgagttaagattctggccacaattttgttggcgatgggagtctctatgactagagggtcatgatggggaaaacgtaatgtcttcgcatcttcttctatgaatgtgatgggttgatccattagccggggcctttgagctggaagctgagtaacttcccaaacctcattgtgctt

SEQ ID NO: 67531 - DNA, 858 bp, Cannabis sativa
actatccgagtgaaatatatatatattgaacaatattaattaattaacccaatacatataaataaactgcatatatataatataaataaaaaatttaattttaaaaaccccaaatttcataaataaaatcatcagatcttcaattaattcaacaaaagtggctctagtactacttgttaggatttataaaacattcatgaaatataaatagattaattacaccaaaatacgttaactatattttatttatggatacacgatgacttaattaatttaggtatatccctgcgtcccttggcgcttccaagggttccattaatcaaaaaaaaaaaaaattacactattatttttctcatattttttaaaataattcccataaattttgttcaatattttgcataaatggtatgaaaatcattatattattttacaataataataaaattttgcattgggcctcacccatctcaatacttaggaattagattggatgaacacccctagtaacaagtaacaaaataaattagaaaaaattataaaattttgacacttttatgttcaattttttttatatatttttattttataaaaatacaataaaatcattaaaaataataataaaaaattaaaataatataaaaataataaataaataaaaaataataagaataaaacataaaaatacattaaaagaccgtatttttaataaataaaatattaaaaactataaatatatttaaaattttaagataatatttaagtttcttttttctttttttttttattgttgttgttgttgtatatttatgaaattatctcaataaattagatacaacaaaaacaaaggatgatattatg

SEQ ID NO: 67532 - DNA, 1652 bp, Cannabis sativa
aactagactacaacggattgttgataatcctcttaaacattaaaattaagactaaaacacaaagcttattaaacggccgttaacagatttttccagaacaaacgttaactttaacagaactgttatacaacaatcctactactgaactgaactgaacactcatcttctcatatcctcaaaacctatatatctcttctctctcatattcaatcggcggcgtcggtctccacggcggagtctctcaccggcatcggctctctctcttacaaggtatatatatatctctctctgttctgatgctctgggttgacaattgtgatgctggggggatgtggggcttggggttttggcccaatgctggtggtcatggtgggttcatgaaattagaaactaataattgaagcctgctcttcttcttcactcgactattgtttcgattttaaaattcttcttcactgtttcattttattttttaattaatttgttcaattatggaaatgtaaagattatatattcttggtaaagagacaattggaaatggaaggtgtgatataatttatctcttaattatgttttttttttctttcaattgattagtttgtaattttaatttggtctgagattgtgtgaatactttgtttaaattaaataaaatgtgtatattattgtgttcaaatttgataatatgggaatgacaactgaggatttttatactctaggcatgaaataagcaattgtatcaataccttgtccataacttgtgtccaaaagattcatctttagatcaattatcctcaagatactcatcagagaattgatgacaaagatgttttgagtttttgactttttttgtatttgtatttagttgaagacaactgaggatttttaaatgttctgtgaattgttgctgggtttattgattatggtatttgttctttgtttgcttccttaatcactctagagatgaactatgcaattgtatcaatagtggcttcataatgatacattttaaaccttgcccatagtttgtgtttaaaagattcatcttttattacatcaaactcaagacactgattgcagaattgatgataaagatgttttgagttttctgtattcgtatttggtttatgaatgggagtgattgtttcttttgaaatactgcaatgttggagatgtaattttgtatgaaagagtaattattatattttatttgtgaaaaggagcaatcctttaatctgtagacatcagagaatggtgggagtatgatcagaatacattttaatgcactgtttggttacaaagatcagaaacaaatttccacttttagcttggcatctttcttattagtttcaggattctaggaactactttatcttatagtagaacaatattaagaaactgatgaaagattttgcttttatttgacaaatatttgataagatatttgacatattatatttatttatttattttaaatgttggaaacccacagacagagaaatgaagaagagggtttaagttcactcagtttaatcaccaatggacaccttaagacaattggccattggcttccctggtcctcggctatccccacaacctctctcgagaaaattccagaagctctacccttctagcaatggcgctagctcttt

SEQ ID NO: 67533 - DNA, 895 bp, Cannabis sativa
taaatagaaggagaaatatttctctagttacttagttttgccaaaattggaggtgtcaccaaatgtcttttaatgctttgaaaggcctcctcacactcctctatccattcaaatttcttgtttcctcgcaatacattgaaaaagggtagacacttatcagttgacttcgaaatgaatatgttaagtgctgccattcttcctgttaaggcttggactttattaggcttggttggtgatggcgtatctatcaaagccttgattttctcaagatttgcttaaatgccccttgcgttgactatgaattccaaaaacaatcctgaggaaactccaaaggaacactttttcgggttaaaattcatattgtactttcttaatatttcgaagaactctgcgaggtccgttgtatgacttccagtttttacagattttactaacatatcatcgccgttaacctccatgttccgtctaatctaattcgcaaacatttcattcaccagtcgttgatatgttgccccagcattcttcaacccaaacgacatgaccttgtaacagtaaagtcccatgttggttacgaagctcgtatgcacatgatttgggacatgcatttttatctggttatatctagaatatgcatccatgaatgacataagctcatgcccagcagttgcatccaccaactggtcaatcctgggtagtggaaagcaatcctttgggcacgctttattcatgtcagagaagtcaatacaagttctccaagtttcgtttggttttgggacaagaacaggattggctatccacgagggataaaacacctcgcgtataacaacttatccacttttggtttgagtgccccttgtctctcggaatccaggggtctcctcttttgtctctttgc

SEQ ID NO: 67534 - DNA, 761 bp, Cannabis sativa
gaaaagtaaccattagattctaagatccagaaccaattgtcctctccgatgcctgaaggattacctcctttcaaaatagccaaaatagtctcattatcaaacaagctgttaagtttttggatattccatcccccattgggcagcaggagatcagcgacttttaaatcctcattcagcaagggacctcttggccggggtaagaagcctttcttatgtgctatccaagggtcatgccaaacgttagtatccttaccatccattagtcgcttacaggcacccttgcgaataattgctcctgatttagtcacattcttccaaaaccacgagtccgaggctttcgggttgcaatccaaaaagggtctgcctttaagatatttggcttccaagatccgacaacataaggattggttacctgtcagagggttctacccctatttagccaggaaagcctggttcatttcttttgatttctggaaacccaaccaccctagggacttagggaggcacaatttgtcccatgcttttaggtacagcccatgattactcttctcagagccccaccagaagtcacgaaccaagccatcaatcttcgttgcaagacggttggagagcttagtagtttgcatagcatacataggaagagtaagacctaccgacttgataagcgtcgctcttcccgcttttgaaagagtcttagctttccaaccatgtaatttcgaagtcaggttatccagaatgaagttaaaatcagcatccttttg

SEQ ID NO: 67535 - DNA, 1428 bp, Cannabis sativa
taagccctattttagcctcaataaaacaaacgattctgggcctcctcattaacaaatcgggttctagaaacacgtagttggtgggtttgatgacgaaccttcctcaacatgcctagttctcttaagtgccattttcttcctagcaatattttttttttcttttctattttttttctaattttttttttcaaaataatgctaagaaaaaaaaaattgggcagcacctccccttaatttttctacttcccaaaaattcacaatcactcaaataatatttccaaatactcaaaaccacaatataatattaacaaacccaatatcaacaataatttttcacaatacacactattaccacccaaaatctataacaagtaaatcaaattccttaaagattgtaggaagtgatacttacaaacccaaagaagctttaccccacctccattgttgaatgtccttgaaagcttgaggttgaagataaagacaatggtaatttcggatttgggctaatatgagtgatttttgggatggcttttatgatatgtgtagattgatgagtgaaattgggtttttgaatggattgggtttgagaaattgaagaaaagatgagagaattgaaatttgggaatggaaattttttgaaattttcgaatggtagaggttggggaaggctggtatttttgaatttgggtgtagggttaaatggggggaaaagatgggctatttaaagaaattcgtgagctggtcgcgactagcacatgggctggtcgggactagcttacattcaaatatcgtagggtttcttaaaagtggcttagtcgcgactggggtcgcgacttcctatgaccctagtcgcgactactgggaatgaaatatttccttgtttctgtaaaaaccccaggtcgcgactaccaaaaagggtcgcgactcaggaacctggtggtcacgaccactgggttctcggtcctgaaaaataattttttttttcacgtttttcacgatgaaactggaaaaatttaatgtctggtactcaactaaaaatttaaaatactaaaaatactaaaacataaactaaaaacataatcaaaaagtctgaaaaattaaagaaaacactttggttgcctcccaagaacactgtctttatcgtcatatagccggacgttgatcgagttcttcatagtggcgccagaatcatggaaaacttggcttgatcaatttgacttcccatgttgctaatttcagagttttgcacaagagtaagttcactttcagaattaccacacatcaatcttttctaacgctgccgaatcgttcgaagtccctctttaggctttgctttcttcttagctttaaaaaaagaacccttcaccatctcaattttgcaacaggtaggaatgtcggttggggcaaaaacattaaaattgacctctt

SEQ ID NO: 67536 - DNA, 552 bp, Cannabis sativa
ttaagtagccccataatgcatatttctggtgccattgggaatgtctgtatatatgactctcccaatttgacattaattccaggcaacttcagcaaattgaagttttttatattctgggttgtcctaagcttgaactaaagggcatggtgatcactttttaatgttgctaaacagctgatgcaatctgaacattggtggtgtaattttcataattggtaatatggattttgatcactttttaatgcaccttatttcttatgtagatagatttgcatagtagcatgtctcttaattttttgggtttgtgtagtgatcaaaattgcagtgtgatgacaaaagttgaagcatgaatctccatggatgggtggttatatataatatatatgagaaataaaatgaaaggtgaggtgttacttgtaataatttctgagctaacttgtattgcttttgttgttaaagtggtactactaattaattaatcagtatttttactttgtgttttcaggtgttatacatatgtatggataatggatgtttttcctacacaatcaa

SEQ ID NO: 67537 - DNA, 2426 bp, Cannabis sativa
ttttttaaaaaataaaaattaatacttttgtgggcgcaatagtgcgccggtaaaaagttgctaaaactattggtgcgaacctgacgattggcgccaatagttttatcggcgctctattgcgccgacaaaagcttatcaaagcagattcaaagcggataagggtattttttaacaccggcgcttattttttaccggcgtgatttctcgcctgtaaaaggaagttttaccggcgcagttagtctacgcgccggtaaaaagtcatttaccgaccaagcttcccagataaactttgctggcgcaattagggtacttttgttgcgccggaaaaagcggattttcttgtagtgacagtaaaagtggaattcccaagtgtatttggcgatgggagaagattctatgggcacctaagatacaaggtttgttgttacattgttacagaaaaatatttatgatggttgtgtgtatataagcatggatagagcctttctcagaatagaaatcattcaggagggctgtttagaagggtagaagacattgtagaaattaagagcaactactgcttacaattgtggtgtctagcaaatactattgtcaattaacggtaaaacatgggaagttaatgaccttctattgtgattataattagcaacatagcttttgttaaccttgagaaaagtaatacataatgtccgtactgcatctaatatatatcttggtaaccatgtgactgcttcccaatgttgaattttcggattggacatgaatctaatctactaagcacattataattaattcatagcaaacattgcccttaagataccaacactatcccatatggcacccaatattaaattgtgtactcataatggtatgtcactttttatgatgtttagcattttaagatgtcccttatcagtatgtcactttttatgatgtttagcactttaagatgtccctaagcattatatcccccttaagataacaccatctcccttttcaatctatcttttgatatttcaataccaagaatcttcttttctattcctaaataatttatctcaaactataattgtgcaattttttgtttcaactagctcactttcaaaatttccaggatttatacctttacgtacgtacgttaagttagcctcgtcaaaggtggtatatttaggtactgtaacttaaaaatgagtgtaaaatttacatttgcatgatcataatcttaaagtgaaagttatatatatatggtcattttgctttgtaaaaaataattaagaatatagagttcactataaatactctagagtcactgtaatcccacaaatatatctttgtagattttggtaataaatttaaatgctgatctgccaattcaagaaggtcttaatttatttgttatttattttattttttgaaaaattgggttagaaagataggtgtgccaaatcatgataatattgtgagatccacccttcaataattctgacctcttgctttctcacttctttaagccattctggatcttctttggtggagaaccttagatctacgtggtgagcacctgttaataatgaaacactaataattttaattccactatatatgtttggcattttttttaattaaaaaaaacattgtttataatgtaccttctttggcaacaattgcaacaatagtttcagatatgttcttcagtaccctggcaaataataataaatcaaaataacaagtaatgtgagaaaagagttagtatagataaatttatatatatatgtatataatacgtaccctccaccactccaagggtctcttaagccattgaagaagataatattgctcccaaacctctttaaaaccctctcaatgccctgcatatatatatatatatgtcagttaattaaatttcaataatataattagtttataaaatgtaagtaataatatataatacatagtgtgaacgtacaaatcccccaaagtgagtggtgatccaggtgcgcctggggtgtatcccaaaggctcgttggcaagaggaggctctgtcactgtaatgccactcataagctgggaatatactttcattggtgctaccacctgttggcaatattatctctgtacatgcctgtaattaattaatttcataatatcataccattattatttggttaattatcatatattattatgtatgttcatctcacttattgtttagccagatttattgggcccttattaaatattgaaactgagtatatataaaaaaacaaaatacattaatattattatcagtatataaaacaaaacatttcaccccattaattatacaagaatatatgaagcttaagatgtatgaaagtaaagagaacattccttttgctaaagtttattatcaatattccatattgataataagagtcatagtacta

SEQ ID NO: 67538 - DNA, 545 bp, Cannabis sativa
tttatttttaggagaagtttggtttctaaggttcaagttgcggtcagagtccaaaatattaattataaaaaaattgtttaaaaaaaatgttgaaagtgaattttttttaaaaaaataaaaaataaaaattttcatcctcaattaaaaaattgaaagtgaaaacagttttataaaacatgtttttgaaaaaaaatttcacttttctaattaaaccaaccctatcaagatgataaggggaaggtgatttggattgtaactaaattagtaggggtagtttctcctttagtggctaaagcaaccgctgctcttttgggaaccatgattgttgtcaaaaaaggccacaagtatatcttcctagagggagattcagaactgttaattaatgcagtaaatgggagagatatacagagactgacagaatcactaaagaaattaatagtctgatgaagactttagatggttgtagcttcattttcatttctcgttagtttaattttgttacccataacacaactaaatgaacaaaacctgtgtgttttagaaga

SEQ ID NO: 67539 - DNA, 626 bp, Cannabis sativa
  modified_base (579)..(600): a, c, t, g, unknown or other
ttatatccttaaccgactcttattgcctatataaacccattttcattgtcttcagctcagttaatacagatcaataaaagaaaggtatttttgctctgttttctcttatggtatcagacaaaaccttgcccacagcttccatggcaagaccaactactcgttcccaagatggcggtcctccatcatcagtcgacaacaccgcagctgagatcacatctgatccccctgctactctcaatctcacctcctctgttgctcctcgtagaaacctagttccacgatctcaacctccgccaaactggaacccagaaatggttcagacctaggatcagtcgaccattgtcgacgaacttcacaccactgctccggttcacacaaattgccctgtcaatgacgatccttctagtcctttcttcttgaccagatgcgatcatccagggcttgttctcgtgtctatagtcgtcatgcatcaactatcaatcctggaaaagaggtatcacaatggccctcgtcgccaagaacaagattgcatttattgatggtgttgggttttgtccctaaataaaacccatttcaatnnnnnnnnnnnnnnnnnnnnnnaaagatcaaaaataacattttatgtt

SEQ ID NO: 67540 - DNA, 979 bp, Cannabis sativa
aatactattattgtacatatatgtctatgtatatattttttttatttaatactattattgtacatatatgtatatgttttttgcgcaaagataaaggcacagagactggattgccttatatctagtagctaaatacaaggttttaagaccaatttttttgttctaaaacatgtattataaaggacacaatacatttgaattattaatttagattctataatccatgtttgtaattctttacaaatgcttatcaagaaaacttgaacttagagatgaattagtattttagtggcggtccaagctagaataattactcattaaatatttagtataaatttatgtctttgactttaaattttatattctatttataaatttaatttcagtttccacaatacattaaacactatggtataacttttataagttgtcaatatctattctatcaatagatccaaactgtatgtaaatgtatagaacatgagttttatattttgtgactagaattcacttgtactattctataaatctttgttgtaactagacctaagaattacaaacatcaaaagaccacaacaacaacaatacatctatggcatttacatcttgttcatagtgactttaacaagaacattctctcgaaagagaaaatgtgtcaatacccatttggaagtatgtccttatgtcttcgaacatgtggatgtatattcaggggtggatatgagcatttcattaaattcttagacaacaactctttaccttatgcaaagaaatttaaaatatttgaaaattttcatgagtttctagcaatggggaaaactaattaggtaagtagttagagatcttacgaactaatagggctggagaaatatttggttatgaaattcaaagatcattaagttaaactttgaattgtatccaaacttacttccctagaactttagaatcgcattttattgaaaatggtaaggtctatgat

SEQ ID NO: 67541 - DNA, 846 bp, Cannabis sativa
ttttttgttgggtcagggtcaggtagatttctcatttaacttcattctcccgtcattgtcgttcagtcttaactctagcgtgagataatgaagttccaccactcaaggtggcccacgtttcacgtatataatatatataataacttatctctatttcaaaacacattatattatcaagagtcaagacgggcaatagtacaactgcttattgttgattgacccttcagccgcactcagcccaactcatgtcttctgccaccctgcttcgccggattctggactccccagggattcaccagtgccctgcttgtttcgatgctctcagtgccaagctgatcgatagagctggctttcaatgctctctttctggtggtatgtttacatatatatatatatatatttgtatatatgtgctcttcgctcttgaatatttgttctacttttattggtgtagggttctcaatatcagctgctagattgggaatgcctgatgcagggcttatatcatatggggaaatgttggaacaaggaagactgattactcaagctgtgtccattcctgttattggggatgctgatactggatatggcaatgccatgaatgttaaaaggactgttaaggaatatatcagagctggttttgctgggattatgcttgaagatcaggttaatataatttcatttgtactttactacattgcactatcttgagagaaagcatcttaatttttatcagatgtcacatgtttagtttccaccaaacttgttaattttatgctgaaaggacagagagaaaaattgtgtttgtgctctttagttggggtctgtcctcattatgtagaaaga

SEQ ID NO: 67542 - DNA, 727 bp, Cannabis sativa
acctttccatttcaaaaaaaaaaatgaagtgtttctatcccatgtgggactcctactcacacacttcacttttctatttttacataatttcataaaaagttctaacagaaatacaccagttaaaactatgcaatctaaactaaattcataatatgataaataagatatatcatttaaactaaatcagcatttattcatactccagggacatttaatgttgggaacaaaacttccactgacaaatgatctaaaccattgcaatattgtaaatttagagcaaaaaaaaaaatatttttttgaaaatgccaactcaaaattggcaaaacaaatgatctaaaccatcctatagtttctgaaaatttaggttgattgtcctagaaaacaaaattgacaaaacaaatatctcatttatgtaaagacatcaaatactaaactctttaccttctcaatgggataaactgttttcttgcaagcaacacacctttcttgtgtaccagcaaacaagcgggaaactttgctgttagtaacctgacaagttaaatcataattagttgcaactaaagatgctttatttcaaccaccattatcatcaccatcatcatcatcaagtactcagatgctttatttcaagtaccagatgtgatttggactattgaaagagataacttagcatataataacaagacattgtacctgatttgctgttctgtctctaacagttttagga

SEQ ID NO: 67543 - DNA, 557 bp, Cannabis sativa
acctttaaacaaacactctattagtagaagatattaatccaagataatctaacctttatcaaatatgcccagactaagtttctaatattccattgatcctctcatattacccatctttcaagaataaaacctcatactattttcgctttaatctcccttattctcaataactttctgtaactcttaaaatcatagccaaagatatcagccttggaatttcacaagattcgactattcctttgaactccatatcctcatttattgtataaatcatttccactgatagacagcatgttaaattggcatgtccaactgttactactcggtcaaaatcataagatcccacagtatataattcatgattatgtctttctattcattttattggatctcctaagctggtgtactggtttaagtttctaacaagctaaatatttgttttttttggatagatattcaattagaatatttcttatttccaccgactactatatactcctatcgatgccttgtaaatctttacttattaatatattccttccccttgataatctctg

SEQ ID NO: 67544 - DNA, 727 bp, Cannabis sativa
atgtgggacaatgtctacaataaacactttctgtggttaacagcacaggagtggagacaagtgcacatttgcaacaaattatcttttcctatgtggactacctccacgtggtaatttttcacgagactgtactcatatttctaagcaagaaattcacactataagtttaatttttaacggtaataatatttaaattatatttctaaaacttctataagagcatctccaatgccaataattctaaaaattgccacaaatttcacatcattctaaaatataatattttattttctccctcatccacgtcatttttagccacttactactaaaaattactccaatacttaacaactataaaagttactactatggttccacatactatatttatcttcaatatttactttaatttttaaaaaaatattgaccattgccccattgtagtagctggagtagttaagtattttttgctccaatgcattagctactcttcctagtatctataccccagacaaagacagatggacaaccataataaaaacaatattaaaactactctaagtatctaattattaaatgtaagttattatccattatttttttattagtataattgaatttatttttaaataaaaaaaaaataaaaatttaataccccacaagaccatgatgcctataaaagtttcaaaagatgatatttatcattaaacttaaatatttatttaca

SEQ ID NO: 67545 - DNA, 761 bp, Cannabis sativa
gtcaattaatctcttatgtgttacgccgtttataaattatagataaattaaaataataatattattttaccatcatatatagttatgtgtaatattatattaattgttgttttctttccatgcaggggcagaaaaaagaaactatttcatggcctgaacgtggaaataaccacatgtatggagcttcgaataaaaagcttttcttatatatatatggtaattaataggaagacggccggccattggtacttataggatactataagaccatttttttttgttttaatatcaatcacacatctgaggataatttgatattggtatacacatatataattttacaaactacctattccatctgtgtttgtcatgttcccttttcacatttcaattttattatatattcttatatttgtattagtgccttcaccagtgctcttacgtccgctacaaactctagtttattaacacaattttttatttttatttatcattgatctgttaaaaattaaatttgggttgtggaccttacagttaattaagtattcgctatcattaaataaaagaaaattttcataatttttttgttttcacagaaaacacattaatagttaatttttagttttttttatttttttccaaaaaacgtgcaagtacatctcttgatacatatgcactaagcatttttgaataaaaattacctttaaaaaattaaggaaaattctacaatgcactcctttaaaatggatatattgatgcac

SEQ ID NO: 67546 - DNA, 869 bp, Cannabis sativa
gggaatggggagagtgactgcatcattgttatttgctggtgtagttaggatatttgagtggagattagagcctgtaggagatggttctgatgctgggggaacactatgtcctggggttgtttgttgtgaagattccccaatggttaaaactgcaggaaaggattgaggccttgatgacacttgtgggagaactgcagtaatagattttttggctaatcttgtcatgagaggccaaacttctcccttgaagaaatcggtcctatatctgtcataacccgattgaggaagaggagagcctatcatttcgggtccatatgacaatgagggatcaacaccattgtataaattttccaagaaactatgacagtgctcaaaaggatgaccaattgtcccacattcaaagcaaaattctgggagtctttcatagcgaaattcaacccaaaattcatcccgagaatctcttaatttgaccatttttccccttaacaatggtttagagatgtcgattgaagcacgaaaacgaaggaaaggcccccaaccctcatttaaagagtcctcatgaacatcgatgtatgtacctacgatattgcccgcccattcagccattactcttgatttgctcaagaatggaagcctatgtaattgaacccagaatggcgataaatgcagtgattcggcagaggcaatttgaagtgcagaaggaggactgaggacaatatgatggttctgaaaatgccaaggttccataaataataccttcctaagatcccccaagcatccaaaggtaaccaagaacaatcctgaatgatgatccgtgatggtaaccgggtattgaccctcccaatgtccactcatcttgattttaaaag

SEQ ID NO: 67547 - DNA, 1223 bp, Cannabis sativa
gtattctcgagggcgttcgtcacaggctccaaagaagttgatcttctaaaaaagcagattgctcatcttcatgagagcaacaagaagcgaaagcaggatgcgaactccatggataaagacatcgaggacctccaaaaaaccaaagaataggcggagactcaggccaagctttcttagtcaaaggtcaaggaattgactcgcgatctggagattgaaaaggaaaatgggaagaaacagcatgaccaagttgtttctgactacatctacacgactttatctaaatttccaaacttcgacttctccattcttggagtagaagcggccaagatggctgaaggtttttgtgctatgttgcctactcaaactcaagggtgtggaggaaacctttttcccgaggaggcagagactgcggatgcggaggaagtttttgatggagctgccagcaaggtcgtggatggctctgctgctccaactgcttaattcatctaagttttttttttctttagttgtcaaacttttttagcggtacatgggtactcgcgctttgtacttggacaaatttgattttgctttctttttactttgaacaatatatatcccttcgaggatatttatctatatgtttactttaagtggtactttggtacttgcatgttttacagacctgcttaatcttaatctaatttacaatattattatagcttggtgtaataaatttaaaaatgtgaagacttgcaaaaaattttgagctgtcgagaattctagaaatttttttcattacaacaagaaatcaatagtacaagatcaatagtacaaagtagttctatggtaggctataccccctatacttagaacatttatcaaaataaattgtctaagtatgattacattagagtactattgataataatacttaagactttcaccattccaagcccttcgaatcgcagtaccattgagttttgcaagtcgataggtcgcatggccaattttttcagtgataagatatggtccctcccaattatcaccggaaactccatgtataggattttttgtgtttggcatgacttttcacaaaaaccaaatctcctactcgtagagtccgctctttgaccttcgaattgaattagcaagcaattcgctgctgataggccgcttttttcaaatgagcctgatcgcgcttttcctctaaaagatccagttgaagcaattgattttctata

SEQ ID NO: 67548 - DNA, 1036 bp, Cannabis sativa
gtacaaggttgtgtcccgtgtctcgagtctggggtcgagttttgggtctcgaacccggtttcggggccaagtttcgggtccaagtcccccacctaggtccagatcctttgtaccggtctgggtccaggtttgggtttaaggcccacgtcccccatctaggtcagggttcggttctcaggtcccatgtctgagtgtcaggttttgggtcccagacccagatgcagacccagacccgaacctgggatccagacccaagacccaaacatcgactcgaactcagacctggaccaagaccgggatccaaaaaacctatacccagactaaaactaagactcaaaccccgacccccaacctggacccaacggaacaaatcccggacacggaaccagaactagaattgtgataagaatcgaacccaaaccgcaacccaaactcagaccaaaaccttgactgagaccttgactaggactgggacctaagacctgagacctggaacctggaccgggacccggacctgacctggtcctaaaccctcgtgggacctaagacccgcgacccacaccaggatccagaccctaaaaaggacccaaacttcaaccttgaccaagagtgggaccgagacctggactaaaaccaagacacggaacccgaacccaaagctggacaagattaggaccgaggaatcggacttggatgggggccctagaccagggacctagtcctcggaaccaagacccaaatccaaatcaatgattccaactcgaaccaagacctgacctagacctaggaatttgaagtcagacccagacccggacccaaaacttactctagaccaaaaccaggacaggaacctagacgcgaacccatactaagaccaaatcccagcgtaaaaccagacctaaacctggacccgaacacgggaaccgaaattaaacccaaacctaaagctgcacctggacctgaaatcgaaccaagaccgagatcggaacccaggacttagacctcgaaacttaacccaaactcagatcgagatcga

SEQ ID NO: 67549 - DNA, 701 bp, Cannabis sativa
agtgatagtattgatgccttttgagacataaaaggattgtaagtttaactccgtggcattgtctgatctgacagtcttaacggagtttgaatattgtgtgcaaacgagatggtagaaatttggtattatggtttggacttcagtttttgttttgagcaagtaagtctaagtgcatctagttttatcatcaacaatggggaggaaatacttgtaaccttctctactaatgatatgaaaagggccccaaatatttatatgaacaagatcaaaaatattttctgcaaaattattgtttgagataaacgataatcttctttgtttagcaagacgacaagttgtacaatgttgttcttgggacacttgaaagctaggatctaattttttattgaatgtagttaaatatacattgaagggtgaccaaggtgcttgtgctaatggtctatattattgtaagaaaaattaaagctagattggttgcaactagctgagaaagatggctcttgctgcagaatgtagagctttccttgccttttagctgtcccgatcaccacactcagagaatgagcctgaatgatataagaatcatgttgaaagaaaacaagattagttgtatgatcatggtagtctgtgatggagaatagattgatattaaatgttggaacaaagaggacattatgcagaactttgacatgtactaaatc

SEQ ID NO: 67550 - DNA, 987 bp, Cannabis sativa
ttgaagagtgttatactattggagtgattttagaagtaagagtgccaaaaatgatgtgaaagagaaataaaatgaaatattatatatttatatgatgtagggatatttagtatccttaaaagatgctattattgtagatgctcttaagagatgttattagtttaatttattatgtttacttagcttttattttatttatctttattatgatatgatgtgccattatttattttatttttttttcaagttcaatcaattctttaggttgagcactcaacgattgtgactacaccaataataattcagtctcagagaatttgttatttcaaactagtaacatcgatttaatggtgatgcatcgaagaacaacttacacaaaccaacaacaaaataaaacaaaataaaatcatatcatagagacaagattagttgccataacctaaataaaagacactagaaatatgtcacaattacaaagactaaacagtagcaagaacctaatcgcaggaacaaaacataatcgcagtagcaaagttacactccccgaccaaaccatacctaagcctagggagagttgttcggagaaaaaagacaacctctgccaactaaagatttagaaataaaaaatcctagcagacaatataaaatatttagagaaaaccactctaagagtatatttattcttttaaaaaaaaaagctttcgttgatattttatatgtgtgactatttgaacattgttggatttgtaagtttttaagaatgaaaatcttacagcgtacataattatatgcactcattcatttaaataattatacacacatataaaatattttatattgtctgttaaggtttttcgttactaggattagggttttgctactactattagtcttgtatttatgatatgattttgagtgtctagggtgattgcgaatcttgttccatgacatgatttttttttaatttcgttgttggttcgtattctt

SEQ ID NO: 67551 - DNA, 2803 bp, Cannabis sativa
ttttttttttttaattggagaaattataaattatttttttatatgattgtgtatagggtcctcttaaatattttgaggccctattctaatttaaaaagttgggcttctaacaaaaaagaaagtataatttataaataatattttatacgattatttatcttacaaaacactaaaaaaattagagctattatattaaattattactgattctaatacaacctaaaaagaaaatgatagaaaaaaaaaagaaattgaaaagtttgaaaaaaaacaataataaatagcagtaatggacatatatatatatatattttttgcatgagagttagcaatgataagttgttagccctttagaaatttgagttcatacaaaaaatatctaaaaggcattaataaaaaaaatatattagggcttttattttttggagccctatgcggtagcgcatctcgtacacctataaggtcaagcctgattgtgtatattgtagttaaagcaagtattccacaaatatatttatttatttttaataatatttggttccaaatataaagtttgaacatctagttgctcatgttcctctttttttttttacaattaactattttgaatattttttatggtattgtactttatttattttttctaaaaatatgtagcaagtctattataagtataatttaaactatcatataaaaaaattagattataatgacagctggtataagcaaaatgacatatgtgatatgataatgaacattttgatctgttaataaaaaggcacatcatattctaataatgaaaaaaacataaagcaaaattatactaaacaacattatttgaaatttttgattaattataaactagtaaattaataatcatgtttaattaaatttgatcaaatatattaatactcttatgtaattgaattttgtattctaatccaaatgatgattttcaattatgacaggaaacaactacaaatgttgctaggtgtatgatccataacgcaattgcagataagcttgatataagcaaattattcaccaatcttgttggatcatcatcaaacatatttcgcattgctgactttggatgttcagttggaccaaacacgtttactgcagtggaaaacatacaagaagctattcaacaaaagtacctattacaatctcatgaactccacaattcttcttcttctttagtgatgcccgagttccaagtattctttaatgatcatgtcaccaatgatttcaacactcttttttcttctttggccattggcaaaaggtgctactttactgccggcgtcccgggatctttccatagtcgactatttcctaactcctccctccatttcgtgcactcctcccttgctcttcattggctatctacaatgccgaaggagttggttgatgagaattgtatagcatggaaccaaagtagagttcactacaccaacgctcgaatagaggtttacaaagcttatgaagctcagttttgtagggacatgactcagttcttggaagctagggctatagagctcgtggttgatggtttgatggtgctaattatgccagcagttccagataatgtccctctttctcaaatgcatttgggtgtgatctatgatattcttggatgtgttcttgtggatttatcaaaggaagtaagttatatatctaatttttataattttttagttataatttcaagtacttaaatattttattaactatttttttcttcaatttgtttttgatatttcatactctcatctcaaagccagaaaaacatttcaattaaccataaattaataaattaatgagtacttaatatttcattatcatgcattatattgaaggattctatattacatgatgtgtcaatctacaaagaaagtgatgacaaagtattagtgcggaaatagcagagagaaaataatgtaagaggaaaaaaaaaaagcaaagtcattatccaatgaatctattacaagtgatttacaactactaataagagctataattagttacaagattaactaactcacttaccaaagctaactaactcactgaacaactcccacaacttaactaacttctactctaactaaccttttaacttgatactacccctcaagataggctatagatatcctttaaacccatcttatctttaatcaatttgaattaattaggaaaaggaggcttagttaaaatatctgctagtttctctttagttgacacatgaactatttttaggatcccttcttgcaccttttctctgaccaaatggaaatttatctctatgtgcttagttctttcatggaaaactaagttggcagctattggtgagctgatttattgtcacaataaaataatgcagggccttcatgctcaatctttagttcccttaagatagattagagccaaacaatatcacatgttgtgttttccatggctctatattctgcctctgctaaatatctagaaacaatgtgttattttttgcttttgatgaaatgattggtgttccaatgaagatccaaaaccctgtggtagatcttctcgtatctagacaagatgcctaatctgaatttatataggcatgtaacttcacctctgtattggcagtaaaatataatctttgactaggattgcttttgacatactgaagcactctttatgctgcatgcaagtgagtgatctgaggtgttgctaagaattgactcagtttattaactgagtaagatatatttggtcttgtaattgttaagtactctaatttacctacaattcttctata

SEQ ID NO: 67552 - DNA, 1200 bp, Cannabis sativa
cttatgattttttttttctgcaaaatggttaattattatactaggaaaataataatttttaatacttaatatttaaaatggaaagcttttcaattacatccaatttcagttatttgctttccaaaccttttctaaatgaaagggaaaattaatgtttttatgtgttaagcaaaggtgaaattgcaattgcataggcagtgatgctaagaatagtgtgtttcacgattgctaataattcagacattgcaatctgtcctgggaataattatgggtaggagtaggactagtctagaagcatatattccattaatccaaggtcgatgcaaaatctttttggtgtgcctcttttcctctcttttataatagctgttaatctagtttgattattctcttcaccacttattaataatatgcaaaaacatgagtacattgtattattatgaagctgctacttaaaactgcttccccaaaatcgatcacatttgtataaactacaagcttgttcgtacattatattctaatgtacatcagtacatttttattttttttataattgaacatcaatgaattttatcgattacgtcttgaaaattttgtgtaacccaaatcttgcccctctttctttgactgattaaaaaacataaaaaaaaaaaatacaaaaatagaaacaaaacacaaaaataattaagtaaaaattcattttcaacctttcacatactcctaagcaaaagcatttttagagccaccttcaccactcggctgatcttttcttttgacatagttgtgcttattttttcttaaagatagaaattaaaaagtgaatactatatattttatatttatgtatatatatgtttatatgttctagcatttcttgcggattttgcagttaagggcacctgcaaagcgtgtaagcctagtgacaaaagtaccaggcttggccttgatcatgtcacgtctgccaaatggccttttcttgctgggatttcctgattgaacaaagaaagctccattcatcattagatctccctcagatctccatgtccatgatctccattccgactcactagcatagtccctcttggtcacctatattattatcatcattacaaaatgtgttagaatgcgatttcactctgttaccatattagaattttaagatcaatgtgagactctctaacaaaatgcattattcgcttt

SEQ ID NO: 67553 - DNA, 2103 bp, Cannabis sativa
cggtggaggtagtaagtcttggttgttaccactccgctgaatctgatcagtcttgacataaatctgtatatacgggttattcttccttatcaggaattcaatttctcaattcagattgttacactcgttggtgtcctgaccgtaatcttcatgaaatcgacaaaacatagtcatgtctctcttactgacatcttttttcatgggttcgggctttatgtacagggccagtgattgagtggccatgtaaacactttccatgtcctccgtcaagatggtaaatgcagtatacttggtagaaatctcccagagaacttgtttggttttgccagtgaactttcccttttttccactcccccgcctattattgttgttggatcgtttactgtttgagcttgaattgcttgggtaatgggggagctagacggatgtcccagtagaaggagatttttacttgtcaggattttgctcgccttctgctcgctgaatggcctcttcaagtttgataaaaccttccgtacgaccaagaaaatcactcatcgagtctactggaccgttcttccttatgtccttccaaagcacaccaaggacttcaatgccccccagtatcgcggacaactttccgtcttcggtcactcgtgaaaccttggtcgcctccgtcatgaatctactgatgtaggctcggaggggttcgcttggtcgctactttacttcgaccagatctcctaggtgcaacggaagctagcgagaggaagaaaattgtgcatggaattctgaagagaaagctttccatgagtcgaactttccgggcgccaatttgaaataccattgctgggcggcttctgagagagtggcaggaaaaattctacagcatacatctccccgtactccttgtagatccatttgcatctcaaaatacataaggtgggataatggatcttccttcccagtatacgtcttccaggttggcatcttaaacttgtggggcaattcaagaatattgatctcgggggagaaaggggttccacgtgctcgatccaactcaagatcgttgttcctctgaccgaccatgctttggaacctattccttagttcgtccagctgtgcctgcacgactggacttacctgttcgacattttggccgatctgagtcacatcagcatctttttgagcaggattttgaacacgggttctgggctgtacgctcagcgtgttaagctgatcgtccacccctttcctcttgtttaatttgtttctgaggtcatgggttgttcccaacctctcaaatacggaaacgcctggctgtctcagtgactggttggtttggccaattaactgaccattaacttggttggagttattgggtatgacttctcctaatgaattactagacaaggtctgcccacctaccacttagcccatgggtggaacctttgaccggggattttgcggctgaccgtttatagtttgagaggtattcatcgctggatattcgtccgtttcacccaaaggaatcacattcgcaggttgctgaccgacagtctgttaggctctccgaattagcacagtggcttgacaactacggttgtcaatgactgcttgctgagcccttagcatttccatttctttatccttccattcaacaaacatgcgcctctgctcctcaaatgtgaggttcaccgcagcgcagagttcctcatgttcatgatgcaaggtgttggtatgaccctgcatgagtccaagagcagcacatgggttttagatctcagtgtcagttccaatggttgtctgaacattagtggcgggcggaacgactgtgttatgattcccctggtcagctgctgaactggtattcccagtctcttacacaccaggcacgatttcatctacaggagtcgtcacgccgggacctgctgtagactgtctaggatttattgccagcggaactggatccaccacgccgtacgagtctgtatcaccatcgtacttgtgattaagtttacaataaagagcgactcttgagttcttctctcaatgaaagcaccaaaatgttgacctcgcttttagtcaacgatagtgaggctaattttgtaagcgacaagtagt

SEQ ID NO: 67554 - DNA, 1168 bp, Cannabis sativa
  modified_base (202)..(202): a, c, t, g, unknown or other
  modified_base (252)..(253): a, c, t, g, unknown or other
cagatgaatatgtacatcaaggaaatctacattttctcttagtctaaaccgtttcgcaacaagatgtaccttttacttttcaacagtaccatcgagtctcaatttcttttttaagaatccacttaaaacctattgtcttacaacctagtgttaacacaacacatgagagtccatttcatcattaatagcttcattccataantcagcatctagtgaagtcaaagcttcttggaggttagaaggatcctcctnnagagtatatgcacaaaaatcaaaatcaaaatctttagctactctaactctcttacttcttgaaggttcaatttctataccgttttcatgctcattatccctaataacagacatgttactaaatgatacacctccactatttctcaatttaaatggaaatctatgttcataaaaattagctagcatcattagatttcaaaataacatgcacatttaaataataaaagctatatgctttactattacaacatatccaataaacacacattcatatgctctactagccaatttaattctcttaggataagaaattctaacatatgtcaaacaacccaaagttttaaaatgtgagatattgggttgtttatttttcaaactttcatatggagaaattttgcttttagatttactgttatagtgagatttttctcacctagaaacttgagaccgaactcctatttcactttcctcgagcagagctgagatgttgatgagagacccctcgagtacaaacctcacctgaactagactcagcgagatgatgcgaatatgaccgagtctaatcgcatttgtatgactcgcattatgtaggatcaaggaacggctttaactcgcactatcaggatatatgcgagtatccttgcaatcctcctgcgaaaacatatagattgattttctatgttgcgagctggttccgttgacccaatagccttgataaaccaatatagactcgcacgtcttggttctatcagcttgctatatgatgtccgtataagcgactttaaaaggacgcagacatcctaaactcgactagtccaaatgcatcctaagcctgtgagcttatgcaagaatatgaacagccaactcacattatagaagtcgcatacgttgctgtatttagtgaattaagctggaa

SEQ ID NO: 67555 - DNA, 979 bp, Cannabis sativa
taaattctctcaactatcactccaattgcacttaactttctaaactcaaattttgacagtaaaatcttccaaactattgaattgttaacaaatttaaggtgttatttatttttttacagttaattgtcaatatagacggcttatgtacacttttgtacatgtgtcgtacacctaatattattattttaaaaatataaaaaattatttaaaatttataatattttttatttttttttaaatattttatttttattttttataatgttatttaatttgaaaatgaattttgaaaataattttcaaataattatattaagtgtaccaatataaacgtgtcttgtgaacaagagtgtatacataagcaacccatagtaacagttaaccaaataacaccttaaatttgctactagttcagtagtttaaagagttttaccgccaaaatttaaacttggaggattaaatgcaactaaatgacgaaaagttttaccgtaaaaactcataatttaataattgtaaaaaagatagcatgaaaaagtaaaacacaaaattaagtcggatgtgaaaataaacttgcctgaaatacaaaccgacacgaacaaagcacggtacaatccaagtaaggtacgaaaatactaagcttacgggccctgttggtccaaccctttaaaaatagacacaatacagtcctatttttttaaaaaaccaaacaatatgtttgtacactatccaattcaatctacacattccaacgctttaaatacaaaactaattaaaattttccatgtatgacattatctaatttgataactaaattagtttcagagagttagacaataggcaattaaattagtgttgattaactttcgtagattttcttgaccaggctgaactcaatgccagatataacactaaaattaaaaacccctttctttttttttttcttttttacgaaaacattgcctttttttttttttttttt

SEQ ID NO: 67556 - DNA, 768 bp, Cannabis sativa
ctgcaacagttgtacctcctacctcgaatacagctactgatcttgcacttgtccctgtcaataccagaaataacaatacccctctaccaaacactgaaccatcttttatacaacaaaacatctctcctcaaccaccagatattaccattcctcctacagaagcacaaagtgtaaacccacctgtagccctgcctgcccctacccgaacccatcctatgcgcacaagactacaaaatggcatctccaaacccaaatcctacatagctactaaacatcctttacctgagtctttattaccctctgaaccaaagtccttgaaagcagccttagccgattctaaatggcacaatgccatgagtaatgagatctgtgctctgaaaaaggcaaaaacatggaagctagttccctatgagcctcacatgaatgtcattggttgcaagtggattcatagggtgaagttgaataaagatgggtccttgaacagatataagtcaagattagttgccaagggttatttgcaagaggctgggatagactttgaggagacattcagtcctgtggttaaacccacaactgttcgaactgtgctatccttggctgttacacacaactggaatgtatctcaatttgatgttagtaatgcttttttgaatggtccattaaatgaaacagtatacatgtgccaacctccaggatttgaggactctactcaccctactcatgtgtgtaagttggaaaaagctttatatggccttaagcaagccccac

SEQ ID NO: 67557 - DNA, 846 bp, Cannabis sativa
aaaaaattaaaaaaatagtacatagaataatttttctatatattaggttaatattgcacgtatatttagttatattgttagtttgtatttttggctgtatatatttttagttgtataattaattttttttttgtgtgttatttaatatacaaaattattttttacgaaataatatttacttttagtgttatttataaaaataaaaaaaaataatactattcaaaatttgttgttatttttaattttagtttaattaccgtaatacttttaattttatcatactttttattatttttgaaatatcaacactttttttatttctttttaaataataatagtagaagtatattttttttttggtaaaaaatataatattgaaagatatttttttaaatgtacaataagtttaaatttgaattgaaatattaaaaaaaaataactttatgttatatatatacatttaatataagataaaaaataagagatatttgtagtgagtttaaatttaaattataatattttttttaaaaaaatattacttttttatataaccacatttaatatagcatagatatatgagtaaatttcctaacttgtcaataaacaaacaaatggaggtgacaccacatcatgcataattcagatagtttaaaataaaaaaaaaatattgttaaaaaaaggaataatttcaaaaaaaaaaaaaaacacaaaaataacaaaaaaaattacaaaagtacggtctttacggagttttcaatatttttacagtttttaagattttatttacatacaatattatcttttggtgtatttttatgttgtattcttattattttattgttattt

SEQ ID NO: 67558 - DNA, 875 bp, Cannabis sativa
ccttttgcatttaaagtttaattttcgtacttattttattagtaatcccgtttaggggattagagtttcttaaattatcttgggtaacgtgcataatagttagggcgttataaaagagaacaatataataataacggtagataatctttcctttcataataatgaaactatcagattatatgaactatattgtatattataatcaaatgagagaataagaatacgagagatgaatataagtatgtatatatactagattataattatgcctatgaccacaattatactattagtttttattttggttatatatatatttagttgtataattttttttgttaatgttattagataaacactatattttcttactaaaaaatgtttaatttaagtgatatttataaaaaaatatatatatatctatatatataataatatttaaattttgctataaattataagtttagtttaattgtaatattttaattttataatacattttattttattttttagaaataatacactttttttaaaaaaaaaaaaaattaacaataatagaaagatgttttttttttcaaaaatttatatttattttttttactaatataatttgtcaattaacaaaacagacagcccattcattaagttttgcaaaatataaagtataaaatgacatacttttttttagatatgtggagtgcgtttaaatttgaattgtaatatttttttaaaaaaccatttatattatataaacacatttagtataaaataaatgatattaatgagatatgaatagttagtttaaatttaaattatattattttttgttaatgaaaataatatttttggttatataaatatatttaaaataa

SEQ ID NO: 67559 - DNA, 2575 bp, Cannabis sativa
ctgcaaattgcctcaatttctttgataatagcataatctgagcccaatatgcatgtatggatatgagcacaacattaatcaaagtcactctccccatataagacaagtttcgggtgctccacactcttatcttaccaaccattttctctaggataatttgacattcagcagtggatatcttatttgagcagatcggtattccaagataaatggtagtgtacttcttttaaattgtgaggcctctagaattcttcccacttcattatttgacatgccagagcaatagatggcagttttctgttcatttggcatcagacccgatgtagaagagaatagctttagccgtctcaacatcagcatgattgaaacaaaatctccatgactaaacacgaagagatcatctacaaaatagaggtgattcaatttcaaagatgaacatctttcatgaaacttaaaaccaggccaatcaccaaccttctgaaatatccgagacaagtactccatccctaatacaaagagaagaggagacacgagatctccttgtcttaaccccctctttgcattaaaaaagccacacatagagccatttagtaagagtgagaattttggtgtcctaatgcaaatcattataagcttaatgaattgatcaggaaaactgaattccatgagcatttcttcaagaaatccccattccacagtgtcatatgccttccttaaattaatcttgatcatgcagcttggcttgcaatttttcctcccataaagtctcactagatcctgacaaaccagcacattatgagcaatatacctcccatgaataaaccctccttgattatcagcaataagatccggtagaattctctttaacctattacaaataaccttagtggcagtcttatagaggacattgcagcaagagattggtctgaaatccaccacactctttggacaagcaaccttagggatcaaggtgatagttgtagtgttaatttcctttaacatcttcccagttgacagaaaagacaggatagcagctataaaatctgatcccaccaaagcccaattgtcctgatagaaagcgcttccaaacccatctgaccctggtgctttgatgtctgggatggagaacaaagcagcttttacttctttctctgtgtagtcggccaccaaagtggacttatgtgcctctgtaatcttggggcccaagttcaccacagactttaaaacctttcttctattctgcatactggtacccaataaggcttcatagtatcccaagaaagctttctgaaccccttctggagagtcttgccaagtcccatgctcatcctctatcgagacgatctgattatggatcctcctaaatttcagagaagcatgaaaataggcagaatttttgtctccaaaagtagcccagttgattttggctttttgagataagaacacatggagtaggctttatggacttcattatacttcttacttgcttcctgttcagtttttatcaaggttaagctctgtggattcttgctcaattcttcttgagctgttattaaatcatcttttgtaaccatatcagccttgtggatctcagaaaaaccttctctgttgatctttttcaacactaacttcaatcttttgagtttggtgactattttgtacatttgcgagccttgaacctcttcattccctcttttactcacctgcgtatcaaaggttggggccatcttccacatgttataatatttgaatggcttctttcctgaactcttattttggtatatagataccaacaaagggctgtgatcgaaggacaattcaggtaaaaatactgcttcagattccgagaaagacatacaccagtgtgagttcaccatggctctgttgattttagggaaaatcctatcatctggtttttgtttattattccatgtaaaaaaagagcctaaaagcttcaaatcagtcatgtcacaattttccatacacttcttaagtctttgagatggaatgcatttagctttcctacccactctctcatttgcaaacattatttcattgaaatcccccataatgatccaagcctcatgaattccgtttgctatttttttccaaatcatcccacatttcttctcttttatgttcttcattaaatccatagatgaaagttgcataaaaacaccatttttgttgcattaaagtaatgtatcaatgaaccaattgactagagcaaaactttatatccaatgtgaacatagagggttgccaagctatgattattcttcccttatctagccagggattattgttagtaaagcaccacccttgaaatagactactataaagcttgcccatacttttattctgaactttagtttctaggagactaaccaactcaaccttcttagagaaaatcaattgcttgatttcttgatgcttttgttggctgttaatccctctcacattccaacatagtaatctatccattggaataagagagttcttgttaggttatatttagcttatgtttcgggtctttaaagttagcattatctcgtctattggtgtcttttggagc

SEQ ID NO: 67560 - DNA, 613 bp, Cannabis sativa
  modified_base (578)..(582): a, c, t, g, unknown or other
tagtgttatacaaaaaaacgatataaaacacaatttagtatatacaataccatactatagtgtaccaaaagaatctttaatgtactgattactgcacttgttatttatgttgagcattgtcatatagttatgagaaagtggttattgtttccaatcctatactcaactataaacttttgctttaaagtacagttgtagaagaaccatgttgttgtgggatgctttttgagtcctgtatccacacttccactcattcatttaagtttgaatgaaagactaaagattggtatgtttctctttgttatgtgtttttagagggtagtatagcaggagctgctgcaggtgtcattgcggaagcacttttatacccgattgatacgattaaaactcgattgcaggtatgttcagtgtgcctaatattttccaaccatgaaagggtccccatatattgtagggttaggaaggagcgtagtagtttcaaaccaaaaaaaagggggtaatataatatgtggtatattaagagcatgtttggtattgttttttgttttttattttcaaaaaattatttttagaaatgnnnnnaaaaaatagtttttgaaatttttaaaaacaa

SEQ ID NO: 67561 - DNA, 1700 bp, Cannabis sativa
ttgatgttgaataaaatggattacattgcaatggagttttatttagcgcataaaacccagcagatcctgccactcaagcttttactgttcacactctgactaatgatcctcctactgtccagacaaactccagctggaatcctttctctcattttttacaatcaaccttgaccattaaacttgatcgaactaattttctttcttagaaatcgtaggttatccctattgtaatcgttcatgaacttgatgatattctcttcaatgggaatccacctcctgcaaatttggttacgggtgcaccaaatcctatctttgatcaatggaaacaaaaagaccaattacttctctcatggcttcgttcttccatgactgaaggaattcttgcctctgtcataaacttccaaacctttgttattgtctagagagctcttgcacacaagtttgccagccaatctaaggcaagactcctccagttaaacagttaattctccacaattcgtaaaggcagcttgtcgatctctgacttcgtcgataaagttcaatccattactgattctcttgcagcagttgggtctccaattcttgaacaagatatcattcttcagcttctcaatggtcttggactagaatttgattcggttgtgtcaagaattaatgcaagaagcgatctattgagtcttaaggaggttcaagctctcttgctctcccatgaaagccgtcttgaacatcacagtgccttgacagatctgactatgcagatgcaagctaacatggccattgggaattcaagaaatggtgcgtacaaaccaccttagggatccaaggctggtggtcgtggattctttcgaggtcctaacaccaacaaaataccacaatgtcaactctgtcttcgtttggatacactgcaccagtttgccattatcggtttgataagaattgggtgccctcaaaacctccctccaatacaaatgtccataattcctctccaaaggcttatgttgctgaacaagaatttgagtatgatccacaggccttttctacatcgttcataccagattttggtgatgatttagggtggtttgctgatacaggagcaaccaaccatgtgtcccaaggcacagataatcttgactcctcaaccacctacacaggtgctgaagggcttgctgtaggaaatggtaagaaattacaaatttctaatattggttcagccactctaccttcttctaattcttatccaattaagttgaattccatcttacatgtcccctctattaccaaaaatcttgttagcatttctcaattaactaatgacaatcctgtgtatcttgaatttcacaaaacctgctgttttataaaggacaaagcaacaaggagggtgctactcaagggtacccttaaagatggcctatacgtgctaggatagttctccaatgcctcaagattgagtcccccaactcagtccaagtctcattttcattttcctactgctatgatctgtaataaacaaaattacacaaatgtaattctcaaatatgattgtaatatcgttgacagcaataaaatagataattctccttcttatttctccattcatatcacatttcatgctagcagtaaattaaattttgacatatggcatcaaaaacgtggtcactgttccttacctgttttgtaaaaggttctgtctagcataagta

SEQ ID NO: 67562 - DNA, 1299 bp, Cannabis sativa
  modified_base (34)..(49): a, c, t, g, unknown or other
ttcatattcaggatgttaattcaacatacttgtnnnnnnnnnnnnnnnntggtaaaatattcccaacagttaattcaatcacattatatagactaataggataagaaatccattttaatcaaacatgtttctcaaataaattaaataataaaaataattatattattaaataaatttatgaaaaaaaataaagtatcacaccacaccaaccgaccttgaatcaaacggacgacgcacatgtggtgggtcaagtgtgggttgtgtcgtagactaggtcactctctttaatatgtttgcgacactgcccaggaatgtgcaagcacttaaaaattatcggtcgccccaaggataaaacaacctagttgttgtacactgtatcagaacacaactgcactgtaccgaaccgtcaaatacaccttgaaaatatatatcgcagatagaatcttttgatagtgaaaactgagttttttcttctcagtatgaaaagatgtgtttctcttgttaattcaatcgtattatataaactaatggaataagtaataaattttaattgaacacgtttctcaaataaattaaataataaaaataattattttattaaataaattttcgaaaaaaaagtgtcacaccataccaaccaacctcgaatcgaatagacggtgcagacgtggtgggtcaagtgcaatttctgactgttttcacattcatgggtagtgtcgcgaatgtcttaaagagagcgacctagtcggcgacacaacccacacttgacccaccatacgggcgccatccgttcgatttgaggctggttgatgtggtgtgacactttatttttctagaaatttatttaattaaataattatttttattattactttatttgagaaataggtttaaattattccattagtctatataatgtgattgaattaataggagaaacacatattttcatactgagaaaaaaaaaactcagtttctctaccaaaatattccatctacagtatctatttttaggtgtattcaacagttctctacagtgcaatagtgtttcgatacagtgtacgacaactggattgttttactttagggacgactgacaatttccgactgcttggccattcatgggcagtactatgaacgtcttaaagagaacgacctagtccgcaacacaacccacacttgacacaccaagcgtgccgttcattcaattcaaggctggttgatgtggtgtgacactttattttgttacagaaaatttatttaataaaataattctttttattatttaatttatttgag

SEQ ID NO: 67563 - DNA, 591 bp, Cannabis sativa
tataaaacaaacatgtttttgaattttgaaaaatattcacatattcactttttcaattttaaaaacagaaaattgattaattggattggtacaattaaccatttgcaacttaatatttatattgaggttatcaaaatatgtaataactcgactgaattgatcaatgttcgctcaaattggtttcttcatcaagaaactgatttcttcattaagaaaccagtttcttgttaattttttcggttgactatgccaattttgatgactttttcaaagtttgctgttaatgctggaaaaagtcgccgaagtaactgccaatgtcagaaaagtcatcagaattggcattgtcaccaggaaaatttccaagaaagtagtttcttcatcaagaaacttcttaaagaagaaaccagtttcttggtattttttcagtgattttttcggagacaatgccaattctaatgcatttttcagcgtcgacagcaactctgatgacttttccggtaccgatcgctactccgatgatttttttagcaccggcagcaaaccccgacgattttttcgacatcagtgacaaataaaactacctaaataaat

SEQ ID NO: 67564 - DNA, 1548 bp, Cannabis sativa
gtacttttacggaatgtattttgtggtacattagatgagtctcagggtacgttacaatttttaactcaaattacccctagatcaacccgagcggcccgaccctcagatcaaataagtcccctatctaacgactgcctaacatcacggaatacattccatgaaagtacatcacggaataaaatcgtgtccatacatttatatgtttagtgaaatttaatgttatgtgatttatttttaccaatgacttagtttgatatttttttaccaatgatttttatattacatatttttatattaggggagaggaattcaaacttgagactcttgtgaaaccactaagttatcaaaaactcgttgtcttccttaactaggtcctcattcacaggatgagattgattaactagtgaaactaagaagtattttcttttcttttgaatcttgtttgtcattttttactgaagtctcccctgtttggatttgttttgtcatacattgcttctttttgtcctctgttttgttttactgcattatggcctcaagcagtaagtctgatgcagacataacgaaatcatgggctgatctatgtattgatgaagaggaagaactagaggcagtttttgacgtcggcgaaggcgaggaagacatcgaacctgacttcgatgacagatggtgcctagttgggaagcttttaacaggaaaaatctctgattaccaaatatttcagaacatcatggctgatctatggaagccaggaaaaggattgtatgtcaaaattctggagccgaaccggtttctctttcaattttttcacgaaatcgatattcaaagagtcatcaacggcagtccctggactttcgaccgcaaacaacttattatagaacgacttaaactaggcatgaatccgaagcacactgcgctgaatactctcgacatgtgggttcaaatccacgatcttcaaccaggcttcagaactgagaaagctattcgggaggcaggacgttttatcggagaattcattgagctagaccccaacaacttctcaggagtgtggcgcgactactttcgaatccggatccgtataaatattaccttacccctgaagagaagaatgaaattcagaaagaggggtgaatcgacattcttttatgccaatttcaaatatgaaaaagttccaaccttttgttttatttgtggtgttatgggacactctgaacggttttgtgcaaaactgtatgacactccaccagatcagatagagaagccgtatgggatttggatgaaagctccgaataaacgccagaattttcttactgcatctccatggctgcggacggggaagaacacgattccggcaagcaataatgatggcacggttgactctgctggcaccattattcccccacgatcagaggcaaatatcagggattctactaatcaagaagctttgggaggagaaaatcatggccttaactccacatcttttatcattaatgaaaatatttccactttctcatctgataaagagatggaaatattggatttaaagag

SEQ ID NO: 67565 - DNA, 12002 bp, Cannabis sativa
aaaaaaaaaaaaaaaaaagggtaatctattacacttcttaagacaattttttaacacaaacagataccaaaaatataaataattttatcataatacttttaaatcaaattatcattaaattttattttaaaaaataaaaaatttattttatcatttaacaaaaagtccaatgaattacttttacaaaattcagagtacttaccctttaaaaaatctctattataaatactcttttagtcttctaagtgctcttaagtatttgttttacaaatagacatgtaatcacttccatttgtgtttgtgaatgtactcttacattgttatcctaaaaaacacacacaaacacaaaatcctgtaatacaaccaaattaaggaattaacatcttattacttttttctcttgaattcatacttgttcttatctgtaagagaaaattgaaaattatttaaagcaacatctggtcatctacatgccattaagcatgtagaccttgtgcttcactcaattgccatcattgtttttgcactaaattttatatctactaatcaaatatatattaatacatatgtgtacatgtatatgcagagagagagagagatttgccaagtgctcaagcaattagccagagcaagaaatgaaaaagtgttcgagcaattagtgaaactgaccaatgatcacatcttatgcaattttgcatcaagtcaaagctaaaacaggttcaaacttgctttttactgcatgatactgcattttcggcagtctcatggtcagattttgaacccttgatgtactttcaatatgattatggcttttcattttaatttcaatttcaagccacaagattcatttgttctgtaccataaccccaatttcttatggacaggtattatggggattggcaaattaagaagaaccagttgtttttcctctgcttcaataactcaatggggataagagactcttcctctttttatttatttttcctcccgaaccgccccttgtaaacttctttgcttcaggggagttatgagttgtacccagtaagtaccctacacctaaaagaaacatccatgatgattcaacgaatataagaagcttctttgacaccaccaagatcattttgttcactggttcctgattccccaaaatatagatggctctggaatctgtcctctgagatgatggtagagactgactatccttggctgggaaattcttccattgataccattgggttttgaggatataacctaggagatgtaccgtggatatataatctctctgatgtcggtggcatggcagtatttctctgagcaatagaagacaagtacattctctctgatgttgaaggcatcgaatcagatgattgagaaacagcagccagattgtcattcctctgagatgctgaagacatgtatatcctctctgaatgtagagcaatattgttcctctgagtggacgagccaatgtggtcactgcgatgagatgttgctggcatgtatagcctcccagatgttgtgaacatgccgtcagacctttgaaatgtttgactcgtactgtcacccagatgagatgttgttagcatatataccctctcagaacttggatgaacattagcatcagcttggtgagatgatgctgccacattgtcacttctatgtgacattgagcctactgtgtcatgagagacaggtatataaaccctctcaggagtaagggccatgttgatgtcagtcctctgagaagccagtgatgtgttgtcactcctctgagacgttgcagtatgaattcgttccgatgatggcggaagcgcgtcattcctttgagatgttggatgagaggcttcatcccacctggatgcctgtggcatatacatcctctcagatatctgggtagaggttattgacactccttggtttggtaaatcccgttctgttggaggcagagctagcgacatttctccattggataattccctctctgatgcgggtggcaggtagacacctcggcttggcaaatctctatcagctgttgaagacacagaagacactcccgggttaggtaaatctacctcagatgaagtgattgggagtgaaactccatggcttggagaatcagtctcagattctgaatgcaaagaaggtgactctctctggcttgctgaatctctatctgtagaagaaggcaaggctgaacacgcagctcttcttgtcatatctttctcagaaggcggaggcacagctacaggcaatactaggcttgataaatctttccactgttgggcaacagttttgatttgggtgtaaaattgaactcctgatttgcctgtaataagaatcagaaacataacggtcagaaaatggctcagccatgcagtctgacagaaaagaaattttactgcaaagagttatataaccagagaaagaggccttcgatccactgaatgatgaaaatggtaatggaactggaacagaaacattgatcccaacctaaagattaaatacatgacagcaggacatgagtaattacaatcatgaagaagaatagcattctcaaaactgccctacaaaaacttgatcaaagcacataatgatgatatgcaataacatttcacattctgatcaaatcatattatagggtttttctaatttagttttaggaaataatttgtattattgtttggcatcaatttcgtatacttaaccaccagatacacaggttgatgtcagagtcacgatcacttaataatttttacgaatatggcgattcttgaccctctcatctcaagaaactctagtagaatgccttaccagtccaacgtcaacttcattctgaaacttccttgcagaaataccagatgtggtgaatactgaagctccattaacatacctgagagaatacaaagcatcaaaaatgtcccaaggactacaaattacgaagtagtaactaggagaaacacgatatcaaaaaaccaaatgttttccatgaaagggaaaatactttcatggaaatatctcataaaatgaaattgtatgttctcatttttcaagtgtccctaaatcgggacttttatgaacaataaactagcaaagactatcaccttaaggaattattatcatagtttccaaacaagactaaaaatgattctttttaacttattttcaaagaaaatttcacatgaaacaagattcaagatccatggcaaaaaacaaaaacgaaaaaaatatccctcctctctctccctctccctctccctctcaataattttgttgactaattgggataatatgatgacaatttttcacatgatattttccaagaattaggagctcaccaaacaaataatcaaatgcaaagtcatttgacaattttacaagaggcattagcatccatcccagattttagaaaaagatctactggatatttattaatagtacctgcttctgttaacaatcatgatggcctcttctaggctgtcaacctgtttgtagagagataacagaacatttggtgatcaaacactaacacagtaatatcatataacactggtaaacactgcaaagaatatgcataaaaaacacacatataaatagagagaaagagagcaaagaggttgaaattacctgcatacaaagaagaatcggtccaaacatctcttcctgctcaataaaaagatacagtaaactcttctgcaaactgagattcataattaaccaagcccattcactccatatagtgaaaatatgagaaagtaccttgtagcaatccatgttggttgtaatatcacataagattgtaggaccaatgaaactcccattctcatagcctggaacctacaaaaggaaatttaaaaataaataaatagctaagaaaatgtttctggataactactttaaggaatttaacatatgactgttagcctaaagattcaaggcaagcccaatgcccgtatgttctttgcacaaattctagcactgaaatctttacaggaaaaagcttaatggaatgaagaaaaagaaaagtgtacagcattatctttctgtcctataaataaatttggagaagataggcaacaagatgactgtaacagtgcttacagaaggaagattttacattttaacaacttcaattttgcacatagaatatatgcctacgataattcaaattaatatcaagaaccagaacaaagaattaccacaacttttctcccatcaagcaaaagtcgagcaccactctcgagactgttgtgaactaatctgcatatgcgatcctttgcctgcttattccaagcacatcagagcttataaaagcaatatgatactatattgaaaattatcaatataattatgaattgtttttcaaattatgcaggaaaaagaacaaaaaaaactcagacctcattttacttccttaagatgttaatttcaggtgtggtctccataatctaccacttcttatacttagattctagttacattttttaacatttatatccctactttcgatttcatatcacttaagtcctcaaaacatatttccataaagaaaaaaaaaaatcaattgaaatcacatttttcacacatgatcagagatatatttgtcctaaaattttttgcatccataaaagcatctgccatctatatttataccaaaaattgattgtaagatttctcatttactacttactgagcacgtgtagaggtcaagataaaaccaaaaatccaaatggcataaaacagatttgttcagcacttcatattttgagcacaaaaatggtatagtcaaaaaagtgacttttgatagagaagtgttggaacggtgctatggggactcaggtgatataatataagattgaaaggctgtaaatctaaacacttaagatacatatttaggatgtaagtttaataaatggtaaagtaatagggaaaagagttgaaaataaccccttaagataaaccgaccaaatttggaagcaagtaaagcacctctttagtaattactggaccaaggtccgcattgggatcggttcccacattgactttcagggcttttgcacgatccacaagttctttttccctgaaatatacaaggaaatggccaatattatcttaatcaattcagttgcagatgataagaactctactaaaattatagaaactatgactcataacaaaactgcttgcttggtttgattgtttatgtttctttttgggtagtaagtagtttgtactcacattcctgtagtattatttttcatcttgataatacaagctctaatcttttgattggaacaaaacaaaattagatagacaaataaatacagcataagatatttattaggaccgaataaattcacagaacacgtaaatggtagtattcgagaaaccactcgcaatagcaaatagctcctaatccaaattcatacaacttcataatccccattccatctctcttacactatttaaatatatcgttggttctagaaagtcttacactttcattaagacaaccagcactcttttattacaaaatataccacatcttctacaaaattgtttacactccccactacttgatttatttctatatgactcgcggtgcctaacaatactcaataattagaatgtcagcttatatagaaagctggataattagattcaaccagaagaaagaagtagagaaagaaacttataggtagacaaataaggactgacactaattacaaaatgaaattcaagcctacaaaaacaaaactagatgtacgtttggacaaaagtctaatttaacaaacaacaacaaaacagttaccgtgatacatgataaaatgaataaccctataatatgtataataatagaatgtactgacattagaaagatctcaagcacaattttattaattgcctctcccttggtcacatgttgcgcatacacatgtatgttagccttcctaaattaaggaacttgctataactaaaatcttgagacaaaaatttaaaccgacttcagaatataaaactaaaacttatactccacaaaaaaataaataataaaaaaaatattaggatgttgaactgattacgcacatcatacatgaaggttttctttcattcagtcttcagtgaagagaattaagtcagcaaaagaaaaaagaaaaaaaaagtccaatatgcaatttgctttgtgaaatatgcatgttttatcacgaggttaatcacaccattccaatattttccatctaataactgacatgcagctacctacactaattcaattatcctaacgctaatgtcttgtttggaatttatctcttcagaaacttgaactttgttcattgagtccttgtatacctaccttaaataaactaagttaaattcaagatgagtatttgataatcaaccccctacttaaaatcaataagcagtcaactatttaacacataagagagagagggagagagagaggagggggaggtggttaatgcaaatcacaaaataccatggaattgaacccctgacaaaaatagctgtgctggtagccacgcctgcatcaccaaaaccagcagcaactagagcatttaaggtggtatccacactagcatcaggcatgatgattgcgagattcttccctcctatattggactaaagagtcaacaaagttatcagttattccaaccttgagtttagaatagctaatttcccacttgtgtgtgcacacacgtgtgtgtgagagagagggagaggagttaaatcacctgaacacgctttcccctagatgctgccctagcatatacgtgcatcccagcctaaaaagtaattgagcaagtgaagagtaattaaaagaaaagagtgggacaggaatgtaaccagagcaatgcaataagctttagaaaatatttgaagtccaaaacataaatcattcagacaggccaaatgaaaacccagtcagcaaataaaagaaatgaaattttagctcacagcaaatttcattaaaacacaaacttatttaaatgtatgaggactgttattttcagtgtagagatttagtagacctgccgcaataagagtatacacgagttggtagccaagataagtggtctgaacttggaatcatgtcaacagatttaacaaatatatttaaattttgggcaataaaaatctaaatgagaacttactgcatttgaaccaacaaaggatatcgcttttatgtcatcatcatcacagatatagtttacaatatcctgttaaaattattttccaggggggaaaaaaagaagtgacagtgtcagatgcagacatttgcagtacatgcaacagaatagttaaagggaacagtaaataaacaaattcctagaagagaggttaaagaataatgagaagatgctaaatatattaggtacagcatgtgaaaccaggctggctagaaaaagagaaattgatttactctcaatgaaaaaccaaagaatatttgtctgacactaactattaagcaaataattttctttagcgcactattatcattgggggagtctacttccaacataagaccagtcatctctgaaaaacattagaataaattttgaaaccaactaagaaattaaacgaacacaattgtccttatgaactcatttttgatccattgagtgtttgctacctacaaaacaaaaacgatatttctgggcatatcttcccataataatatttttttataaagtatggccccttcttgttttaaccaacatagtcatttgccagattcattttagagaaaatggatgctaaggttgttgtgtgattcaaagattatcaagtacatacatcatattcacaggaacgtgaaagaagcatttatcatccaccccaaccccccaacccccacccctttctctgaacgagcaccagaagcaaagaatagcatgtcatattcatatggatatattatttgaaaaaaaaaacaaaagaatctgaaataatatggcttacatgagcaccatgaacaacatttaagacaccatcaggcaaaccagcctctgttgctagtgatgctagcatcaatgaagcccctgggataaaaacaacatgagaaaaactgtcagtagaagtggatgttaacaccatgtacataacagatatactctaaccatctacacaaggctttcaagccacacgcagtttactaggatgtcctatgtagaactttcattcaagagcgaaaaaaacaagtcaagcaagagtaaagaatagcattaaatgggattacctggattattttcacaaggcttaaggacaaaagtattcccacatgtaactgcaatagggaacatctgcaaaatcatggaaaagggaacatcttagttgaaaaattttatttcagtttccttctctttaccctccacattatgcagctgaggccacttaagccccaacaggcaacagccaatcatagtcctagatctcttctgttcaaaggagtaacaggaagaaagttgacctcacaatggggcctcatgaatggggatgaggtctaatttggaacccatgcccgtcatatgtttcccttctaatccaactctacaatatcatggtagagctaagtttcacaaataaaaggtaaaccctagaagaaaagaacaaattaagctaagtttcacaaaataaaaggaaaaccctaggaggaaagaaaacaaaaatgtaatcaaagtaataaaaatttccacacctaccttaaaatgctacacaagctttcaagggaccatttataacaatcatgtcaattaaatcgaaagttggttcaaagaaaattctaaaagtttgactaccctaattaataagtatcggaaacacatatgaagggaaaaacacgtatgaaaggaaatctttgcacaaacaaaagcaggaacgatgaagcatgacaaatgatgaagaatgaaaaagtaacaaaatagtcagacacacccataaaggagtcattgctggaaagttgaaggggcatattccagcacaaacaccaagaggttctctaatgcagtatgtgtcaattccattggatgagttaggaacaaactcccccatttgtagatttcccatcccacaagcatgttcaaccacctctacagccaaaaaaaaagcaatcagccaatcttttcagcaaagaaccattatgctgtcagacatagcaacaagataattacgcaaatactaacctagaccgcgaagcacatcaccatgagcatcctttgatgttttaccctgttccattgtgatattcatggagagcttatcctgaaaagcatggtattattagacaacttcaatatttataaactcactaaatcatttttaaatttacaatttactaacaatatctctggagatgagctcctgaagcttgaacatgatacgttgacgagtggtaataggtgtgtttttccacaaaggaaaagcttgcttggctgaactaactgcagctttgaattcttcatacgtacttattgggacttgagaaacaacctcttgtgttgccttaacaagaaaaatttataaacaattatacgattgaaatgtacaacttacaatacaagagaaaaaaaaaccaagcaaagcaaagtttaccggattgataacatcaacgactgaactagcatgagaatccacaaatttccctccaacaaaattaggaaccttcagctatatttgaatctaaaataagttgtaatacccaacttgttcaataagcacgataaagcagcccaggacaataaaacacatccccactcacttgagcatagcatcttaccggctggttattttgcatcgttgttctctcagtgttagatgtacttgtgttcacaggaacagatctattaggtctccatgagttgaaacttttctctgcaagaatatcccccagttacaaataactagttagtagttactaccaattctttacattattatgcgagatatgaacaaaagtaatttagattattcctcgccattactgtttggatatttctgcagaattataaatataaatgtattcttattatatttgaaaaggaaatatgtaagattttgattgttataaaacctcaatgtcatgccttaaccttgataaaaaaaataacttagtatcataataaatcctaacatgttacccggattaagaagtactgattgataactaaaatatcattttttttgtatgtagaaactgagaaaaaaaaatacagcattgaaattaattcttgtgatataccagtctattaagaccatgagaagtagaattgagcacaaaaatgacatcgcttcgtttttggcaagcataaaaatgctcacccaggaaactgcatctaccaacaaccaatacatgttttcgtgaaaaagacaatttccacataatcccatatcaatcaacaaaacggctatctaaccaacaaaaagacaatttccacataatcccatctcaatcaacaaaacggctatctaaccaacaagattatgaaattatccagattctaaaataaaacttagctactgcttgttcaatatctccaaaattgcgaggaaagtcacaatacctgatacagttccttgacgaatcttagctttgagattgtacaaatgccttggggttgactgcagctctggattactttgtttgagagccttaagtacttgacgaggtttaacaccagcttcagtcattaccttaatttgcctcacctcttcctcagtaaaacggcgactataaggatgctctgacatgtcctttagagcttcgtgattgtgctccccattttttaccgcaagcacccataaatcatcttcttttttaccaatggcttcaaaaggacaatttataaggcgtgaacttgctttccttttacgtttactttcatcaatttttcgcctattacgatatacaccccctctatcacaaccaaggatgactcttctatctttcctagacttctttatagtcacgacatatccctgactagcaccaaaatcacgtacatatttgatcaggtcctcacgatcttcaaatgttccgggttgtggaggaagcatctcgctaagctttttctaactttgagtttctattgatgatggtataaacaaaaaagttaaaaaaagaaaaaaatgggaatacttaacaaacaccagacacaatacatgatagaaaatggtacagcgaactacaaagatagaaagagataaaaacagtgtgaactttacaccttcagaaatataaatggagctcatatgatgaaaaatcaaaaaagaaggcacaaacaaagtcaagactttctttcttttacaaccatatcagaaacacgattcaatgcaacttatgtaactcttagcaatgaaggaaaaaacaaaccctcaaaaaaagttatgaaactggtttgatgataacgatatttagcccatctcactgttaattattcacccaatttcattgacaatatataagtgtaacaaggcaattgaaaatatcaaacgacatcccaaattagaagtaaaacatcaatggagggggaaaaaatactataatacaaagctgattaaccatacacatgaatacagctggccagtctggtcatcttcaccccaaaattcaaatacaacgctttctaaataataatataaatcctaactacgcagaaatcccagtatatacaattccgaactttcttactggttttgcactgatcataactgaaagatcctaactttcaccctcaacgaaacaaaacaataatagaaatttcccacatgtaatctaatttcataatttccaaaaaataataaaaaattagaagaaaaaaaacaaacaaacaaacaaacaaacaaagaagataaaattgaaccgaacagatcaagattttgataagaaataaaattgaataaaggatgaaatacctcgagcgagagagttgggtgaaaacttggagatttagaaaaaggatcgggcaacccagacccactaccggctt

SEQ ID NO: 67566 - DNA, 500 bp, Cannabis sativa
  modified_base (473)..(475): a, c, t, g, unknown or other
atataaatttattttatatatatatactaattactctatctatctaagaatattctctattcaaaaataaatctaatttattataaaaaaaattaagataataagtaaaaaaagttgtgtgcatatatgcatacatgtatattataatatcagggttggccctacagtataatagatgatagaaaaaaaaaatatttctggatttttatttaaaaaataatgtaatattttttaaaattaataaaaaatatatataatttttttaactcctgaggcgctagacacaggcctagtccaagaagacactacaacaaaaagtataattcccgtcagtttttaagtgtcatttaaagaatttacgtcggttaaaaaaactgatgtatataccgtagtcgcaaataattttttattggcatcgtttttaaaataacgcgaaaaacaattatctacatttacaaaccgacgcaaaatannnacttttctattttatcttttgcgtc

SEQ ID NO: 67567 - DNA, 710 bp, Cannabis sativa
tttttttttttttttaaatccttcttttaaagagcattcacaataaattttttcacagcactcataattaggaatgcattttatatatattttattttaaattaatcagcattctactaataatttgtatatatatatataataagataaatattattttagatcccgtcttttacaaaaatgatcaattacaccatttgtgtttagttattaaatgataaaatgaacatatgtattttctaaaattatacaaataggatcctaaactaattttttatcaaaataaaacttaataataatcctatccagatgttatgacaaattttgttatattttctgtatcatttcgtgttaaaaattatcttaaaattagtcacattgaaaataaaattattgaaaattgaactctcatttttactattttggaaaagagaaatgttaaggggcactagtagtgcctaccctcttatgtgtcagtattgctattggtccaactaagtatcgggtttcacatagtttaatataatagtttttaggaagtatcgctagccaatcacaacgtgacatgtcgagaaggtgctaggcgccactggtacctaatagcaatactctttgaaaaaatataaaatctattttgtcatttaatttcctcttaataataattactataaattaaattggaaaaaacaaacaaattcatgaaaatggtt

SEQ ID NO: 67568 - DNA, 594 bp, Cannabis sativa
gtccacacctacccatgaagcatggcctcactggtcactcttcttcatcttaattaaacaaatatattgctttaacctccttttatcttttaaccacttattaacaaacaacatcgattataagaaaaaaaaaaaaaaagcattattatcaaaagtgttctttttttcctacatcctctcaattattatttaagttgcatttaattttttaagttcagattttaacagtaaaattatctaaattattaaaccgttaacaaatttaaagtgttatttatttttcacaactaattacctacatagattacttatgtgtacatttttatacctttaacaaatttatatatattagtacacctaaaattattatttgagaaatataaaaaatatttcactttataatatatattttttaaaattttgaatttttaaatttttaaaataaattttgaaaataatttttaaataataacattaggtgtagcaatataaacgtggcatgtgacaagagtgcacacataagcagtttatagtgacagataaccgaatgacactttaaatttgctaaccgttcagtagtttggaggattttac

SEQ ID NO: 67569 - DNA, 1210 bp, Cannabis sativa
  modified_base (1173)..(1183): a, c, t, g, unknown or other
tatcggggatttaaaattgaaactaagaataaccctatcgataaataggatgctaatactctaaattatgtaaaaacgggaaaaactagtgctcgagaaaaagccccaactggcagaccggttcccaaccagaagtccggttcctgggaccaaccggtcgaccggttgccacaggctccccggaaccggaattccggttctgcactgggaaccaaaattttgacccctcaacctcaaatccaacccaaaccttgtgaaactctccaatacacctgtatatacccaaacaaactcaaaccaaccaaaagaactcaacaaatagctcaaaacacaaattcaccattaaagctcaaagttgaagttctcaaactccaacttttctttaacaacacaaacacctctaaaatcagcttgaaatctattaaataaacataatctaacttaagaatatcacagcataaaacctcaacacaaacacccacctaaaacctagaattaaacattaaacataacttcaatttaagtaacataagtagagaagagatatatatgggtaatacctccaattagaatgctcaattcctactgagatttccctatagcaacaatgaaatccaaccctagatgctcctctagtggattcgagagagagagaagaagagaggtaagaaatggtcaaaaagttcaactcatcccatgaagaatttttcttctttttattttattccttttatttcaaaatcagatttcaattataatataaatccccacataggacaaaagtccacttagcctaatccctattttacccctacatataaaaataaggtttaaaccaactaagggtagtttagtcatttaacaccctcgacaaatccccgatataaactaaaacatataaaatgcgactctctaaaggcccaacgtcgctttccagagctcctaaacacaatgacagaaattgggatatttatataaaacaacataataaacatatatgataacaaatatattcccaaaatatgcatttcataaatattcattaaatctcatgcataaaccctaattagtcaataatccataatattaatcttaggtggtctttacaccacgtgtacacacttatacacgtggaaaatttttagtggtccacgtaatattagttttaaaaannnnnnnnnnntatttaaaaaaaattaaaaaatctgaa

SEQ ID NO: 67570 - DNA, 1157 bp, Cannabis sativa
agggcacaaaacccaacaaccatatcaccactgatgctgacaatatgagccacaagtcgaattatggaggtaatgaaaaactcactgttggtaatagtaatcaacttaccatttcacatataggtactggttgtttgcaatctgatattggacaggtcttagttctgaaagacttattgcatgtaccagatataacaaagaatttgctcagtgtgtcaaaattaacatctgataataaagtctatgttgaattctattctgacttgtgttttgtgaaggacatggaaacaaaacaggtggtgctacaggggaagcttaaggatggcttatatcttctccaaaaaccaaataccaacttcaaagtctcaccaagtctctacaatgctattgctgttgattctcagtctagtcttgagtatattaatgtaatttcgagtccttttactgttgtttccaagtctagtgtcagtaacacatgtttgtcaaaaagagatctatggcataggaggttaggccacccttcttcaaaagtgttaaatcaagtgctacacaatgcacatgtaaaactttctttgaatgaaaagcaagagttttgtgaagcatgtcaatatgggaaatcccatcctttgccttttaaattatctagcagtagagctaaagcacctcttgaactaatccacactgacatttggggccctgccccagttatgtcaaacacaaatctcaggttctacatacattttatagatgactagagccagtttacttggatttatccattgaaaaccaaagttgatgctctcaaggctttcattcaatttaaaactcttgctgaaaatcaatttgacactaaagttaaaggacttagaacagattggggaggtgagtaccaacctttctcaaatctggttagagactgtggcatagcctttaatcatccctgtcctcacaccttaagccaaaacggtcgtgctgaaagaaagcacaggcacatagttgagatgggattaacactcctagctcaagcttgtatgcctctaaaatattgggttgatgcttttcaaacctttgtttatcttataaacagattacccactactgtgcttggtggtaagacaccttgtgaagtgctaaactgtaaaaaaccagattacacc

SEQ ID NO: 67571 - DNA, 869 bp, Cannabis sativa
acaaccttgatcaaaacttttttacccatcataagaaacaatttgaatttctagccattaagctttttccaaattttgtcctggatagagttgaacaagcttgctttgttatggcccgcaaataggggagatccaggtatgtctcatgacaatctactccgacaacttccaataaggctaccaatctttatctctcaaggctcgaaacgttgggactgaagcacactattgatttcacaaagttgaccagttactccgaagcttcaccataccaactcagaagttgcttgaatctcaagcaatacacttctgaagcattaaaaaagaagacgttatcgttagcaaacaagagatgagagatcatcgaaccatttctcctataaggaaaccaaatagtaaactattgttacaatcgcgtttcaccaaaccagataaaccctctgcacaatgaaagaacaagtaaggagacatggggtcctcttgtctaagaccacgatggggagtaatagaaccaatagcctccccattcaagagaatagagtattccactaaagagatgcaatcaaggacttttctaacccaatccacatgaaacccaagcttcaacatgattctctcaagaaatttccattacactctattattaggctttggacatgtcaagtttaagtgcatagaacccatcacccccctttttcttctttaaagcattaacactcaaaacgaatgagagtattatcaatgatcaaatgcctttggaagagcgcactttactcgagattatatggccaaggacttccaacattcgaatagtcatagactttgtaataattttgtaaaaaattttacaaagactaattgagcaaaaa

SEQ ID NO: 67572 - DNA, 610 bp, Cannabis sativa
aaattaactaacaatgagagtcatataaattatacattggtcaaaatagaaggtgataatcaacaaagtatgaagatatacattaaaaaaaaaaagtctaatagagaagttaattattgtcctacaagatctagtatgaagatgtgaagcctaagtgtaaattaattataaaaggttatatattaaaaaaaaaaaaaaaggaaagtcgatctgcaaaaggattataatatttataaatttatttctatttatttttaaatattttttaatccatgctttattgtaataaggaaagtatcatatgtcaatttctcttttatatttattttaagaaatcatatatatatatatatatatatctataaataaatgaagaaaaattgatattttgtttgagactacttagaagaacactaagcaaacgaggaatattaaaatagtaacctatatggtcagaggaagcatatgaggatgaggtgttaattaattaggagacataatttggattcaaggattgtaaaatgagctattgtatgtgtcgttttattattcttattacatatatatagagagagatatatagtatatatatatttattatgtgtacggg

SEQ ID NO: 67573 - DNA, 1181 bp, Cannabis sativa
ttgattatcaccatgtgtaaataatagtaacaaatagtaaaagttacaaagagacttatagaggttcggtccccttatttagcgggtaatgacttactcttttttttagttgcattcactcttgagatagtactatgtagtttacaggtctagaccttgtaatttctaactatggctttcttcattattataattgtgagaacaatgtgttgcagataaaaactgatgagatcttgttaagaacttatcaaaaatcttgacttagtgtctaggatacattgatggagtataacttcataaggtttgagagtgagagcttcacacgtgtgagaaacttcatggcgcatgagagagcacttgtagcgaccttttagtgattgtggaatgacttagctctcgagagagtgatctaatgccctttatatagtataggacttacaaaatatcctaattcaaataagtaaagatctcccttcaaaatagagatattaacatcttttatctattatttaaactacaaaaataataactaaatccctagaatacaagactaatattttaagggaatatccctatcttcatgttggacctgtctcgcaatttgtttagctgtttagagttgtatgaacgccaattttcgttaaccgaaattaaatagccttttagtaataaatattcttcaaaaattaataagcaataaaagaaatgataactccagatacttttacgtgattttgtagttaaaatctacatactccacgagttcttcttataaggaatcttttatgaaatacagagtacaattagagaatttgaataataataattcactatccgaatctctcctttttcttatgggctctgccactatttataaatgtataggtttacagttatcttttttgggattaattcaaatatgattgttcatgaaacatggacagtccccacatttcatttaaatcacatgtgagataatactaagtaactacctagctgttctttgattttatccttttagatggttattgctgacgtggaaggttatatcttctcttatttgagttatcttccttgtccatcttgataagaaaatacgctaagtgttgggaagtttcccatcagtgaaagattggttgtcgaactgcttgccgttgtcggagactattttgtacggtagt

SEQ ID NO: 67574 - DNA, 1287 bp, Cannabis sativa
ttatgttaaattttaatttatatttatataattatatacgcatacaaattaatatcaaacatagtattacataaaaatataatataaaacacaatttaatataattttatacaatataatacgacacaatagagtgtattgaacaaactcaatacctataacacatcatatggtgtatttgtttgtctcttgaaaaaaccgaatactttaaagtacttaattttacataaagtgacacgttatgaatagttatcagtttctaatactacttatgaaattttaaaatatgtattaaaaaaaagacaaagaattaacatgtaattttagagactgaatgattttttattcatgtctcttaaatgtaaatttaattgaagcctaattttgtgtcatattttaaaatgttaggggaaaacaaccttcacattttaaaaaaaatatgtaaaaaagggacagaaatattgagttccaaattaacttctttttcttttttttttcccctttctttctcaacataattatttgtgtgttgaaaattaaaaagaaaaaggaaaaaagatatgattatttggaacaaaatgatacaaaaattaaatggttaataagaatacatcttatctttgcagttttttttttcttttttttttatattatttttttctaagttttttaacagtcatagtcaactatacactattaagtgaggggtttgactacatgaactcaagtgtagtagtttttttttttgttattattattattatttatgataaaaaattaaagtaattatgtataactagtaaaagggtgaagtaattaaattggtgaaaaatatacaataatgagttgaaatcttttatgaagaattaaaaactagcaatattacatgccactagaaatttgtaattttgattgttttgtaagaaatgagaataaaattaattgaagaaaattaaatttgaaataaaatcatcataacaatttactagtgatagttggagtcttaaatttccttgtttatgatttattatatctaccaagtgtgctagataattaattcaattatttggcatagaaatagtctaaaataatataaatgactacttagtgaaaggtttattattattattattattataaataataataataataataatacaattgtcatttcatacatcaattaagaagtaataacacaatgttcaaacattaatattaaaataatctcaacataattagaaattatcttaataaaaggttaagagatatataaattattaaatt

SEQ ID NO: 67575 - DNA, 1818 bp, Cannabis sativa
  modified_base (1129)..(1131): a, c, t, g, unknown or other
cgctcttccttttcctatttttttttttttgtttttgtttttcagtgcacaatctttctttaattctacatgtttttttaatcttttttcttttgcttttttagagtacctcaaaaaataatgagaaatagcaatgacatcaatggacaacatcaagacctcaattttctattggtatttctttcttattatattttataatatattttttagtaaattacaaattattgttaatatgatctatttattcgtaatctctcacttatcaaaatattttttgataatttgacgacaaataaatttttttatgtctgcagctttaccattgtcaataacttcgaattatctatgatttgttcattatccttaattttctattggtatttattttctctctatattttataatatatttcttagtagattactaattattgttaatattctatctactttatttttttttatataaattgatagaggttattaaatatatattatatgtcaaatatatatatataaaagtagtaaaatagttacttgagaaaattttatgtgaaaatactaaaaattaatttagttttatgatttaattatcactaaaccaaatttaagggcatgggaaacgcgatttatttactattcactctttaatttcttcaaatatttctatttattcacattttaatctcttatttttctaatatttttaatctactaaataccattagcctatttattctctccttaattatctcactttttttttttattttttttattcagtttataaatattaatagattaattaattaattaaatatctatatatatattctatatattttttttaaaaaaaaataaatatctaatgttaaacttaaatctatataattaatctatttatatatatgtattatcattctctccctctctcatgctctttctttcttttatttttttctattttttttgtttttcagtgcacaatctttctttaattctatatgtttttttttaatcttttttcttttgttaatttagagtaccttaaagaataatgagtaatagcaatgacatcaagatctcaattttctattggtatttcttttctttttctttttctttnnnttttttttttttatattttataatatattttttactagattactaattattgttaatatgatctatttattcgtaatctctcacttatcaaaatatttctcgataatttgacaacatataaacttttttatttatgtctgcaattttaccattgtcaataacttcaaattatctatgatttattcattagcctcaattttctattggtatttattttctctctatattttataatatatttcttagtagattactaattattgtcaatattctatctactttattttttttatgtatatatataatatatattctaaatctttctctcactcatcaaaatatttcttaataatttggaggcctacatactttttttatgtcgacaacttcaagaccgtcgataacttcaaattattcatgatttgtttattagcataaattatttgatgtagataaggttaattttttttaataataggctcttgacattcataaaaagtacttataaataggctattgaaataaagttgaggacgtaggttattaaatgtatattatatgtcaaatatatatatatatatatatataaaagtagtaaaatatatatataaaagtagtaaaatagttacttgagaaaatattatatgaaaatacttaaaattgatttagttttataatttaattatc

SEQ ID NO: 67576 - DNA, 658 bp, Cannabis sativa
  modified_base (409)..(415): a, c, t, g, unknown or other
gcatactctacgtgctaatcactgacttacctgttgtctagctatagatagagaatccgaatccccaggtgctcctgatgaggtgccggtaatcctagtcacacaaatttgggatatttcacacttagggttaacccctgattccatactcataaaattcaatcatgggaattaaaattcagataatcatatagagctcggaacgagctttccaacgatataaagaactcccaaatcggagttcagaatcaaaagttatgcatattcgaaattcaagtcgaatctgcccaaaaatacgagggcgggccgcggcatccccaaaccatgtcgcggcacctgggacaaaacccaggttccaccgaaatggggggaggggagggggggcgcggcatgctccagagcatgccgnnnnnnntgggtgcagaacccagaaaccagccaagaacatcacgattttcagcaacgaaaaccaaactttacatctctaaaactcaaccaaacactccaatcaccaaaaattattgctagcaatcaacaaggaattaaaactcatgtttcaaacaccaatttccagcaataaactcaagatttcagattgtacaaccactcaaaaatcatactcaaaatcacaacgtcaagttcacaaacttgagcttaa

SEQ ID NO: 67577 - DNA, 1963 bp, Cannabis sativa
taggtaggagattgtaaatttggtgtaaaaaataataacatttactagttatataaatttttattataattattaaattaaaatacatgacattttatatttatatatatatacctttgaaaatggatatttaattacaaaatgatacatgaaatttaaaaaataattaaaaagctaatcttaaacagtcaagacaaatgaaaaataaaaatgtaaacattataccatttttttttcttttataaatcagagagttgatatattgcctccaaaaccttttttaattacatcttatttgactctctttacaattgtatctaccatggataacacttatcattctacaagttttcatttctattcaactatagcctgtatacaagggatgcacaagcaaccatcataaccatgcgcctgcgcctcttgttacctttcctcaaacaagccatatcctaacacaagtgtaatatctgttgcttttgctttccaatccaaccaagtttttatttcaatcaaacatctcatgctaattaagttcacaagcaagaacatgttcaaaggttagcacataccaaacattttgtatcagctatattaaatcgacccaatcttgtctttgtgtgcagctagctgttgtagtatcaaccataaaataaaattgtgtttaggaacattcattcgactccaatataccatggtagcccaataaactttggtttgcattcctaatagtagctgatagcattgtttaaagctatagaaatcgctcatgaatagttggtattgaaaatatttttaatttggtcttttacaaccaaaatgcatttccaatacaactcccccaatttatccttacatatacatattttagtttagtataatgtaatgatactggtaataataattaaatttaataataatagtaagatatatttatgatgttcgatttgtttgtttgaatattagaataagtgattaattgataaaattgttctcactttaattttcatatgtatataaaaaaaatatttgagtcattttagttttattttatgaggatgtcaatctcctattacaattttttagtcaattttcacgttcaaaaatagttggaatatttttttaaattttttttcatagcggtatttgttatatctacaacattatccctgttaatttttgaaaatttttaaataatttatagtgtcaaaaatacgttaggcacccgataattggttagcactttccatatgtggcactcgataattggtagtgatattgcctaaaagctatattcttaaattatataaaatctgatacttaattacactaataatctatgataccaaaaatatgttaggcaacagaacagtagtactttttaaccattctctttatatactatcaaatttgaagatcatggagcggctttagggatactttgaaaattagataacaaactttgatatcgtgagagctaaatccaaccattatatatcaaaggtcttctacttaattaataacttattaataaccgtgacacaccctcaaccaaccaatattgtttggagaagaaaaaccaaccaacaaattaataaataaccaaaaaaatcattaaccacgtgtagtttgaattaataatatttagaaaacaataagataattgggctattaataaaatcattgaaattaatataattataaaaaatttgttatctagaagattatgaaaaaaaaattattagagataatttatgagaaaatttgactaaaatcattcaattatttgaaagaagaataatttattttaaatatgaataattacattatgttatgataaacaaaatgataaataataatagtaataatgatttttttatttttacattttaaaatagttttattttgatatttttatagaatttcacataaaaatatttataacaactaacagagcaattta

SEQ ID NO: 67578 - DNA, 1046 bp, Cannabis sativa
aaatcttgtaaatagctaggtggtttggaaattcttgtagatcttcttggtaaaaccgtaggttgagatggtgaattcgactgttgctggattggggaaggatctgcaatgaattcctgctggtttggagttgcagactattctgtaataggtgtttcttgagtggaatcaagtgtatcctgcaaaaaggggttaggagaaatagtactagtgtctggtgggagataatctgcgatgtgtgtgtcagtaacatgtgtagtgggaagaataagtggtgtgaaagggtcaatgatatgaggattagtattaagtttgtgaaatgggtatacattttcgtgaaaaaccccattccttgaaacaaatatttgtttagtgtttaagtcatacaatttataccctttgataccacgcggatagccaagaaatacacaggttcttgctcttggttcgaatttggttttgtgtgaggtgatagttgaagcaaacgccaaacaaccaaaacatttgagatcagtataatcgggtttcttaccaaataatatttcataaggtgttcgtttttgtaggttcggtgtaggcgtgcgattaattaagaagacagccgttaacaagcactcaatccagtatttgataggaactttggactggaaaaataaagatctagcaacattgaggaggtgctgatgttttcgctcagcaacagcgttttgttcgggggtttcaatgcaagtaaaatcatgcaagatcccatgtttagcaaacaattctttgaaagtaagctcaggagcattatcagacctgaattgtttaaaaatgcaattgtattgagtttgcaaataagaaataaactccggtattattgaaagcacatcagatttttgtttgaggagataaacccaagtgaatctcgagtggtcatcaactaaagtcaaaaaatatctgtggttagtgtaagaagcaacatgataaggaccccaaatatcacagtgtataagatcaaaacaatgagaagtaaagtttgcattattaggaaaggggagccttct

SEQ ID NO: 67579 - DNA, 1688 bp, Cannabis sativa
tactaaaattatttatcactaatagatgactttttcttttctcaaaaaaaaaaaagtatatacaaagtattaaatagacatatttgtttgtaaatgggagatatttctttttataatttcataattaattaaaggttattttggtaattcaatagtgaaaagcccatgaacattctcatttttattaaggttatagataaaccaattatttttcatgttaaatatataccttgaaaaataaaattaaaaaaatttaataaaaatagtacaattaattaaaaaaataaataattataaactctgattaaatcatagtttcgaaccaatatttaaaaaaccgttatactaatttagttcaaaaaaatataaaaaaccgaaccaaaccaattgtgtcatttgccactactactagagagcacgcatctactgagtcgactagccccacactcccactatacaattgtgttgttgagcataaatgtctagaattttctgttattaaatttaatgcatccaaacacataaatgtcatagtaatggagacaaagggtgtctatcctatcttcattcatggttcattttcattcttaggaaccaaaactcaaaagcttttataagagtatcaaaatgagtcatcaatggcttctaacaccatttaatacttaattagattcaaaaagaaaaaagaaacgaatatacttcatttccccacatagagtttctaaaaacccaatacaatttattcaagtacctccaatccacatcataacatagaaacaaagcatcaacagactctcatttacaaatacttttttcaaaaagtattaacacagctttaccacactaaaatgataaagaaattttattcaaaggcattatcaccactaccatggttttataagtctgaagcataatgagttttaatggtgtccatgcttgaccacagtaactgggcatgagccattattcaccacatagttactaacactcccaaggacaaccctgttcaaaacaaacaccaccaaattcaattaatctgaaaaagagagcacctactagactacttatatgatgaaaaaagtaggaatatatataggtgaacaggactagagttaagaaagtctaaaaaggtatcacatcattgttcaaataaaagcaaattagcacttgattacgtatattatagtcaagtcaactaaaaccataggctaataaaaagaaagggcacaaaagtacaaagagaatacaatacagagtttggaggagaattgagttttagttgttcctaatacctctaaagttaatttatgattaggtggttatactctttaaaagttattacattaaattatataaaacccgatacttagatggttatactctttaaaagttattacattaaattatataaaacccgatacttagatggaccgataacaatagaagagtgccacccaccgtcagtctccgtatccaaaaatacatgccaaaatatttttttttataacagtgctcgttatgcttacaacatcattcttccaaaatttcgaaaaatttcaaataatttacagtacaaaaaatacgtttgaagtttcctaaacacgtagtgtaaattggaatatcaaaaactcaattgttatatacaaaaattttcaaaaatttaatttttacatgtaattttagacata

SEQ ID NO: 67580 - DNA, 838 bp, Cannabis sativa
aaaaactacaaaattttaaaaatagaataaaaaaaatctaagatgccacctaaatttattttgtgctttcctttatattatatataaattagaaaacatataaaattttaataataattaaaaaatttatatatttagtaacattgatatatataatttgttacgttttaaaatatatataatagtaaattaattatgttatttaatgagttatttttaaatagtttatcttaattttatattagattgtttaattataattttgttattttataagttagtgtaattttttttttgttaagaaatttaaattttatgttatgcttatttatattaatatataattatagtatttttgaagaatattatactattagagtgcttttagaagtacaagtgccaaaaataatgtgaaagagaaataaaataatatattatatttttagatgatgtgaaaggatgttacattgaagatgctctaactaatactagagacacacttaaactatatacaatttttacacataataatgtgtatttaattttaactatatggtgtcatattacttttaattatatgattgagattaattacacattattatgtataagttcgatatagtttgagtttgttacaatcattattcattaataattttcttatgcactaccgaaggagagtttttagttgaaagaaatttctcattatttaacaacccatatattatttgactctcgacaataatattgattatctataactactataaaagtgagaatcttgttttgggcttccacatattaaattactagaaagtcctcacttctcacctttaat

SEQ ID NO: 67581 - DNA, 1088 bp, Cannabis sativa
  modified_base (54)..(54): a, c, t, g, unknown or other
ggttcgagtctaggttcgtatccaaatccctatctagctttaagtctgggtctnggatcaagtcccaagtctaggtctgggtctaggtctcggtcttggtgtgggtacacaactgtgtctgggcccgagtttcggtctcagtttggttctggggctaggttcgagttcaaatctaggtttgagtccggatccttgtcactatcctagtcttgttcgagggtcctagtctggcagttcttgttaaggttcccgttttggggtcccgagtctgggtcagggtcccggtttgggtcctggtctgggtttgggtcatggtctgagttccaaatctggatccctgtcacgtgtctcgttctggttctggttctggttcaggtccccagtcccaggtccgagtttgggttcgggaccgagactggggtgcgattctaggtcccggccccatttttgtgtccttagtctggttccatgtttggttctgagttcgagtccaggttcagcaccgagtccagatttgggttgagatccaagtctggctcttagttcaggtctagttctgggttggagtctaggtcctggtccggctatggttccaggtctaggtccaagtctggtaacggttctaggtccaggtcgatgtcttggttccggtcctgttcttgggtcccggtctactttcgatttttgttccaatttcgagtcatagggtacaggttaaggtccaggtttggatctgggactgggttcgggtccgggtctaggttcgggtcttgatctaggttcaggtccgtggctggttcccagatccagagactgactacaggttaggtccaggccctgggtcccagtctagttccattttgggtgccaggtcatgagctgggtctaggttcaattccgtgtctggggtcgggtcttaggtcacggtcatagtttcgttcctaggtccctatcctaattttgggtacaggtcctccttctggtctggatttgggtcccggtctaggttcgggttgggtcctagtcccagtttgggtttgggtctcagtttgggtttttatttcggtttgggttcaagtcttggtcct

SEQ ID NO: 67582 - DNA, 1122 bp, Cannabis sativa
  modified_base (748)..(762): a, c, t, g, unknown or other
ggattttaaacttggaagctcattgatctcacttgaatatgttaggtatatgacataaatgctcaaccaacttgaatgtttgagtgaaaatcgagtttatatagtgttggggtgaaatgtagacatttatagacgttatcatgcatttcaaggagaattttgtagtaaactggaattctagatgggaactggaattttggattgacaaccgaaattttggattccaatcagaattccagatggcttatagtggcaaattttgcatttttttgaattaaaacgtgcataactgtttactcgattacccgattttagaaatttcaagtttgttctcttagttaaatgatatgtaatttaaaaggtcaataaaaaaaattgaactatcgggtgagaaaacttgtcgatcaagttagtgagtggaccaaaatttgaacttataaatcctattatactatgcaaatcactttaacaagactaaagtacatttatacaatttaattttgagtagtcttgatgtagatgaactttctagctttatttgtgtcatttgatcaaaagttgactttttttcgagagttgactttgactgttgcattgactttttactttgagcttttgaagtgctcttttgaatagggtcttttgctcttaatcccttgatgaatcttttgctcttatcaattatgaagtatttattttaccttttaattgtgctacaaaatcaacaaatcttttttttttttttttnnnnnnnnnnnnnnntttattcaaaaacaagcaagaacacacaaaggcacatggccgaactaacaaaaccggcggcagctgcttcagccagcagccctacaccaaacaactaccacctattaattacattgagtaaataattgttcttttggcaatctttaaaaggccccatactcaagattctcaactgaacctctttcctaatatagctcaaacaactaggagcagtgcaacacaaatcataaatgcatctattcctattcttccaaagattatacacagtagcagccaaaattgcattaatgatacctttggaagctctttgccacgtttctacatctttccatcaagtcctcaatagaattaggccattga

SEQ ID NO: 67583 - DNA, 557 bp, Cannabis sativa
tttggtagcaagaaaagttaatttcattaagatacgtttaatttcaaaataaaaattactcatcatttaaataagaaaaaatgatgtacaaatataatttacactgaggtaatagcagaacctatattattatataaatgaatgcacattattactgttaaatgagatatggtacagtaaagatatctcagctagtacactttttattcactgataaatttctcagaaaaatttgaaatttgacaaaaaagttacaaaataaatagtataaattacagtctacaatgaattaaaaaaatgaataactctcaggccatcaacaagaacacactgatgggatgatcggaagatgaagccctgcaacaaagaaaaacatatatgtatatataaacccataataatagaattatcaaactgaaatctaaacaactgccaaaacttagtacagtcaacaaaatataaacatacagaaaagtcattgctaaaactttgaaaaacagtaaaacttgtttgcaaagcttaaaattttgaaaaaaaaaaaaaatcattatgacaca

SEQ ID NO: 67584 - DNA, 804 bp, Cannabis sativa
tccacttcaaccaagccttactcgctaagcaagcccggcgaatcctcaagcagccaaactcaacggtgtcaaaaatcttgtcagctagatattttcctcactcatcctttctggatagctcgactgggcactctccctcttttgtatggcgtagcatttgctggggaaaagagttgttgcacaaaggtttaatttccaaaattggtaatgggcagaacactttcacgactcgcgatcattggatcccgggtctccgtcaggttcccaccctttcccctgtccctgacaaagttgcctcgttcattttgccttcttcatcttgggacttaattagcttgcaaagatgctttccgcctcatgtggttgagcagatcctctccattccccttcccctcaacccttgccccgatgagtacatttgggaatattcccaatctggtatctattctgccaaatcaggttaccatgtcagcctgtcttcctcaccccctccggatatcccctcctcctctaatccctctccttggtggaaaaatttgtggcatctttcccttcctgccaaagtaaaacattttgctttccgtgccacaaactccaccctccctacagccaaaaacctagctcataggaaaatcatcccttcctcgggttgtgaccgttgtggaggaatggaagagtcagtctctcatgcattgttttattgtcggagcattaaaagagtctggaaaggtacgcaattttatccttacatttttgctaattctttagaaatattatttcatgatgtcgttgatatgatttaca

SEQ ID NO: 67585 - DNA, 834 bp, Cannabis sativa
ctaacacctctaaccatttaagtccaagcccaacacttctatggcacaaaaccaaatatcaaggataatttcaaaaaaatacaaacacaaccaaaaatattataaaaatagagttgtatgaaatttttaatatttttataattctttagattttatttatataaaatatggtatttttaagtatttttatattgtactattgttattttattgttaattttttgttatttgtatattatttttttatgttgttttttcttgtgattttttttcattataactatatttttaagtttaataaaaagaaaacatatatctttacaaattcgtactttaaaaaccataaaaacaaaaattctccccccaaaaaattgtatcaaatccaatcatcaaccaacgccaagtccatcgatcttcccattttgttgctattttttttatttggacaaagaaattgttgatggaagcaagagtgatcccatcaaaattgaagtgccgacaattgatatgagttattggctacgcaaaccccaaatttggcacttgtcttcagtgtcttctttagtgaccatttcttctttcaaaaagtctgcatatgcacttgagtttctttaaatatatttctttctaacattgccaactgagaaggaattagatgaagatggactcttcgtacttcaatggttgatttataccaccactatgtttacatttgatttataccacttttttagtaacccacgctcttatattttacaataaacttgaaaaaaggtggtacaaatagctaataatcatttgggtagtatgattcatcatctcatttagaaaaaa

SEQ ID NO: 67586 - DNA, 775 bp, Cannabis sativa
aggttgaacttttcttattttcttaattttttcttaattaattctaagtgaataatacacctaaactcacttactttagcacatactaaatggctaggtgtcaagctctaacacagccaccaaaactcaataacaaaatgaccaaaatgcccttggcccataaacttaagccaaaataagcctaggggtaaaatagtccaaaaccacaaccccgctcaaacctggtattctattgatctcaaatatttatcccactaagaaaaaggttctagacttacctatgtgaacctaatggccatccatcgcattttccgtcatcgtcgagcaaaaatcataaaaattacatacttcatctataatacaaatattacctctagagtttaataaaatttccgaaattgagaaattataactctaatgcccacttctaataatgagacccacaactaaataaattcatgaataattataaaaatatcaataattagcgctaattgcctttattaatcatattcttaaatgtgaacattacacgcaacatgagggcaatcctttcgaaaactgcaagttcaaaatatcaaggtggaaaggttctaggtcatcatttgaattggggctgaacatcgggcgagttgactgggtttcgggttcaaaaaattgtacccggacccgatctatgaaacggtttgggttcgcgagtttcgggctcgcgggttcgcgttgctgggtcaactcgggtcaacgggtgacccagtcaactctttttttttttttt

SEQ ID NO: 67587 - DNA, 741 bp, Cannabis sativa
gcatgcactgtgtttagacacagtgcatgtggtgtctcctttgtcttgcttaggacaaagaatgtgcattttatcttgataatttttattttttttcctatttaattaatttgaaaataaattatttattacgaaaataaataattactattttgataattcaaaatagattttttttttaattttcatatacaacttttatctcagtccttgacagtatttcaaggtgtcgatccgggaactatggacctataattctatgctccagtaaattaaatttatttatcgaatctcattaatcaaataatctcatttattaattctacgattatgctactacaaatatggaattgaactcttactaattatagacctatatctactacgttttactatagtgtctattgatataattaattccagtgattaaccctccttgtgtcgtttcgtgattagtttttgttaaattactattttacccttgcaattacttctttattcttcagtactgttaattcactagtgaaagtataatttagatcaaatctaaatttgtgcacaacttttcagtttgagaggtaacacataaagggaactaacattctatccgttaggaaagttaaaattccataattgtagatcatgctcccaaccatccacattattagattcctaaaaagaaattgtaagaatcatcttctctgagaaactttaacaagtgaattaaataaactaataaca

SEQ ID NO: 67588 - DNA, 1353 bp, Cannabis sativa
gcagaaaattcaaatctaagtgagtgcaccatgcatgtatgtacctaccttaaaattttactggggcttatgagtattataccacctcctgagccttcgcttttggaggctcaatcaacatataaagtcacttccttcaccgtctggtacgtcaggatcaactttttcttctatgagtgctacctcagtgcttggaaactcgagtatgaaatctgcaagggcctgccccttgatcgcagatttcagcttgtacctgatgtcgaactgactcagctctaccgatcattttaacaatcttcctgagacttctggttttgccaaaactttcctcaaagggtagtttgttaaaacttcgatgttatgagcttggacataaggaaacaatttttttgacgctattaccagggcaaatgccgatttctacatctgcggattacaagtttcagcgtctaagagacgcttactaacataatacactggatactattttccttggtcttcgcggattagtactgaactaatcgcgtattcgaacactgtgaggtagatggataagatctctccgggcatcggttttgaaaggaataggggttgccccaaatgcgacttgagagcttgaaaagtctcttcacacttttcagtccactgaaacttcttattgccttttaaaatttgaaaaaattattttcacttattagaggaacgtaatataaagcgatttaaagcaacgactttacctgtaaggatttggacctcctttggtttggtcggagatcgcatttccaccaaagctttaactctcacgggattagcttcaattcctcgctggttcaccataaacccgaggaattttcctgattcgacaccaaagacacacttgagaggagtacctcgcattttgtatcatcgcagtatctcgaacattgcttgcaagtgggtgatatggtcctttgcatgttgagattttacgagcatatcgtcaacatacacttccatggtttcaccaattagatctgagaacatcatatttaccaatctctgatatgttgctcctgcatttatcaatccaaaaggcataaccttgtaacaatacaaacctcgatctgtaataaaagaggtatgttcctggtctggttcatacatcagaatctggttatatcctgagtatgcgtcagtaaaattgagaagttcatgacatgcagtggcatcgacaagttggtcaatgctaggaagcggaaaactgtcctttcgacaagctttgtttaaattagtgaaatcaacgcatgtgcgcaatgagccattaggcttgggcacgagtacgggatttgctaaccagtttgggtagaatgactc

SEQ ID NO: 67589 - DNA, 1760 bp, Cannabis sativa
ttcggtaagagtttacatgctcatatgatcaaaaccgaaatggaaatagatacttctcttggaaatgcactcttaagtatgtatgctgaattaaactgtgtcaagactgcccaaaatgttttcaaagagatgacaggtccagatgttgtctcgtggaacactttaattatggcattggcttgcaacggactgagaggtgaagcttggaatctttttgaggcgatgcaagctttgaaaatcgaactcaactcacacacaatcatatctatcatggctgcttgtgatgatgaaatctatctaaatattgggagagcaattcatggttttgtgataaaacgaggtatcgaaatcgacctatcactgaatactgcattgacagatatgtacatgaattgtggcgatgaagcaacagctatgaatctattcgaaagttatcctaataaggatgtgatctcatggaatgccataattgctagccttgtgaaaaacaaccaaggtgagaaagctcacttacttttcagtcatatgatatcagaagttgaacctaacgatgtcacgattataaacatgctttcttcatttacacatcttgcggctctcactcgaggccaatgctttcatgcttatgcaacgaggagacaattctctttcgacaacaatttgtctcttgcaaatgcatttgtgacaatgtatgcaagatgtggtagtatgcaaaatgctgagaaagtcttcaaaattttaccgaggagaaatatcgttacatggaatgccttgatagctggctatgctacgcatggtcgtggacatgacgctattcaggcattgttaaagatgatagaagatggtttgagcccaaatgctgcaactttcactgctgttctatctgcttgcagacattgtggatttgtagagaaagggttgttgctttttcatacaatggttcatgatttcaagataaatcccgagcttgttcactatggttgtgtggttgatcttctttgtcgtggaggtcggttaaatgaagctagagaatttatcgaatccatgcctatcgaaccagatgcatccctatggagggctttgctcagtgcttgtcggctcaattgtaacataaagctagctgcaaatatctttgacaaactggttgaattagaacccatgaatgctggaaattacatattgttatctaatatctatgctgcagcaggtctttggctagaagtgaggaagataaggttgttgctccaagaaaagggattgaaaaagtcccccggattaagctggattgttgttcaaaatcaagtacactctttctcggctggcgatacatcacatcctttgtcagaaaaaatctatgcaaatctgtgttctttaacaaacttaatcagagaaagtggatatactcctgattttggatgggttttatatgaagaagaagaggattaatttcaacaatctctatttaggcctaactcaaaggcttagcaaatcagactaaaacctttcttgttgttaaagattccacacataccgaatgatcactatgatcacggcttgctcgaggaacgaacaagaaagtctcaaatcccatatcggggaaggcatctctcgaaaagaggcgatcccaatggaaggatatcttgatacactacatcatcagccttcctaataggattgcgagatgtctcgatggatgaccccgcgtaaatggtatgcaataaacacgtttcgcgtgtgccatacgagaagggaagggtgat

SEQ ID NO: 67590 - DNA, 766 bp, Cannabis sativa
tttaaaaaaaaatatatttaatatagtgacactttttgtgtgtcactatatctccaaaaatattaataaaatagaaaaaaaggatctagtgacacttcatgtgtgtagctgttactttttcagtctgacaaaaccttactctatacgcctatagggacacgcaaaaaatgagtgcaaaaggtttcagtgacacgtgtgaagtgtcactaaaaactatctttccagtcaccctcattagtgacgcgcattgaagtgtcactatatacttttagagttactctatgtgtctcactaaaactcaattttctagtagtggaactgcaccgttaatataaaatcacaataacacgcctaaactagtaagggcgttataattcagtattagagtttccatgttatcttctaaagattatcatgacatgtacaatcatcatcagagatgagctcgactcacagttcactaagcctttattgctttaataattttttttatttgtatgtgataagaaaagactactaggaagcatgttagtagcctgatagctgtatgggtgcatgtttttatttctaaaataaggggtaataagtaaattattcttgatcgcgatctgaccaggctagctctttgttttggaggatgttctattagaatggacgctaggcaaattacgaggagcgaaggtaactcggtcggatcccgtggcggtcaaggagtttagttttgcccaaatatacgtggccgaggtagaggcccaagaggcagggc

SEQ ID NO: 67591 - DNA, 1126 bp, Cannabis sativa
cgacgccgcacaagggggtcgggggtgtcgccggcgttaaggtttgctagtgaaaaagaagaagaaaagaaaaaggaaaggaaaaaaaagaaaataaaaaaataatctttttataatttatttatttttataatttttaaattattttcaaaaaaaaaaagaaaaagaaaaagaaaaaaaaagtaaaaaaaaatatatatttttttttttttgaatttttgaattttttaaaaaaatagttattattttttaaaattaatattatgtggaccacttaaaatttccatgtgtacaagtgtgtacacttggacagtccaccgtggcacttaattgtgatttttggacgaagaagtacagagcaaaacaggagttcagtaggttttgccaccaaaatttaatttttgtgattaagtgttacaaaatgtaacatttaagtttagcagccaatattcctttaattgttgtttttaaaggattggctaattaggatttttgcccctgaactttgacatgtaccaactcatgccccttaaacttttaaggtcgttaaaaatggcccttgaacattttttttttttgaacagactgaattttattacataaaccaaaccagaacaaaacagcccagccaaaccggctgcacaaaaagacaacacagtaggtcatcaactctctgccgtgacccttacatactgccctgccttgttgtctcttttatctataaaacacaaaattctatatttaatcaactgtttaatcatcaagctaacactacccacagtcatacatttagattcaaaaacacaaagatttctattccaccacacgaagtacaacactgttgccaaaacaacattctgaagttgatttctcaaagtgaaagcagcttttggggtccctttttgaagctccgagatgtcctttggccactggaagttaccaaaccaacggttagttgcagctctttgtgtaaaggcagtccacaaacagatggtcatgtgtctcaatctcattttcacaaactggacaaagatccgaagcaacactcatcaatttcctcaagttatctctagttaagagatgattattgcacacttgccagtagatgaatctatgcttgggcata

SEQ ID NO: 67592 - DNA, 596 bp, Cannabis sativa
attatcctcacacaattaatatcccaaggagagaaaaaaaaaattaaatactattttaatctggatattacatgtgggtaaccaatcacaatttaaattcgacctccataatttagtactgctgcaaccgttccttcatctggctcttaaaatttcgttactctgtcagaacagtttcaaaagtttcttgctactcaccttctacatggattttggactctggtgcttcacacaatatgtctctgcattttgcatcttttatgtatttgagtcacacatcatctttgcctgtcatgagtgctaatggtactcccattcaattgtgtgattatagttattcaatattctttttcttctacttcatttcatttggatgatccgcagtctcagaagttgattaaaatcggtcgtaagcaggaggattatatattttggatgaactgagattactatatgcaactcttagtgttgatttgtctttttttcgtttgtctcatttgtcttctagtttttatttgtggcactctcgttttggtcatatttcttgtttaaaagttttagcttatcttaggaaatttacaacatcatgatattga

SEQ ID NO: 67593 - DNA, 1378 bp, Cannabis sativa
tacaaaatggccaaacttaaaattgccatatttatgtaaaaatatttcaaaatcccatattaggtgtaattttcacttttttttacaccgcataaatgaaatttcttatttcttttttatttattgtggcgtgaatttttttaaaaaaatactgtattttttaaaaaatatagttgttccactattgttttttagatgttccactgttatttttaattgttttgttttgttgctttacaattgttttataaaaagatagtatttttgtaaaaatttccctgtgatagtaaaattgtaaacttttacccaaaatctagtatttttgtaaaatctccttgaataaccttaggcaaaattaacagcaaattacattatatacccactttactttacttgttttaatttttacctttacgcctaaaatttttaagatatactcacttttatagatgatgttcctattataccccttaggttgatgtaaattatgtgttgaacttaagtggagggtgaatgcatattaggcaacccactcataaaagttggtacttcttaatgaaataaaatatgagggtatttttaattaatagatacaaaaaagacgtattcttcaacttataccaaaaattaatagggtcgaaattgggttgagcaatacgtatcccgttgaacttaacccgacccactactacatagaataaaataaaattaaaaaaaaaaaattacctactcacaatttattttagcccagcccactagccaataccccatactgcacttgaaaaagaagaaattaccctacatacctcttttaaattaatgtcttcaatttttactcctatttcaaaatcgattatatttactttttttttttaatcattctaccaattttacacctatcattttacgatagtcttcattcttctctaaccaaaattatgctccaacttttgtacaaactcacatatccatctccaaagaacacaatttattatgtttgaaattgtatcttgtttatatgaaagtgtgagggtaatttgggtacaatactcataaaaggaggtatatttgaattaaattttatttgaatgtaaatttagttaatgtatataaaaagggtatttttcaacttctccccttgaaaaacacaaagaaaaccttaccaaagcctcctcgtttttcttctctctctcaaatgaaaaataaaaccaacgtctttacctctatctctctcctccctcacttctctctctctttctctctctcattccaccacactgaccttggcaccactccagactcatcactaagcgaaggctacgacagaccatttcattgctccttcctctctcccgcaccattgcaccaggcatcgccg

SEQ ID NO: 67594 - DNA, 900 bp, Cannabis sativa
tggaggcttgaagcggggacgttacacttatagtttttagccataaatattgtagtgaaatttatcgtaattttttgtaatggcttgaaatataattctgaactctaggcctagtataaactctacaatatacacctacgagatgtatcctcaaaacaataaaagttctctacgatacaatggtaatcttaaggacataatcaaattttgatttacgtgaatctacatagccaatggagtacattggaatctcattggttaactacatttctaaaatgtcagtttatctcaataaaatatgtatgagcatactatttagtatcttaaagatacatcatcgcttataataaaaaatataaagtggtcttaactttagttattctgattttgcttaacaattatgaaacaaataaaatgtaaagtcttattcagactattctaaaaatagaagtcaatgaatgttcttaatttattctcattccacataattttacagatgttggtttgaattgaatttatcacactttatgataaaaagaatatgagatgaataatacataaattacttagtgaagtcttgaaataagatttcagctaggaagaccaacaattttacagtggatagtaatggtatgttacggcttatgaatcgtgtttgtgttcctatggatgatgatatcaagagaaaaattttgagtgagtctcatacaaatccttactctgttcacatgatatcaagagaaaaattttgagtgagtctcatacaaatccttactctgttcaccatgaacaactaaaatgtatcaagatctcaaatgtatgtactggtggcctggaatgaagaacaatatagatgaatatgtcacaaagtgtttaacatgttagcaagtgaaagctgaa

SEQ ID NO: 67595 - DNA, 1348 bp, Cannabis sativa
ttctgctactaattcagttctttatacagtaatttgaaagtttatatatttatttatgtagaagatcaaaaaggaagccgtcgacaggagacttgcggcatcaagaacagtgtcggtgggtggcaacagcaccatggggaggaggcttccacttttgtcactcaacaatcgacaagatacttcttcgaatgctgtaaatactactgtcgtcgagggatcagatactgcaactgttgttgatttcacaaaggatgaagttcaggccttgctatatgagaagttcaaatcaaccaaagtttgatatcaaggtttgtttaaattaatattccttaaaatcttcttcatatatgattgattttctgtttgaaatatattgttttgatttggttattttcttgtgtaggtagggattaatgccatatttgggtttgacaagcatctgagttctcacctcagtgtttgaacatcttattactcaagtaagtacaacaacataataatatttgttaactcatgtcatgcacatcatatgtgtttttatccattttgatattgttctttctctatgaatgttgtctctgaggttttggacttaagttttgtattataactaattgctagtttggtctgatttggttttgaacttaacatggagtactctgcattttgcagcctgcagcaatgcgaaagagaaaagcttcacaagagcctgggcaaccatcacaagaggcggctgcttgaccctaagtttttaatgaataattattttatttttatctataattaacattaaatagatataattaaaaaatatttttattttaacagtgtaatttaattaacaggaatatgagtacatattactctacaaagctaaacacagtctaaacatttctttacaattatattctcctttataatatttttataatcaaattgttttcaacatctcctaccaactctcccaagtcactgcatttgattttctaaattggtctctttttttttttggagaaagacatcaaaaatttataaataatatttgtttatttttcatgcagactttaacactatatttagatcttgtctaagaaatggcctttatgggtggcatataactaaaaggcctatagtagatcataacttctgactgtctattcacataccaataaaaatgatatttttataataattggatgaaaaatatactatttctaaattttgaaatctttttatgcagaaaatgtagttctttaaaaactcgtttgtaacgtcgtattaggtcgtattgtattgtattatattgaattgtattatatatcatatttttatataatactatgttaaa

SEQ ID NO: 67596 - DNA, 810 bp, Cannabis sativa
taaattaaaatttaacataatattatataaaaaatatgatatacaatacaatacaatacaatacaacttaataaaacgtaccaaacgagctctaaaatgctagtcattcttttttgtaaatgactatttgatttttatttgttgataaggtgttagttaaatgccacatgctcaatacatgcttcccaagaaatttatatctcctattttgtttttaggaaagataaaattaataaaccatttttctaacttatatgatttacatgctattttacaataaatagtttaaatttttaaaaattaacataattaatgtctaataaaatatcactgtcttatgagaacaaactaagtgttcctattataaaaattttctgtatatgtaaaaaattatatagatttatttatactggtagaataataaatataatattaaagagtgattttaaataattataacatatattatcattaaaaaaatgaaattaaaaaactgtcataaatgcggaaacatacaaaaagaaatttaatcataactgctaggtgtcctattgaattagagaaatgttaaagggcaccaatggtgactaacaccttttattggtccaactaagtatagtgtcccatataatttaatataatagtttttaaagagtatcaatagtcaatcgcaacgcaacttatcgataagattctaggcagatgtctaatagcaatgctgattaaattatcctacaatttatttaattaagccaaattattattaacagctttgaagtacttcctgaaattctatatattctagtaaag

SEQ ID NO: 67597 - DNA, 625 bp, Cannabis sativa
gcagattaagcctgtccttaggactcacccaagtctaattttttttttctcattttaaaattatacatttttttattaattttaaaaaatactaatttgtcaaaaatattttttttctatagctcacttaatttcattagcatttgtcttatatattaatgtgtttaattaattggtgttgttaatgtaggtgaatggtggaagaaggatattctagaagtgcttgaggaatttgttgtgagtggtggtcaacccaatgtttctgatgctttcaccattaatggtcagcctggagatttctacaattgttcaaaaccaggtaattaattagttacaaattaattatatataattatttgtttatataattaaattaattttcttaaaataatataaaatattatggatcgtgatcacgtcactattataatgtgaaaactatatatacattgaatattgttatgatgaataaaaataaaaggaaaattatatactatatttacaaagaggaaatatatagcctaatttcttttcatttttacacatttttttctaaaagaaaaaacaaatacaattgtcaattgtaaccttttttttttttgggcagcttttttctagtttagct

SEQ ID NO: 67598 - DNA, 757 bp, Cannabis sativa
tagtgaagtaggttttgcaaatacatgtactgcggtcggatgggtggagaaattttgtattatttatgttattttatttgttccgtattgttatatttgttttgtttgttactttaggcacttttaaaatttttgggaacatccaattacagccgttatgttgccaaaatttcggtagaattagaataaattttactaaaaaaacataaatgttaaaagaaaagtacatagcataaataactagttaattattcgctagctgtaagaaattaggtgacataacacatttatataaacttttcaattataaatgacaaaccaaacaaatgaatggattcactttagaaaaaaatcattccaattctaccaacattccaatgagctaaacactatcctagttagttaattaaaacttttacaacttatacaacttaataacatgaaccaaactaaaataagaattttagtaatatataaactaatatttttaagacaatagataaaatttattagtttgttttgttattattaattaatatgtttaaaaaagtgattattattttttaaatatctaaattaaaaaaatatataaaaatgtgatattttagttatgagatgctaaaaggcaatcggccttcttggtatcaccattagtgtaattaagtagcagatctcatataacttaaaaaataagatttaggaaatatcgctaaccaatcgtagggtgccacctaggaaataagtagcaatgctcttt

SEQ ID NO: 67599 - DNA, 919 bp, Cannabis sativa
atagtatatgatttagatattttttattaatttatttaatatttaataattatttagtcaaaaagatatctacaaacatcatagtgaaaatgaatttgattttaaaaaaaacatcataatgaaagaaaaaaaaattagaaaacagattatcaccgtatcgcatttgataaaaaaatacaattgataattaatttaagaaaaaaaacttgtgagatgattttaaaattgatgtcatcactgtatgtcacttttagtcaccactgcattcaaaataattatagttaagaaaatattaacaattaaaaaattctcacataaaataaagatctatagaaaaaataattgataaatctataaaaaaaacttatcatatgatttaaaaattattgtcaccactatatcttagtagtattatcatcttatcttagttgtaaatatatatctatctaataagtttgttgtaaatcaaacaaataaacaatactactaaaatttttgaaaagaaataaaaactatataggaataggattgtcaatgaatatattaacttctaatatatattaaataaaaaaaaaaatctttaaaaacacatttgatatgcaaaaaaaaaaaaattgcttgatatttttttaaaaaaatcttacatatattttttgtaattataggatgatttaatttttaaaaataaaaactattatatacgatagatttatttttttttaaaaaaaaaaaaaaaaaccaaacattatttaggatattcataaaaaaaaaaaaaaattagttagaatattattatgccctcatgggtatatcttcccaatattgacattcttcacatgggtttgttgagtttggccacatagtatcactactcaacagattggttaaggttattatggacttgggatagtaagcagaa

SEQ ID NO: 67600 - DNA, 512 bp, Cannabis sativa
ttttcaacatgttgataatgagagatgttgtttattaacaactttgtgttgggccatttggagagttaggaatgagattgtttgtaacaaaaaggtttttggaatttctagtattgttgcttcggcatatgggtatcttaagtaatggataaaggctcaggcatcaaattttgagtcattacattctttttatgagattggtgatggagctgagctttggatagtaccttaatcaaacagtgtcaagataaatgtagatgcaataatttttaatgaatttcagtcatttggttttgggtttgtggctcgagatgatattgggctcttgattgaagggggtactcatttgcttcagggcaatatcaagtcaattttagcagaagcaatggggcaatagtaggtgtatcttttaattttttttttgttattggcccatgggtttagtgggctctatatcgacgcctaacccatcttagatcaagtccgaccctaacatattgttactatattta

SEQ ID NO: 67601 - DNA, 1232 bp, Cannabis sativa
  modified_base (124)..(131): a, c, t, g, unknown or other
  modified_base (791)..(793): a, c, t, g, unknown or other
  modified_base (1187)..(1187): a, c, t, g, unknown or other
acaattattcataaacatagaattgagattctaagtgtttatgtagtattaactctttgcagagttgaatatactaaagaattttgtgtcaataataaaacacatacacatacaaacattaaannnnnnnnatataattggtactggcatacacaagataaagtaaatgaagctcaattcataaatgcaattcaatttcaaaatagaaaactttattataaaattctccaaaataaaaggaattgtctgcaacaatatgaaaaatagagaataaaaatcccaaactaataattgaaatacaaattgttcttaaactaaaacaattaattcaaaaataataaaagaagatttcgagcttcatctcatcttggactatctccacccatctgtccaaccatccgattcaactcgctaagatagcatctgagttcaagcagttggatttgaaacaagaagaaaaataaataaacatggttagtaggtccaaaattaataatctaagtggataataattctctaaaacaaatcagtttatatgaaaagaaataccttgtttctttgctagaaatttaggacattggggtttccagtggcccttttcattgcaatagaagcattttccttttggtaaatcaccagcagtagcagcctttttctatttcactgttttcacagcttgaacaggcttcttgctattcttccacttcttcttgttcttgggtttggaagtagaggcaaagtttgccttagccttagccgccccattagcattcccagaattatgagctttnnntccctttttctgtggtcctccaatcaaattttcaaatgtctgaaggtcgttaaccaactcgtgaaagtcttgttccttcttattcatgaaataatttgaagtgtaaggtagaaaagctggagtcggactattcaagattagagtcacttgagttgtctgatccataacagctccatgattctgagctttctggaaataactagccatttagagaaggtgatcacgcacgttctgatgagggttcatccgtgcattgataaaattccttgtcgcttcaaagcgagattgaattgatgccatcccgaataggtcagttaactggttcatgattcttgcaggcgtgtcagtgttggcaaaccttgttttcaaggagtcaaccatgctggaaagcatnaagtatcgagctttgttgttggcattctgccaacgctcatacttc

SEQ ID NO: 67602 - DNA, 876 bp, Cannabis sativa
cttctcatcatctatgatcatcttcatcttcgaatttgaatcactatgtgtttgagtttttttgtaagtgtttaaagtgtgttttcttgaagtgaaaataactattttaaagtaatgaacatatatatatatatagagaaataattgataacctatatataataggacaagtttaaatttaaattgttctagatttttaataaactgaataattatggaaatgtgaatttaaaaattattttaattagcactttttctttattttatttttatttttattttttttcagaaattatctcactttcttttctcgatcttaaatatatatatatatatgaaatgggatcttgaaactcctctggacttgggtcagaccccaaacaaagtccaagctgccattaacaaataacaacaaacaagaaaatttcagaccaatgaccccaagggtcgaaaatttcctggcgatctgatcgacggacggcagctcctttcttctcaactctcgacgatactgcaaaacgattccccaagttgaagcccatgacagcccaaggccaggttcctctctaatcctctgtttcgtacacaacacaagccaaaaatcaaggtttttttcttcttctttattcctttgtctatctctggtttagagattattgactgattgtattcatttttttttttcagattaagagaatcactttccctttcgatctagaaactcgaactcattcaagacagaaactagaggtttaatctcctcttatcttatctcactttccatttgttcagtttgagttgttaattattttaattttagagatcaatatttgttgtttatggattcttatttgagattgtgaagttgtgtcgttg

SEQ ID NO: 67603 - DNA, 884 bp, Cannabis sativa
caacaagaacaacaactaaaacacagaaaaaccatgaatatcatacttgaactctgagaaactcaacaagaacaagctaagaaccttaccttgacttaaaaccactaaaaacttgctagaatttcatgaattaagcagcaaaaacttcaaaccctagctgggttctatggggttcaaaagagagagagcactttttctaatttcttattttgtaaaaattaaaatgaaaactaaatgttttatttaataataatcagcataaaaaatcagattgctatcttaaattaatccactaaaaacaaaaattcaaattgggcaaaaagatcatttttctcttcacatagccaaaaagtcataaaaccacttaggggtaatttggtcatttctaaaatctcgactatcccaacattctcaatgtctaactatattgtcccgctatactaaaaatactaaaatgtgattttaatagccaaacgacgcattccaatattgtcgcgcacaaaacatgcaaaaatataaaatttcatatatatacatataatgcattctgaattcaaataaatctccgtaaaataataattcataactaatatgcaagtttcataattaaaccttgtttatctggtaatttctaaattaaagttaaacagtctttatagaaacggtactttagaagagactacctagtgaagttagacataatatatttgattataattgaacccttgaagtagttttatataggtacctataaatgatatacatatttaaaaattttgtaatttaaagagttctctataagttatgtcaatatgggagaaaattatcacatatttttgtcgacaatagatgttgaatgtttgcatatgcaataaactaacatg

SEQ ID NO: 67604 - DNA, 3287 bp, Cannabis sativa
tgtgggattgcacaacttactcggtatttccccttacgaatcacgggactactgactgtcacaaatttttcataaccagaacaacttttagagatctttatatatatttggaggaactataccataacttctacctagtttcttcaaattaaaaatattgacagtgatgaaaaaatgatgcagccatcatggttggtgttctagatatcttagtatactaacttctgagattgatcaagttcaagcaatgcttgaacttatttactgcatgttaagaccttagtcccaacatcagcaggattatcttctattctgactgggccaaattataaatacttaaagatcattttatgacgagtctataaatagctaaaatattccaagaaacactagggttcctgtattctctctttctccatcagaaaaaatactttagagaaatattgtattattgaaatatcataaccttccgtacaatctctctaacaatgacttcagattaatacttccacttatatgtacgtatttattttcttttttaatttagcaaaaggtttataaaatttaggatttttttatattaaaatacttttaaaaatatatttaaatttgtgataatatatatttcttgagtgtttataacctagtgtcataagttaaagaacaaaaataattagtattctatatatataacacgttgtgtacactctttcttccgaattaacacagaatatatattaataatgtatattatagttattataattttttatctataaaatttaatgagaatttgaataatctttacattgtaaaatacaagcttcaaaataatacatgtgcacataagaaaagttttaaaatatacttgctttcgtatttttggcaaatacgttgatactacaattttatattttttaaataaccaaataagttgtttataaatgttttttacacatttataaaataaaattaatttttgatacggtaaattatttaaaattttataaaaaaaaaataatagaaaatccatataatatgcatgataaatttttgcatgtgtatatttttaattttatatataaaggtgaaaataattattttaaattttattttaaataatttaaactagatttttcaaacatttacactatattcatcatttatatgtaaatacaaaaaatatgtgttattattttttttttctaactcaaactacacatacacaagatttttttttttttttgagataaaaaactacacaagattaatatcctagctaattaaagaatgttctaaaaagtagtttttcatttaatagtactacatgcacttaatgagttttaattaataaataaataataattagcctgtatattgtctagccatgcaagagtagattaattaattaacataataataattagcatcaccactaatcactaatgttcgaatagagttagctagagagtcctagtaaaggaataatatatcaatcaataaatgtggctaaaatactatagaagatatttatatgactaactataattaatgagataacaatccagaaaaattcctctaataattaataataacagccttattagcccacacatattataaccaatctaatcattaaaaaaaaactcacaaagcaccaaaatttcattatagcttagttagatatataagtcatgttcgagtgagcttttggtttttacttctagaatcttcgaaagttgtttctgaaaaaattactcaaattaacttctgttaattttttttttaaagttaaaagttaaaactcatttattactcaaccagtaaaaaatatatttttttttaaaactttaaaatgcctaaaaacaatttttgataatctaaccaaccaacaacgcaaaatatttatttacatttgtattagatcgtgacaaaaattatgttaaatacttttaaaaaagaaatactaaaatatacatttgtcatatagttattaattttttaaaaaagttcatcaatattataaggcacatcgttaaagaaaccactcaaataaaagacgcacgttacgataaataattaggcaaattcagccactaaacacgatgcaactcaagagagaaatatagttgtgtaactaaatgagcattaatattattaacccgcttacaatgagataatattaaaaaaaagaatctcacacacaaaaaatatcatgaattataatactaaactcgtaaaaaacttattctttacaactcacacctttgtcatatcagtatatattactataattaagtatcaaatctcacataatcaaatataataattttttaataaatatcgctaatcaatcgaaaaacgatatctataattagtgttagaccaagttaaatggaacactaaaatgctaaatttgttaaaattttacaccaaattcattccaaccacactctaaaatctatcctataataacattgtctatagtgtcacactaatattagtgtgacattatagactacaccgaatatatttttattattttttaatatttaaataatatatttttaagtaaactttttgtatttatactatttgtgtttatttataatataatatttaaaaatataattttagtgtaatttttagtattatgattgaaatagaaaaaaaatttagtgttaaaattttattatttttgtattaatttaataccaaatttaatatttaccttgaagatgtccttagagaaactatctagctaggtagaatcacattagattctcaaacatcatataatgaaaataagtaggaccctataaataattataattataataataaaaggttattgattctgagtgtcaccacgttgtgtgagcaaaccatccaaaaatagtatagaacaaaaagaaagtggggtgttttatatttacacgtggcagtcacttaggttgccgacagtcactttcactaacgttcacatcaactgttttttttatttatttattaaaaaaagatagaaatttagtaaaataaaaataatttccttaaatggttcaaatttcaaccacattcaagtcttggctttctggggacaacgattgtgaccacaccacgattaattcgcaactctgctctcataattttatctacattatataacaataaaaataataaaaaaaaaaattatacataaatcatgatataacatttcaaaatataaatttatatatataatttcattttcatagtactcttacaaaacccttattattattattatt

SEQ ID NO: 67605 - DNA, 667 bp, Cannabis sativa
caataataacttgtaaatgcccatccactcgtggaggcatcaattggttctagttattatctgtttgggcagccctctaattctgatcggccttgacatagttttgcatgtgtgggttattcttcccgattaaaaattcaatttctcgcttcaggttattacattcgttcgtgtcatggtcgtagtctgcatgaaaacggcagaacatggatgtgtctattttactcacatccttcttcatgggagcgggtttcttgtatgggactgtagactgagttgttgcatatattgtctctaggtcgcctgttaggatagattcatcagtaaactttgaggcattgtccctaaggtgttgttcgaaatttctagcgaacttgcctttctttcctttgccctgcctgctgctgttattagacctcttcccattcgagtttgaacttccaggatactgtggactctgagcggacgctcctatttaggtggtacgtgggtggctcttattttgtctgatggtgtgtacacgccgaacagcttctttgagcttaataaatacattttctcggtccaaaaattcagccattgaccctacgatcaacctcttaatatccttccacaattctccaagttgctcaatgccccccagtatggctgctaggcttcctttttt

SEQ ID NO: 67606 - DNA, 792 bp, Cannabis sativa
aagtctcaaggtgtctgcccagcagtatattggttcgcgaggcataggactgagttgctagaattggccaaggacagcctgggaaaagcttcacggaggatgaagaagtatgcagacaagcataggagagacttggaattttttgtcggagatcgagtattgctgaaattcactccacagatttggaaaaaaataactgataaacggtatcacaagggcttggtccagaaatatgatggtcccttcgagattgtccggaaggtgggtgttgtagcatacaaactgaaggtaccgaaacgcttcaagctacatccaaattttcatgtcagtttcttgaagaaatttcatgaggataaagaggaaggaaggcagcaggtggtgagggctccgcctactgtgaggaaacaatttgagaagaagttgtcaaagatcttggatcatcgtactcttggagccagcaaaaacaaccagagaatcgagtacttgtttcaatgggatagtgaagacgtagtatgctacatgggaaaaagctgtgactttgtggcagtttgaagacaaggtgcggagctatatcaaaagtgtatcgacgaggacgtcgatttcttctggtagggtggtttgtgagaccctaacttgggtccgctcggcggacctcgacatcactcgatgcttagcttgtgggatagcaacatacgagttgaagtgcacctgccatggggcagtttgcagcaaccatcataggcatgcatcaatattgggggatgttagctggacttggctacgtgatggtct

SEQ ID NO: 67607 - DNA, 3345 bp, Cannabis sativa
ttttctttttttttttttttactaccccttttcagatatttgtattttgtagggtgtgccaaattattgagcagtttcaaacctagtttagtatcatatgttatgataatgtatagaatgataaaaaaacttttcaccaaatgggctagagtttaacctcatttgaggccaaaacaaagtaattgaagtccttaaaaatttcgtaacaagaatgataataatgagaacactacaaatagcataaccactatataccactcttgtgtcaatttttcttttttagtgtaacctaatagtattttacaatcatatattagttttaacttaatagcttgaaggtcttaagttcgaaccatgacctctccctttttcccatctcatccctcccactctctgtcattattagttataaataaaagcaattgaaattcctagaaagttatatagttgtgtatcgataagaccattcactgtttcttaaagctcgatctctctctctccaatgactcgtaacagggatgacaatagtgagaactatagtatagagacaatgacaaaggttatgagtgggctcttaagaaggtgtacattgcagttaaaatataagtacgaaacttacaaacagacacagtgacataacaattcttttaactaaacacatttaattaaattagaatgtcccctacttggtatctaatgtttttagtacatgtattattactgttagttgaacatagtatgagtgagtgagatagtggatagaaacgtccaattgaagagctgacaatgataaaagaggacggttactttatgttacattgataaaatggagtgtgggctagcatcagcatggaccctagtctagtctagtctttttagtagagtaaaaatcagtgtttgaaatatgaatattctgataagaaaacatcgaccattgtcttgcactcacaatagttttagtagtgactagtgagtgagtgagtgctttttctagcttattataaatctattaactaaactggtcctcctcactcctcacctcatagaatgattgaggtcacaccccaaatcccaactatccaattgaaactcatcacaatactctctacttgcttgaactttaattaatgataataaaccattcagaatattcaaccattcaaatgatggattagtgctaccatgacctgaagaggactagcaatgagtaatatgactaatgagtgagtgtgagagtgagtgtgagtgtgagtgtgtgaatgaactgtgaagcaaataactcaaataaataaataaataaataaaaagaaagaaaacccagcttatttctcagttgattttttttttgggtcagattcaaacctaagaaagatttatagagatatgctactcttggcactattgtcattgacaagagcaaggattaagagaaaatcaaagtatgcatataaggccagctagaaaaataacaaaacataaacaatttttgatggaataaatttctttcctatccacaataataataataatattaatggatgtatatccatatccagtcaattgtttcccggaaacatacacacccaatggggccaaaatatattacttcacaaaagttgcataataaacaaaacagagatcccaatggtacaacatgtagggcaattccaaagaaagtgaggaacattgaaacaaaagattctgataatgaatcataagaaacaatagagtcaccatacaaggactaaaaatcacataattttaggcaagcaaagacattcaatcaactcttagtgactttccaaacatagcagaacaaccaagaacagtgcaacattgaaaaatggctcatgttgttcttccaaatatcacatcactgtgtttgatagcttttcaagtgcttttgcattcgtccaataccgctgaatacaataatccacataccacatatgctaccatagaagtacatgacactcaactttgctaatccaatgaagttaacagaggcagaacctgcttctaagcactaaaataatggactgggaacagacaagtaaggtacatttctctatagtgtatattaccaacataaattacacatattgccgtctaatcgcttggatttatgaaaaattttcaactttgataaagtaactaacttgtgtcatccattgttataagtttcatgttcagcatttgtatgcatagagttttcaataatagctaatgggcttcacatttcaaggcaatttctttaattcacaaagcattttgtcatataaaagagctaaagatttaagaaaaggcatgatctttcttgaggaattgaagtcaagaataatatatcaagacttaataatatgaagttcttctgttctgacaaacatagccacccgattgatatttaaggcataatttcaactcaagcctcaaacaaagtagaaacctcactaacattgcattagtagtgaattgtatcaaatttttgcttaatttgactaaccttcttcaactcatctcatctcaactcaagcatcactatcatcactatcatcttcttcagcgtttgccttatcattggcaatgtaaaccccaggctgaacctgcctccgccgagtcctcgacggaagaatgttatctaaatcaacttcggcaagtgggtcatctgacaaatcactatccccatcttccaattcacttcctccgccattactcgaatcatcatcatcatcatcatcatcatcctcatcttcttcttcaacaatcaattttcctttgcctttatcttccctcgtaatccctttccccttgtggtctacctcttcctcttcctcttcctcttcctctccattcgagtcttcaccgtcttcgtcatcggatccgtaatctccctcgtcttcttcagacccagcttcagcttctttaaccgagtccaaattatccagtggggcttgattttctttatctaaagactcgatctttggattcttcttggggctgtcgaggggttcatctatagagacatcggatttgcgtttggggtgcaatgctgactcttcgtggctctttgtttctgccatgaattagcttcggacacactctgctacgaattggaaagagaagagagagagagtgaattggggaggtggagaaagaaaaatggtggatttgggggttagggttttagggttgtagttgtattgtaaacccaccagagggagaaagggaaaagaggatcttttagtctgttagggcttcctctttcttagtcaaaacgacatcaatctctgtctactccaatcaccaacgacaatctttctaaacaaaaattaaaacaaggatgaa

SEQ ID NO: 67608 - DNA, 973 bp, Cannabis sativa
tttcttatttatatatatatgcatgacagcatgagattgaattgagaataagcttaatatgtacgtagtgattgtatttgaatttgttgtgactagggaggaccatgaatattaatctgggcctatagccccactgataaaaatattacattttaaaaaaattaaatataaattttttaatttgattattataaatcaaaataatagaaattaaacttcccataaaatcaaataaatctaataaaaatgattataatctacgaataaatatatttttttttttatgataaataagttccatcaaaattttaagtccttgttatgactaaataaaaaaatggcaaaaagtaaaaagtgaaattaaaaggagcattagtatagcagtagtatcttaattaattacttagggcgcttgcaaaggccttctatgaccgattctcaccttaattaaaagttgagattgtttgagctcaacgatttgattgatattaagcagtagcagaaattacatatatttttctctttcaattattatttttttttttggaaataatatcttaaatatattaaatgatatttagaaagtttccttttagttcacaaggagcaattttattaggagtttttatatgtatcctgtattttagcattttattacttttatattgtcacacatcggaaattacaaaattattgtacagtttatactatcttttacactgcccataacgccacatgttattttgcatacccttttttttatttttattttttaaaaaaaaaaatgatgtgatgtttatggtcaaatcatgtcagctcgcattttttttttaaaaaaaaagcaacaaataaaataaaaaaacttaatatattatatttgttttgtaatcacaagttacccgcttatttgacattttatcatttcatatttattttcatcatcatctttatacttaagctattcatctctctc

SEQ ID NO: 67609 - DNA, 1798 bp, Cannabis sativa
gattagattgaaatgggttttatttagtgcataaaatcccgacacctacatggaaagtatatgttgacggagcgtcaaatgaaaatggatcgggggccgaaatagcaatgatctctcctaacaggctaagactccagtccgccctacagttcacatttctggcttctaacaatgaggctgagtacaaagccctggtagcaaaattaaaattggctaaggttgtaggggccaacagggtagaaatgtacagtgattcgcaactggtggtcaaccaggtattaggggaatatcagacttggggagaaaagatggctgcttacatatcggttgttagggaattgctgcaagagtttaaggaatacaaagtggaacgaattccacgagaaagaaatgcccatgcaagctgtctggctaagatagccttagatagcgagatagagaagctgggggtgatacctgttgaacaccttacggaacctagcattatgaccaaagaagtagtggctactaatgaacaagggtcgagctagatggaccctatcattaagtacataacaacaagataactgcctcaagaaagtatcgtgtccagaaagatatagtaccaagctcaccgatacttgatgatcgacggtgttctctatcgaagggggctcagcatgccatatttaaggtgtgtgtcagattctgaagctagatagatcatgcaagaggtccatgagggattctgtggagaccacactggaggcctaagcctctcaaataaaatattaagacaagggtatttttggcccacaatgaagaaaaactgtatagactacgtccttaagtgtgatccatataagaggtttgcaaatatcccatgagccccgcccaatgaaattactttaatgactagcccgtggcccttcgttgtgtggggaatagatctcattgggtctctccccatgggaaaaggtggggtcaaatatgccatagtggcagtggattattacccaaagtggatggagactgaacctattaagactataactgccaagaaagccttggactttgtcataaagaacatcgtatgccgatataggttgcctcacaaactagtcccagacaatagaaagcaattcgactgtgatgaattcacagacttctgcgacaaagacagagttatccaaagtttctctgcggtcgcgaggccacaaacaaatcataacaaaacataaataataaacagtaaagatagcttaaaccaatttattagtcaaccaaatgaaaaaaaaaaagcacacacaaaaaaatactcacaaatataatcaaaacaatatataatgcacaacaaaaatataaaataaaatataagtgtaaaaatcaatttcaaaccctgtgaaaccagttttgactgtatgaaaaatcataacaaaacttatgaactcatacaaaattataacaaaaccttcaaaacctttttcgaccatataaaaaaataataagacaaactcaaactaaaaaaatagataaataatatctcaattaatattatatacacacaaagttaactaccaataattaatatcttaatttagcttctctatcaagtatatatatataattgctaaattaccttacgagttaaccataaacataaagtgatttttactctatagaatcatctaaagagatgacccaaaatgaggctataatttaaaaataacgtccttaattctggattgaatgaattaagtttctgttggattttgtgccctaaataaaatccatttgaatataatcagatttactaatt

SEQ ID NO: 67610 - DNA, 1012 bp, Cannabis sativa
gttgtatatttgtttatttggctagttggaagtatttttgtaatattattactttttttttttgttaaaactaaaaatagcctaaaataaaaaagaacacttacaaaattatatataattaaataaaaagttaaaattctaattaaagtgaacaaagacatgtataataagtaaaatgctaagggaggtgtcaagcaccaaaagatgtgtcaaaccgttattggtgcatttcaatattgagtctcataaattttgatttaatatataatatgggaagcgactatttatatatataaaagaatactaataacaattaactatatatcgacagtataaataagagaaaaataaaaaagagctaaaaaattttacgaagttatgtataattaaataaaaattaaaattttaattaaaatgaataaatatatgtatttaataaggaaaatgctaatgtatctatttttcatgatattgaaaagaaaaaaggaacatcattcataaaatttaaaaacatcactaatataaaaaaaaaaatattttactagcaaaaaaaaacatagcacaaaaattattttaaaaaataataaaaaaatcattcataaaaaataaaaaagaaaacaaaagaatagaaaaaaagatcattgttatcgatgatctaattaaaaaaagactaaggtataaaacccctataactgacacatggtgtctagaattgtcaaaaatgaccaaaggtatagaaaaaaatttgcactatgtgattctcttagttctatataaaaaataaaaaattaaaaaaaataaattaaataaaaaataacaaataacaaataaaaaaataaaaagataaaataaattaaatcaaataaaaataacaaataaataaaaaataataacaattaaaatatcaaaaaagtaaaaggaaatgaataaaaaaaatacataaaaaattaaaaaaaaaaaggaaagaaagaaagtaatcagaaaggacaaaacaagtcctttcttttgtttc

SEQ ID NO: 67611 - DNA, 758 bp, Cannabis sativa
  modified_base (569)..(569): a, c, t, g, unknown or other
gattttgaaacaaaaaaaaaaaaccctaaaagaagaaaatgaataaggagagaaaataatgaaaagtaataaaaagtagtgtagggtctgatatacttatcgtcaaaattaaattaaatgaaaagaataaaaaaataatgtcacagatgtgacaatatcaagtcaagtcaaactatttttaagaatttaaaatataataataataagacatccaaactatcaagtttgtgttaaaaataaaacaaattttttttaataaaaaagcagtatattagtataaaaataaaacaataaaaatgtagtaaaaatcaagaaatagtaattaaaattgaaataaaattgaaaaaacaatatagggtgtaaaatttctaaaattaatgtaagtctaaataaaaattctaacatataaatatatattatattatatatatcacgatatatattatataagggaaatttgattaattatgcatttattagaccaattttttttttgtaaacctaaactatccaacattggtagaatatttcattttttcctaaaaccccattctctctctctctctctntgtgtgtgtgtgtgtgtgtaaacacgcacacgtaggagcacacaaacgacccacaaccttagttctttctctccacgaccaccatgaccacagacccaaggacccacggactcaatcaccactgcatgcggacccaacgacttcttcatcaaccacggcttcactatcaacaatgttgtcaaaggaata

SEQ ID NO: 67612 - DNA, 677 bp, Cannabis sativa
gagccaaaccaccccccaattctcaagcttctcaatctcagcccactactcatgtagcccagacgctgcagcagtcccctccaacttcttctcctatctcgacctcacccacctctcatggcccagtacatggcccaaattcgtcacctgcatccatgtctacaccacactcctctcctaggcccaataacccacgctccaccgcatgaaaactcgtcctatcaatggcatttataagccaaatcctaagtactctaccaattgtcatgcaaccaccactaaggacatttctcctattccaaaaaatcctattagtgcgctccgtgacccaaattggaatcatccaacgttggatgaatttactgctttaattgataataagacttgagctatgtgcctcaaccaccagatgtgaatgttattcattctgtggattttgcgtcataaatataatactgatggttcttttgagcgttataaggcttgtcttgtaggtgatggaaaaacacatgagaaaggagttgattgtgatgagacgttaagccctgtagttaaacctgctaccataagatcagttctcagtattgctgtctctaaatcttggtctatccatcaaatggatgtcaagaatgcttttttacatggtcatgttaaaatttattttaccaggatctaga

SEQ ID NO: 67613 - DNA, 1014 bp, Cannabis sativa
aagttcattgtcaaaaaaaaaaaaaggttgattgtggggaaattgtattggaagcttggtgctagtttgtgcaagaaattgaggtagatttatagcctttaaactttgaatctttgctgaattttattgttgtaaaagcaagaaacaggtgagtgataatcttagctgtatgttgatgttttcctaatgatttgaacatgtttatgcatgaattttgtgagtatatgttggattgtgtttgggtgagctttgattgtaattctagggcattttccatgtttaaaacctagttttacttgatattgagctactggaaaattttggtaatatgttggcttgaagctcaagctcttgagctttgaatgtttgtgggtttaaagcttagttgtgagatttttgtgtaatctgaaactgagagttttaagttggaatcggtgcatgaattgagtgttttaattccctatctttgagcttgataatttgtgatcatgttttgagagtttgaatgttatttggggtgatttgattaggttttgttgctgaaattcgagattttggctgctgatctatgggttttcaacccaggtgccgcggcatggtttgagcatgtcgcgacccgcccctgttggtggaacctgggatttttcccaggtgccgcggcatggcttgggcattgccgcggcccgccctcaattttttgggcagtttgagtgctaactttgaaattccataacatttgattccgaactccaattgtggagttcgttatatcgttggaaagcttgttccgagctctatgcgattatctaaattttaaatgccatgaatatatattatgagtttaaaattagggattaaccctatttgtgaaatctcggattctgtgactagggctaccagcacctgatcagagcacccagggatttggaatctctgctattgcgggataacaggtaagatagtggccagcacgttgagtatgcacagtggcgcttatattgaaaatgatatgta

SEQ ID NO: 67614 - DNA, 1356 bp, Cannabis sativa
tacttgtgagtagatctaagttcttggtaaaataacttccaacaaccccactccggccatccacccacgaccccgacccaaccctctttttctcttcctctctctcggtcggtagcgaattcgacccgtgcccgtcgaaaccaccacgaaccaccaccaaccaccacgaaccgtcgccaccaccactacccgtggtcgtcaacaccgaacagaggccatggccaccaccacaaagcaggacccgtcaccaccaccacgaatttcattcaaaggtaagtgtttttttttttgaaaaaaaaaatatatttttcatagatttggatgccaattattgcatgttgttgagattagtggaatttttgtaaattttgtgctctttaggttgtagatgttggtgtttcaatggtatatgtgattgttacaaggttatcgatgatatgtcgacagaatatcgataggatgtcgatggtttgatgtctgtgttgtattgctgttgtggtatgtcgataggatatcgtctgtatgtcgataggatgtcgatagaaattggtgtctgtttgaattgtgttgatgtttttgtatgtcgattggatttcgtgtgtatgtcgataggatgtcgatagaaattggtgtctgcttgaattgtgttgatgtttttgtatgtcgataggatttcgtgtgtatgtcgataggatgtcgacgtaggggcaagtttattttttgcccttaattgtcgacggtatgtcgatgtgttgtcgactgttttaggattttgcttatacgtttgtattgtcgactgaatatcgacatgatgtcgatattttgtcgacatgttgtgaaattgttgtctgcttgaaattgtcgactgaatatcgacaggatgtcgatattatgtcgaccatttttaaaattttttggcagtaatattgatttgttttttgttttttcagatggctcctagactcataattcaagcacccgagcattttactggccgcatgacatatagaggcaccagaatttttgcaaaaatcaaagctcggtttaaggagtacaacctgaataacgcggcgaaggaaagtcgtttcggcaacttttggaatgtcgtaccgctgacattctcctcgatgttatttcaccagctgatgctccacaaaatgaaggttgatgctcaggaggagttgaagatgcggttttacattggtcggaaggaggtcagattcggagtgcttgagtttgccctcatcacaggcctggacttctcctcgggccaacagaagaggagaaggctgcgcaggttgctcgctcagggtcagaccgattgatcaacaaatatttcaaccggtttggtagtgt

SEQ ID NO: 67615 - DNA, 923 bp, Cannabis sativa
agcaagactacaatgaggcatcttcgggaggtatcaaatcctatctgaactgtcacctcgcatttaatgccgcatgggagaaggcgtattaaaactgtcataagtattaaattctgacggcgtaacccttcttctgcagctactacgctatgattaatgagcctagtgacagctacattatgagaagtcacatcagtcaagaaaggataatgaattacatccattagaccatgcatttcctatgatgtattcattagaaatgtgtgcctttactgaatattacagaaagacatctacctcaattctagggatcaccccacaaaaacactataaataccctccaaactcattaaggcaagggtcgagaattctgggttttatgagaactagagagaaaaaccaccaagaacattctctgtaataaatactcacaaatatacagactagtggactaaggctcattaatgctccaaccacgtaaaaatctcgtgcattaacttcttacaactttcctaaatattattatattggttgccgaaaacctcagtcaacaatatgtaataaaataatttgacatttcatttttacttggtcgttattaattttttatgaactctatcacacttaattaaagaaacctttaaaaaatcataagaactcacatatagcttagcttatgtattttttgtatattttttaattagtaacttaatattaaaaattaggtgccaaataaaaatataattaaaaaagtcaatccaatctaaataataattgaattagatcaattagattgaattatgtttattaattaaattagatcggatgataatgatgtaactgatgctcatgacaactacttctagttgttaaagatcaacacctactctacaagtatgtagaattttctatcattttggtaa

SEQ ID NO: 67616 - DNA, 1063 bp, Cannabis sativa
gtgtccctgggctcaaggaatttgaactttattagattaccctttccttcacgagacgaaagaaaatttatcttttaagcaagtaataagctatgctaatgagattgtggagaataatccttttgaaagattaattattatttcatggactatatggacggagagaaataagatgactcatggtgatcctcaaaacaccttaagcaaataattggttggatctcaagtttctgtgactctgttgatttaacgaaagagctagtaaagaaaagtttggctatgagtgaggatggggtttctaactactctccttctcaaagggatcctttcacaatcaatggatccactttgctggtagatgcagctgtcttaaaggaatctaagttatttggtgtgggagctattattatgtcagcaaatcatacaattttggctgcattaagcaaaccattacgagattagtattgtagtttaatttaaaggtttttatttcatatagtgaacagtagtatttctaaaagtttgaggtttttgacaatttaattacactgcactaaggactagtactaaccaaaggattctaagtacaacaatatggattatgtgtgtctccttgctcagtttgtacacgaattataactttgttagttactaaccaaagtgtaggactttggttagtagggggtgtttagttttgttttcttttattattttactgtaattttagatctgtgttagaagggttttatttgagtgtttagtattgttactacttttctctaatttgtgaataataggttttcctgcctgtaataatgttgttttgtttgtttgttgtttgattctttacaggtagtattattgtttttcaagctgaaacttttgccctgctgactggactaaattgggctcattcgtgtgggattcccctagaagcggttaaatctgattctctctccgtagttatggccatcaataacaggaaggtttttgctaatgagatgggcgtgctgttagaggatgtcatagctttattgtctaaatttccgatggcagttttgtc

SEQ ID NO: 67617 - DNA, 816 bp, Cannabis sativa
actggaacctgttgccagtccaaacattttgggactttaaagtcaccagtggattgtaaactgccgagaaaattttaggtcttcaatttatcttcatgtaacaagaaatcagctgctcgcggcccgaagggaagaccaagaagaattttatgcctcctttcaatctcgggagtcgcaataggtctcctcgtaaccgttgtcaatacaacataaataaaataagtaaaagcctacatttattaaatttaaaactcgaaaccaagtttttgatataagacgatacttacatattatgcaaaacgcatttgtgttgatggggacgagaccaaatgtataaaagaattcgtccttgaattcatttttattgggcagcctcacaatgatcctttgatcattgttgtgggtcccgagatagtaaaaaccacctgctcctcgcttccttgcaggacagaccttcactgagtaaaagtaaagaattttgagtggggttgggcactcccacttcaaaatatgatacaaaacctttaaactggccaatattctatatgaattttgtacaaattgaaagggagcaatgcctaagtagttgcaaaactccttaaaatattctttaagagggagaacggctccagctcttatgtgctcgaggcgccaggtgcctatcctagatggctcgctagtactacaaccttcttcacggatcactcgttcaggaggataacaactgaattctcctagggtaacagacctaactaatcatccttgtccatacttgatgccacacgattttaatacctctccaacataagatcctat

SEQ ID NO: 67618 - DNA, 1191 bp, Cannabis sativa
  modified_base (44)..(44): a, c, t, g, unknown or other
ttcttatattgataactaatcaaattgtaaagagttttatttanggcataaaacccaacagttagtgacacctagcaattttaagggcagaaaagattaattagaaatcctttcccatttgaagaaaaccaaaaaattaaaggaaaaagaaaaaattagaaaaagagagacttttctattgaactctctctctctctttcggccgaggcaaaacatgggcaaggatcaagaattcattcctaattctctgagatttagctaggaattcaaggaggagcaaccaaaggtaaaccctagatcattagtttcatgtttttaagctttttctttagtttgagtatgtgaaattgtgaagtagtggatgttatggttttgcatgcttagggttttgattttaggtttaacttgaattgattttaaggtatggatattagttttgagctatcgagatggatttgagcaagcttgaactttgaagctcaagtttagggctctaatggcatcttttgatttaatgactttttctgagaatttctccttggattatattgtgtatgcattgtacaggtatactggaaagttttgtagagtttggcttgattttgaggtcttaggggcatttttcgagttcccagcagagaaccggaattctggttctgggggacctgtagcaaccggtcgactggtaggtgtcccaaaagcggacttccggttgggaaccggtctgtcggttggggcagtttctggaacccttgtttttcccatttttgagatatttaggttatggccatgttatttattgataggaaaacttttactttcaagtttaagcccccggaaagtgatttagcgagtcactcatccatgttataattaatgtgattagtgcatccatctagcacgagactttcggttcaggtcggccaacacacttgaattcggaaagaaggtaagaactgtatataatgtgtgatgtagatatctgagtgtatgtatacgttatgtgtatatgcatgcttaaaatgttagttgcactaccaacacttatacagttatggtatagagtgcattggtatagtgaacgttatccgagagtaccgtgataccagcataagtacgaagaggtactgggagtgcgtggtatatcactcagcggtactcagggtatgaacaaaccctaccaacactcgt

SEQ ID NO: 67619 - DNA, 1518 bp, Cannabis sativa
ttttcaccttcttggaaggttttgggccaaagactgactgctcgttctttatctccttcatgtatctcttctgagtgttattgctttcacctacaatatgcattgctcccgaaataaccaggatgtcatctccttccacaggaataggttgtaacccctggttatttgggttatcatactgacagggctggttgtatccctggccctgtcttctcacatacagcttaaaatggcctcgagcgataagactttctatctcatccttcaattggtgacatttttcggtcgtatgcacaatatctttatgaaatttacaatatttgttaggatctcttttgctcctcgaattcctcataggctcgggtttaccgaaggctaccttttggtcatgtgcaaggtaaatattttcccgagtttcattaagctcggtataaatagtatacactggcacatatttatcatgcttcttttgttttcttctatccttcaacggttccttgattccgtcctttcttttcaaaccagagcccccgagttatcaattctcgcagaagcagttcctgttgagacattgctgagtttacatcctgagcctgttttcacaagctcatttccttttgggcttcttccttccgaaaaatacttgatctctctcgttgaactcagtgatattccttaccagacatccttgcagatcatcccacaactcgcctttggcggttaatggatcagtcgagatccccgcctaaagggctgtaagttgcgtgtcgtcatctaagtttctaaccctagcagtgaccgtgctaaaacgacttaagtatgccttaagtgtttcgtcaggctgctgctttatgttggttagcgaagctgcttcaggacgcctatccctaacagcttcaaattgcttcttgaaatccctggatagttgttcccaggacattattgaatgatgagtgaacttgttaaactagctactcggtgcttcaacaagcgaggtggggaacaaaatacaacgtaaattgttcgtcacgttactcactcacattatcctgttaaagttattcaaatgcgagattggatctgtggttctatcataggacgagacatgcaggtttttgaatcccgaaggaaaagggtattcataatatatgggtggtacggctcaagctcctcgtcagagtcgtatctagatgatttccttatttcccccacttgatatctcctgaacttgtcctccagctcgtttatctgtaattggattggatcttcttactttggaccaagctgttggcaaaggtcaggtttcttccaattcaagtgctctcgcagatccggttgggaataattgctgcgagatctcgccttactcattgaccgcgttgtacttatagattttgttcttgagtggcttgcagatttacttgttcccatactctcctgatcattatctcattgagtactttctcctcttcgagttgatcggctatgagttccggatcgcctcgaagtcatacttgc

SEQ ID NO: 67620 - DNA, 580 bp, Cannabis sativa
atcggccaacacttctgaaaaaaatctggggtcattccatcaggccctggagatttatccggatgcatttggaacaaagctttctgaagttcttcatctgaaaccgctaacagtagctcaacattttgctgggatgatacacgagtttgcacgctgcttgtgacttctctccagtcggtttgggaagaggaaaaaagcccgtgaaaataagaaaccataagatcatccaaaccagtatctcagtcaacccatgcacccgaattatctttacgttttgtaacaaaattattacttcgcctcgtagttgcagaagcatgaaaatacttgctattattatctccctcttgcaaccacaattgcttcgatctttgacgccaaaaaccttctcgttgcacataacattcggccaagtacttctttgtttgtttataattggctacaaagacttcatcccgacccaatttccacttctacactttatttttacactttttcaacctttctttaaagttgccagtaacctccttaccccaaacagccagcttatccccacaaaactgaattttatgcataacatcat

SEQ ID NO: 67621 - DNA, 725 bp, Cannabis sativa
atctcccttaaagttaacactgtcttaaaagttcctatcattactaagaaacttgccagtactttacaattcacaaatgataataatgtcttttgtaatttcattccttttattgttttgtcaaggacaaagctacatggattgttttgctcaaggggagattcaagaatggcctgtacacgttgtctcatcgttcatttcccactccaaatgttcaactcagtgtcatctagccaccaacagcaccagttcagaaataactcatatatctcaatctgtttataactctgtagctaatctttgagctctaaacaattgtaatgaattgttaatgaataaagagattgtttatgagtctcattatcttgtttccccttaagtgtttaatgcaaataagactgatgttaatttgtagcatgccaaacttggccatccaacacctaaaattctagccaaaattttatctcaactagacatattaagcaatttaaaggcactaaaattttgtgaggcatgttaacaagaaaaaagtcattaattaccatattctctctctgagtgtagagcatctcaaccacttgaattgatccatacagacctacgggaactgctaactcaaaaatttagactagacttctaagatatacccgctctctagattggcgagaataaaaaagtagttaagtaattataagagagcgacagcaaatttatagtagttcact

SEQ ID NO: 67622 - DNA, 677 bp, Cannabis sativa
caaaatatcggggcgttacaaattttttgcttaaaagttagatctgggcatttttgatcctaaatctaatctgtactcacagataataaatattaatcatacaatttattcttttgacaacattatcgatggtgaagctgtgattgatggagaagtcattgggtccgcggtggtcattgggtctgtgggttgttgggtctatggtcgtggtagttgaagggactaaggttgtgggtgctggattgtgggtcgagtccttggggtgagttctaagagcgagaaagataagggaggaagagagatggttaggtgtttgaaatgggagggtaattgaattttataaaatattagcatattctactaatatgggttaactttaggtttaggaaaataattttaatctaataaatgtataaaaagtcaaatttctcatggtatattcatggtttggtttctaatgaatggtggcatcaagtggaagctaatgctgagtgtttgaaatttttagtttagaattctaaatggaggtattatatagatataaattcttttaagatagatatttcaaacttaatattaaattgtacatgaaaaaattaaagaattaatattaactaataaacataataaaaaattataaaattgatagaactaaaaagagaacaaataaaagtata

SEQ ID NO: 67623 - DNA, 1617 bp, Cannabis sativa
agtataggtcatttaccagccatttacaggaaatgggagtcactcacatccatccatgtccaactacacatgagcaaaatgggattgatgagagaaagcataacacattgttgaaaatggtttagctttgcttgctcaagcacacctaccatttaaattctaggatgaggcttttagaaccttggtttaccttcataacagacttccttcacctttattaggcgacaaacctccaatagaagttatgttcaacattaaaccagattacaactggtttgctatcctaacataagaccctataacaagcacaaactccaatttaggtcaactcgttgtacctttcttgggtatagtcttaatcacaaaggttacaagtctctaggttcaaatggtaggctatatatcttaagagatgtaatctttgatgaacatcaatttccttatgctaaagtgtctaagtctcaaaattcacaaaatctgtcaattcctacctgcttgccctcagcacacattcccactgcggtaaccatgtatgtgccatcaatcccaattacacgtggttctcaagaatgccatgtcgatcccttatgttcttacattgactgaactgctgatatacaacaacatttttttggtgaccaggttgcaggtcatgtctcagcattaacacctgcttctgctactattcctactactgttaatgttactccagcttctgcacctgctcatgctgctgctactggtgcttcaacacctaatgatattgagatacgtgtaccaggttctgtctcaactcatagtgcacatgatattgctactaatctgaggcaacaatagcctgtttgcatcacaaatgttgcttcatctctggctcagcaacctaaacacaacatgaaaaatcgatccaagtcaggaatttacaagccaaagactttcattgtgtccaaacttcctcagtccattcaacatgccttattgtacggacattggaacaatggtatgtctgaagaaatgatggctttgaagaaaaacaagacctacactcttgttaagttgcctcctgggagacaagctatagggtgcaaatgggtgtgtagaatcaaagaaaatgttgatggttctgtgaacaagttcaaagcaaggcttgttgctaagggctttcaccaacaacctagttttgatttcaccgagacatttagtccagttgttaaaccagttacaataagatttgtattaactgttgccctaagcaaaggatggtgtgtgagacaactagatgtgaacaatgcccttttaaatggcaaccttcaagaagaagtttatatgctacaaccaccttggtttgaagatcccacaacacctcatcttgtttgcaagcttcacaaggctctttatggattaaagcaagctcccaaagcttggtttgagaggctgcaacagtgtctgaccaaacttggatttgtgtcatccaaggcagatcattcaatgttcattcaacacacaccaaattcaataatcatcatcttggtctatgttgatgatatattgatcactagaagtgatcaatctactatcaaatcccatataactcagctccataatgagttttctctaaag

SEQ ID NO: 67624 - DNA, 940 bp, Cannabis sativa
  modified_base (221)..(233): a, c, t, g, unknown or other
atctctggatcgtgtgtgtgcgatctgtttgtaatctttgagcttgaactctatagtttttatcaaaagggaaagaagattcgagattgtatctcgagaaggctaaatcgtttaataacttttagggttttgttgtcttgtttgttggccggatcgagtcctcgctacaaaaaatattacttctagtcacaataaaacttgtgactaaaagtgaaaaaatnnnnnnnnnnnnnaaattattatttttatattgtgaaacaaaaaattgacatcattagcaaaaattattatgcccaattcatcattcataattgaagtgactttagcaaaaatagcataacaacacgattacacgtatcattcgagaggtgaatcaaagtaaaatgattagaaaaatacttactaaacaccttagccacatcatctatagaatagacccctctcccattctcatcaagaatactagaaattcgatatgagcacatcaaccagaagcacaattgtgaaagtgagaagagtttttatcctcaagtttcaatcaactattcttcacctaagacccattatttctcttccttctcatgaagaatgtcaagtttcatctcaattttcgaagctcatcactctcacactagacaaatttgcaccaacaatttcaagttcatttaatttttttgtaatggcccgtttatatctaaagtgagtatttttattgagaaatactaaaaagtacttatgcttaatatatttctcaagtgtaatattgcttttggtgtaagtcccacttttttattttaataaatattataaaaaattgttaactaattatagaacggcacttcatcgtggtgctaagtaccaagttcctcatagcaatatactcatttttattccatttatcaagcttagaggccactgcctctatattcctagtcacatt

SEQ ID NO: 67625 - DNA, 888 bp, Cannabis sativa
  modified_base (84)..(87): a, c, t, g, unknown or other
  modified_base (511)..(524): a, c, t, g, unknown or other
caaatttacggagcttgagttgattgatacaattaaggctagccctttcggatacttctggaagctggagagttgactttctcnnnngctttggtccacaacctcctcttacggaagatgaacgtcgataatgaaaaggaagatgatgttgggtttcaagtgggcaaaaatggcatgagttttgggcggatagagtttgggcttattaccagcttacctttgggtagtgcccctacagaggaagaaatagaagtcaagcccaacgaccgcctagttaggacgtattttgaagggaagagttttgtacaattggattcactattgctccaactacagaggtgtaaagtaaaagataatacctacaagcttggacaaatttcttttattgaaggtgtattagtatcaaaagagggtagtgtccaagtttggcctgacatgttaaaatttgttaacgaccttgaatttttattcaagtatccgtgggatgagtgtaacaccctactagtttagnnnnnnnnnnnnnnttttaacttaattgtgcagcttgttgctaatcaacgagtttactgaacatcgtgaataattaacttgcaactccacatcaccatcttcgttcaaatctactataggatcattgttgtaaaagggagcatcaaactaattaaactggtcaaatgcattgtcacccctgtcctcatctatattagtaggggcatgctcatttaaacctactgtttaatctatttctaggataaaactctcaacaatacttcttgggggaatagttggcagagtaggccctaacatcacatgcctcttaaccttagtcgtaaacagtggcagcaagttctccaaactcgtttatgccttcattcttaagaacaatct

SEQ ID NO: 67626 - DNA, 1925 bp, Cannabis sativa
ttttttttttttttttttcaggtgactgagccccttgctacaagtaggtccacccctcttaactattattttacttgtacttaaccctctaagctcaaagtttgactctaaaaccctttaaactactaaatttgtaaatatacagtcatccattttttataattaattgtcaatatagactatttatgtgtattttttttatacatatgtcaaatttatattagtaattctaattcttttattttaaaaatatgaaaattattttaaaatttacaatatattttttttattttttaaaataaaataaaatttaaaaataatttttaaataatattaagtgtactattataaatgtgtacataaataattttatcaattaatcgaatcacattttaaatttactactaattcattatttaaaaattttagccacgaaaagctctctacaaaataatcagttaaaccaatatagattatcctctcaacaataaaagcacagtatgggttcaaaagctccacttgttactttgtaacttatctgttcaagctagaaaagagacatgtcagatttttcttttcaaaaaaaattggattttgctcccaaggcttgaaaacagtaagctttgtatagtacgagaccaatccacttggaagaatagtgtgcccattcatcatgactaattaagtcatcatcatattatattctaataaaaacaaaagaaaaagaaaatatcatcctcgtttatttttttcgaagttgataagagttgaaaactagtgatttaaacgagaccgacaaataaagttgaatcgtaaatgactataataaataattgcagcgaaataatagatattaattcaactaataatacaattcatgtgtagtaaagttacactcaaaggtgtttactttaataatattgcttagtgtatttattgaatatctacataagcattaagactacatctactgaaaagtttatcgttgatgaaagcttttgatgagatacagcagcttaggcatctatatatgtagcctagaggattaggcaataaatataagttcaaaatcacataaaattttcctaatggtaaattaaatagagtactggggcttgagtgtttaaagacttaaaatccactcagtttagagtcaataaatccaataataatattacttttaactcactcaactcaaccccatattaaaacataacagaagccacttacttattccactagtgtattaggaatctctgaattacttatgcttattcccaagggatgaaagtgggttagtgacagaataataacaatattattaatggatgtctttgtcgattttacaatattaaaaacattattgtaaagcatttatgttattgttcatggcaggtttttggcatcctgtttttgagcgtgacttgtagttttaacctcattctactttctcagctagccctaaatgattggatgtgaggtcacactatcctttggctaccagccatatgtgaccgttggatcacaatcatgatcaaatggtcataattaagggtccctttgctacaaaatttgactcattaacagttcaaaatagtctgtatccagtctagcatttcctgcggtcgaacacggacagttttggtcgttatcgattcgcctatacagaggaattgagttttatttttgaattattgcaataatcacttttttttttttaacaaaataaagtaaacaaaaaaagtactatcactttattttgttagagtaaaaactgtcactttattttattttagaaagtattagctatcattttaaaaattcaaaacttcacatataatattttaatatataaatgtaggaatatgattttgtcctgttattgtactttcacggattgtaatccgtaatgtacggcagccgtc

SEQ ID NO: 67627 - DNA, 546 bp, Cannabis sativa
ttagtgtgtttgtgaatgacctatactcaccccccaatcggtttgcaggacttttattttggtaccaagttgtaactcagcttcagctttgaaatgctgaaatgtttttaatgcttcatctttggttttaagcatgtatatccaagtaaatctggaatatgcatcgacaaaatggatataatacctataaccattgagagatggagtgtgagagggaccccaaagatcagaaacaactaattgaagtggtgaagtgtatgtagtgctagaagtctttggaaaaggaaatttgtgtatttttcccaaacaacatgcttgacaaatagaattgttatctttattagaacattgtatattacatgattggagcacagacttgaccactttttcagaagggtggccaagtcgattgtgccaaacatcaaattgtgaaatacaagcagtgttatctgaaacattaggtctggtgcactgtgtaggtgagaaaacagtggctgtcaaagttttgggtgactgaatttgtggttgagaaagggttgctgtaag

SEQ ID NO: 67628 - DNA, 1326 bp, Cannabis sativa
cccgtactttaggaatgtggcagatttcttccacctctgtctgacccaatttactcctaaaggcattaagtatctgtctgccctctacgttctttatgcctcccagaactgggataatccctctcccaacaaggttaactggttttttggtttgaagtccacccctaagtaaggcaggtcggggtacttctatttctctcaaccagatttcaagtggttgacaagcactcgggacaaggccattagcaaaattaggcattttgttgacgagtacttcagggtggaaggcatgggcaccactcatactcgattccagcagatccccacatatcaccgcccttccttcactcttgctcttagggatagagcccaaaagcttgctggactactgagggatgctcggaatatcattctgttgacctccgagaagaactttgtgaaatatgggctctaatgttttttctctgtgtaggctggtctgaagttggcttacacctattctattgagctaagtctgctgcctccaagaaacgctaccatgtccaacaccatgagggcggaggtggacttgtcaaagaaggatgctgatgacgtcagggtggaacttggagctcttcgaatggagttgggtgaagtcaacaagaagcttttcaccactgcgaggaatatagtcgagttgactaaggacctcgaggcttccgaccagcttgaagctacaattggcaccttgtcggtagaagtgaatagccttcaagaggaaaggggagttcttcggactgtcttccttctgctggaagaagagaagaagactaaggaagaggagcttacagctgaggttgagaagtacaaatcggaggtgacgaggcaggaagagaaagtacatgccttagagacagccggtctcgagattttttatgacttttggaaagctaacccttaggctaattttgattgcctgggtaaggccaaagacatgtatcttgagtactgcgcttcccaagtggcttatggtgaacccaaggcgactgcttctacctctggccagaatgttgatgtaccttcccttcaaacaacagatcctccagctcctaccggcctagaagacccgaaccgagagcctgggactccagctatttaaatacttctctgtttcatatcttattcgaccataatgcctttttttaagacatcatgaccaaccaaacggtctttaaacttggaattatttttcattttacaaacattcggcagaccgggcagcttttaatcccggtattacatgcttttgctatctttaatgaatttcatgttggaatttattttacc

SEQ ID NO: 67629 - DNA, 1389 bp, Cannabis sativa
ggtttcagcctccatctctttgagctttttgtcatggttagcttggagggacttgagagattcctcaagctccttgatcttattttgtttagccaaacgttacttttcagcctcttcctttatgcaagaaacctcagcctcagagtcattccatgttttggctaaagtgtcactatgctccctggtctggcaaagctcagtctcgagcatttcagcccgctgagacgacctttgatgaatagcaaaggagagaagagatgcctgcaagaaggaagcatattaaaagaagtaaagatgataaaatggggaaaagtgagaacaaggagaaaaggaaattaacctgatgcaaaagtttgtaactctttttcaagatccttagagctgcctcgcgtgagaagctcctagtcgccagacccaagagtcaggaagttatgccaactgttggtagcatgtagcgagcagagttgcgagccttcagttttggcctcgaggggcaggggataggagggctcgagaagaaccatctctgaatgagaaccaaagaacttcacttggtgcattgacccagtgggttgttcattggcagtcaccgcagctgggacctccttctctggagatttggctggctcgttggttagttggcctgatgatttcttcttgttagctgtggttttggtcctcttgggttccatagtagaacccgaagcctcaacaacttgggcaactctcttcttagacttcttgtcgactgggggaggactcttgacaatgttctccaaatctagatgcatatttgcgaggtgagacaagtacattagcacataagcaaaataaataagggaaaatggggagtaaactcccacttgagaaagttaccgtaatttttaaaaggtgacgagggaggactatactattcactaaattccctagatcctgtgataataaatatgtcgtaagggtttagaggacctaaatcccaacttgaatctatatgacccgatctatccaacatagttccatactgctaatttgaacgtggaattctgggtaccaactattgaacctacgtgttatgcgatctatgagaaagggattccatgtgtaaaaattgtattgactatctcggaaagatactagggtatcacgttcggccctaagcactgtaggtgaccacccacattaattacctcgagatgcgccttcttcaacttctcgaggggcagttctctaaagataatgtgcgcgagccatgtattccacgctctctttgtcagctggaactgggaccttttaccacgaagaatacttgagtactttgtagtcacaagtaaattcatctgaggcaagaaggcaacattcctcagattaatctcgttgcataagaagtct

SEQ ID NO: 67630 - DNA, 553 bp, Cannabis sativa
aaaaaaaaaaaaaaaaaccacgaagaggtgagtagagtagcggagaactctcctaatatagttgtcatttgaacaatatatagacaaaagttgactaaaatccaaacaaacaagaaaaattacccagtttagcagcccatcccaaaataaacatgtttagaagcccggcccaaataaagaggcccaacccaaacatgaaagcccataaacaaatataggctgcttccttcctttgttgtctttctgtactctctccaatccatcacagcctcaactcaagaacctctctctctctctgtctctctggtgcactgaggtgaggttcttactttcttcattctatttattttctcgatttactaattgtattcgtcgatctgcgtttttgattggtttgtttatctattgttcaattttgatcataattgagttcctttttgttttgatccattcccatctgagttcattgtgtttgattcaaattatcatatattctttttgttctttgagtctcgttaacgaagatgtatatggatttatttaatttcttgac

SEQ ID NO: 67631 - DNA, 680 bp, Cannabis sativa
taaaataatttccaacaagaactacctcggttgctgtagtgttcttttgattccatagcaaattgtttctagcattccaaatggcccatgtcaccataagagcttcctcaagttgttcactcgaattgctactcattaattcttggaaccaagtatagaaatgatgttgagaaaaggatgtaatgttgagagaagatctatgccaacaagacttggcaaaattgcaactaaccaaaacatgcataatagtctcttcgacagtgttgtagaagctacacaatctgttaacatgaacatgtttggtattaagttggactttagtagcaagtataccaaatatagctcgccacccaaaatggaggactttcggttgtactttgatttcccataaatttttccacaaactagcatctaaaccagcaggcatcgactggtttcgtagccacctataagcacttttaacagaatagaaaccagatttctctttactccaagtccagcagtcttcatgtacagccataggcaaaggaacactcataattaggcgctctctgttttttgaatgggtaaatatcatgtattttgtaaaagttacactctctgttttgttaaatgaaaaaatggaccttgtattttctaaaattttacaaataggaccttgaattgattttttgtcaaaa

SEQ ID NO: 67632 - DNA, 1194 bp, Cannabis sativa
ttaaatttctatgcttaatttagttacttaagctacttaattaaaaaaaatacactctttttacactatatcgaaaatatgcttacatgaaaaatatttaagtcaaagtcaacttttttttatcacttttttgccgaaaaactttttttattatttttttttcagctgatgaaccaatctcagcccatataatgtaaaaatgaaatgtttttctaattaaatagaaaaattaatcataaaaactcaaatttttctcatattacccattcatggataatacccattaaaagtgcatccatatatgtatatgtgacatatatatgtatatatatagtgatatataatattgtattttgaatttataacatgtttatatatgtatatatgagagatatataatatatagcatgtatatatgagtaatatatattatatatatagagcatgtgatataatatatattagtgagattaaatatgtagaaataattatttctatgtatttatatgaggcatgcatatataatatagatcatgcatgagtattaaagtgtatacatattatatatgtgtaaggtatgtaacatatatagttgtataagattaatgtatatattatgtgtatatgatatatatgtatgggtgtgctcttaatgggtattacccataaatgggtatttaattattgaccattagatttaatcgaatggatgatatttatagttattaattgtcttttttaaattaatattatttatatttacctattacctgatgacatggcagtcatcctatttttgaaatctcaatctttgtattccattctcatttccaaatgaatgaaacaattaaaaaaaatattaatttataaattggattgttaaaaaaaagggtataattaattttaaacctctctgctcttctatttccctgtcgaagcccaagtcgactgaaattgatgtaactttctgctcttctctttccctgtcgaagcctaggtccttctttcttctcctcccatggcttcctcctcctccgctcgcatcgccatctttggtgacatcataactcactttcactttctctctcttatgtttttttcttctggctttagagagcaagtttctctttgtctctctttggctttacagtaaagttagttggtgaacaccttcatatacaacaatattaataa

SEQ ID NO: 67633 - DNA, 808 bp, Cannabis sativa
  modified_base (42)..(42): a, c, t, g, unknown or other
tttttaataaataaaattataaaaatcgtaaaaatatttaanatttcgtacaaccgtatttttatttatttttatgtatttatgaaataatttttttttaacaccaatgggatgaaagaatatacaacattttttttttaaaaaaaaattgcatgttaggtttttattttagtaactctgcatgctgtggttaaaatgagaattaataaacactttgaaaaagacggtctattaaaacttggaggttcgttaatttgaaatgattttttttttttttcaaaatgtacacgtgtcatcgttattcatcaatttaattagtactgattttaatttctaaaatcaaagtttttatttttatgaaattatcgaagtgtatcaagtttatcttccaaaataaaattttgacataaaccaccaattttgcatcaattttgtaatttttttttttggctaacttttattagaaatttggtaaagtttaaaatattagatttggaaagaaaataaacacgaattaaaggcaaaagaattcaaaaccttaagtcttgagtgaattttgtagatttaagttttgaattaaatatatattgataatacaatattaaaatagtactttgacactattaatataagaaggtggtgctctagaacaatgtatccaaaggttaaggcttggccttagatatgtgtttacggttagacctatgtttagagtccttaaaatgaaagggcattccaattttaaatttttaactttttaattttttttgtacatttacaaagactcttaaaattaaaaaaaaaaaaa

SEQ ID NO: 67634 - DNA, 2569 bp, Cannabis sativa
cgaaagaaaacatagacatctcatagaaacggccttaccttacttgcacaagcatccatgcctctttctttttgggatgaagccgtgagaactgcatgttatgttataaataggcttccaacccaggttataaacaataacacacctctcaacaaactgttccacaaacaacctgattactctattctaaaagtgtttggttgtgcttgctatcccaacactagaccctacaacaaaaacaaacttgaattcagatcagaaaaatgtactttcattggttatagtttgaaacacaaaggttacaaatgtcttgctaattctggaagaatttatatttctcgagatgttatttttgatgaatttacttttccttttcttactcaatctactaatacatctcttccttgtgttcatgtttccaatgatacaacatgtgtgatacctttggctggccaagcttctcacccatctgcaactgttcctgcacaattttctcatccacctacagctgctgcctcttccagcaatccgcatcacactcctgctgctgtcacgattcttcctcaacaacaacaacctgttgatactataaccacacaacatatgcagcactcaacaaccactgctctctatgaacagcagcctcctcatcacactgctgcttctattgcaacagtacagctccctgctgttgctgcaactgccactccaaacacctcacattcagtgtctcctgctgctacacctccagatatccctgctcctattccagctactcaacaaccaactgttatcaactcccatcctatgataacccgtgctaaagttggcacttacaaacacaaagctctcatggcctctaccgctccactttctgtagctgctgccttaaaatctcccaaatggaatgctgcaatgaactctgaaatttatgctctcaaacggaacaatacttgggttatggttcctctacctcctggaaaacaagcaattggatgcaaatgggtctttagggaaaaagaaaatactgatggttcaactgctcaatacaaagcacggttagttgccaaaggttttttgcaacaatatggttatgacttcactgaaacttttagtccagtcattaagcctaccacaattcgagtcatactcactattgctctctccaaaggatggccactcaagcaattagacataaacaacgctttcttgaatggggagttaactgaagaagtttatatgtctcaacctcccggtttcattgacaaggagtcacctgaacttgtgtgtaagcttaacaaagctatctatgggctcaaacaagcgccaagggcttggtttgacaaactcaaaagtgctctcatgacttttgggttctcctctgctagagccgataactccctcttctttcgaattactgacagtcacactacatttcttttggtctatgtggatgatatcatcctcacaggtagctcaccaaatgttctcacttctcttatcaaagatcttcatgctcagtttgctctaaaggaccttggcactcttgattactttcttggaattcaagttcatcaactagcaatcgggttacatctttgtcaaaagaagtacatcactgacttgttatgcaaagccaaaatggacaatgccaaccctttaccaacacctatgactggaggagaaaaattgtctgctttcaacagtgatcctattgctgatcctaaaacctatagaagcattgttggagcattacaatatgctatcattactagaccagaaattgcatatgctgtcaacaaagtatctcagtacatgcataacccactagagtctcatttcaaagttgtgaaaaagatcctaaggtatctcaaagggactcttgactatggtcttctcttaaaaccgtgtcctgctctacaaataaccgggttttgtgatgccgattgggcctccgatcctgatgataggcggtccacttctggtttttgcatatacttaggatccaacttgatctcctggagctctaagaaacaaatgactgtctctcgctccagcaccgaagctgaatatagaagccttgcgaatgccactgctgaggtcatttggcttcaatctctccttgctgaaattggtttcgctaaactccctattccaactatatggtgtgacaaccaaagtacagttctaatgtctgctaaccccgtgcttcactcccgaacaaaacacattgagttagatctttattttgttcgggaaaggatactacagcaactacttcatgtaaaacatacccctgctatggaccaaattgcagatatattaaccaaggccctttcagcccctcggttcaagcttttacgagacaaactcagcctggcttccctatccatgcttagtttgaggggggatgttaagtagttagttagtgttagttattagttaaggttttctgttatattagttaagcccttctgtaactaacctcatctctgtacttgtatataaagagcactgctcttctcaatcaatacaagaattcattttattcacttttgtatactcaaca

SEQ ID NO: 67635 - DNA, 1162 bp, Cannabis sativa
tgattatattaaaatgagtttttttagggcgcaaaacccaacaaggagactctagaaaatcacaggaacgatatgccaaggaggcaagggagaggccactcactaatgtaaataacttaagtgaacggccagaaaaaatattcaagaaggaatgcgatgacatcacattcatggaaagtgacgccaggtgggttcaccacccacatgtcaatgcattggtcatcgtcgctaacattggaggagacaatgtccaccgcatattagtggacaatgaaagttctgtgaatctccttaactttcaagattttaagcagatggggttgtaggagaaagatctgcgaccagtggtcttgagtatctatggttttaccggagacaccattgctttaaagggaatgatcaggctcccaatcactttaggaatcacacctgtcgtggccaagtcgatggctgacttcgctgttatcgaccagtactcagcatataatgcagtgattggccgttttatcttaaaagaaatgaaaagtgtgacatccatctaccatcttaccatgaagttccctacctccgctggcgtaggatctgtgcgaggagtccagtcggactcgcgagaatgttacaacgcagcattaaaactcgctgagaaaaagtcagttaacataatatacatgttagaagcaccccctcctcgacaagaagtattcagaatcgaggagataccgcacgaagaaaatttagacttggatccgagggtcctcgattataccactaccgcgcaagccgcggaggataccattgaggtaccaattgatcctttagataataataaagttctgaaaattagttctaaattaacttttcaacagtgtgaaaagcttgttacttttctcaaacaaaacctagatgtgtttgcctggaaacattcaaacatggtcggaatatctccgcaggtcatgtgtcaccggttgaacattgaccccgaagtgtgaggtgtctggcaaaagcgccggaaaatggaccccgcgaggtaccaagcgctaaaagaggaagtagatcgcattttggcatgtggctttataagggagtcattctacccaaactggttggcaaatcccgtactagtgcccaagcctagcgactcatggcggacatgcgttgattt

SEQ ID NO: 67636 - DNA, 932 bp, Cannabis sativa
attaatttaaaaaattacaaactaatgaatcataatcaccctacaatcaatgatacagtgaacaaatgtcaaaaatctcattaatgttcaataatatgcagaggagatatatcaatgttttgaaagaatcttcttatgatagataaaatgttttgaaaattcagttgtgaatatgcagaggagatatatcaatttcaaagaaagttaagtttcaatgttttagttcttgccaaactttgaataagctgcatttgatagatattaataaatcagacaaaacataatttatgaaagtacagaatgaaggtattgattttcactcgacaaagtaataattttctttagagggtattgcaagtttctttgtctaattttcctagagtttgcagtgtcctaatctatgattgctctattaatcatgcctcaggtttgattttcactccgcaaagagataagctaccagcaatatgaggttaggaagtttcgattttcctttttcttgttgtagtcagcttattattttgtatggcaaatagatgcataaatatgcttcagttttcttatgctatatttctggtattcatgttaactaggtgtttacagtttgatcttttggttaagattatgtcatttacaccattactattatgtgaacttaatttactcttaaaagcaatagacttctagtaccacgaaatcatggtaaacataagaaagaaagaaaatacaccttaaagatgctttaaattttaccataaaaatgcatagtctgtattggaaactcatctgtgttagcgtatggatatccatctcagcacacatatagacatatcataaatatagtacacacatcgacaaagcacataagaaatcttaagccaaatcatttccgatacaaaataaagcaaggccagcaataatgataccacaat

SEQ ID NO: 67637 - DNA, 525 bp, Cannabis sativa
aataagataagtttttcatattttgtattcttaatgcaattaatttctggaatttgttaggttgcttagtttattgatataaaaggtttctaattatatctttttcacatttttgtaggagctcttattgtcacttaaacaagctatgtggaaatgttgatagtgtcagagaaatttttaactcgtggattgcctattacattcctaagagataatttttttttttgttatttggatttttctttgatgattttgttagttagttatccaattttcctaaggcatctctgattcatgttcgtttatacatagcagtctatgcactcagggtgaatgacgaactaatttgaataaatgaattctcatcgttttccaatgaagatgtaaatccaaattattttcaagaaaaaaaaaagaacaccaaacacaatattacctaattacaagctgctaaatgtaatataaaccccacaaatcactcacacatgagcaaaacacaagcgtctctttttcttgatagattta

SEQ ID NO: 67638 - DNA, 816 bp, Cannabis sativa
attgaaacctcttcctatattataaggttacttaaatatgttttaaatttatattaatattttatacattgtgaagatttgttgggccacaattttattggctttgatgactttcaaggcttttgtgcgcttgccccctaattatttagggtaatatgattaattgttccatgttttcatgagaaataaagttttcaaaagaaatttttgcgttattgagcaccactagcttaattggattatgtgctgttatattgttgagcaaaccccttaaaagttaatcatagtgggtatattaaaaatattattcgttgcttatttctaaaggaaattttgatatcctaggttatacgagcgttgcagggcttatttgttattattagattacatatcaaaatctttttttaggtcttagggtctcaataagggttagggatcctaagttgattatgaagtaaattgaaagagtttagcttctactagccaaagggtattccctttggctagttctagtaattttataggtggtctagttgtttagttttggtgtttgattgattttgatcagcttgataattttctaattataaattttttctggttttctaatttttttcaggtgaaatttcagtgttacaggctgaaactttaaccctgttggttggactcaattggtctcatatgtgtggttttctgattcatgcagtttaatcagatttgttagctttggtgacggccataaacaacgaaaagatgtatttcaacaagtttggagcgttgtttgaagatgttttagctttattgtctaaattttcg

SEQ ID NO: 67639 - DNA, 1914 bp, Cannabis sativa
tctgtttctttattgataattgaatataaaagattacattgaaatagtgttttatttagggcacaaagcccaacaaaagggtcacaggcttcgaatgaatttttaaacataaggaaggtctactaggagaagaagtgatgtacaaagcatgattggtggcaaaagggtttaatcagagagaagatattgactataatgatattttctctcctattgtaaaacagacttccattacgatcatgatggtaaaagtggcaatgtttgatcttgaaatggatcaaatgaatgtaaagattgcattcttacatataaaactttaagaaaagatctacattgaagaactagatgactataatagcaagaagccttatcaggtttgcttgcttcaaaattccctttatggccttaagcaggcaccaagacagtggaacctaaggtttcatgagttcatgctactaacaggttacttaaggagtgagtatgacccttgtgtatactacaatgggacacctatttggttgttactatatgttgatgacatattaatcattggaaaggatagaaaagccatcaaaatgttgaaggaccaactcagttctgaatttgaaatgaaaaatctacgtgaaactaagagaatactgggaatatatatcaaaagatgaagaccaggtttaattattttgtctcaagaaggatacattcagaagatcataaacaaattttgcatgagtggggccaagacagtcaccacacctcttgcctcgcactttaagctaactcaagatcaagcacgaaacaatgaggaggacagaatctacatggacacagtaccatatggttcatgtgtagggagtttaatgtattgcatagtatgcacaagactagacctggcctatgcattgagtatggtaagtagattcatttttgatccaaggagatgatattgggattctataaaattgaaattaagataccttagaaggacaataagggtagaaaatgtataagaacaatgcagtttttgacaataacatagaagggtatgcgactatgattatgctgggagtatagacacaagaaggtctataacaggttatattcacaacatttggtggatgcataagctggaagtcaaatttgcaaaatgtggtggctctgtccaccacaaaagcagaatacatggctgcaacgtaagccattacgaaagcaatttggctaaggggtttctcagaagaacttggtttcaaatcaaaagatatcacaatacactgtgataatcgaagtgcccttcacttaatgaaaaaccccatgtaccataaaatgtcaaaacacataaacatcaagctacatttcatcagagaggtcatacctagaaaagaaatcaattttaagaagattggtactaaggaaaatctagcagacatgttgacaaagtatgtcactcaagttaagtttagaatttgtcttactcaacattctcactagctgagaatggtgagaatggtaagtccaaaatagttacaacttataaagtttcagttcatgatatatggccaaggttaataatttttgtgttttggccaaatatcgctctctttttaaattgcccctactgcaactaacttaaccaacttttgttatgacagttggtaatcgagtctacaccaatgcctatataaggtattcgttctagtgaactgggtaacacattaagaaaaccatatagagatagtgatagatttaaagggagctatttagagagaaaagaaagaggaggagtgagttcttgagagctataatgctgtgatgcatttctaagctttatcaccactagtgagattatttgtaacagaagcaaagcttctcaagtcgtacaattgaacaacttgcaatccttttttgttcatcagctaa

SEQ ID NO: 67640 - DNA, 823 bp, Cannabis sativa
  modified_base (676)..(682): a, c, t, g, unknown or other
gttcgatcgagcagatcgtccatggtttgatcaggcgtttgaggcattcctaatggaaaggctcttctctaagagagagcaaaaattcagagaatttcctttttattttcctttttattatttacgtatctatttttaaaggtcagttttttttttttttatatattttttttatttgaaagaaggaatgaatacttaaaaattttggcctaagacaagctgggaaacccctaattgaaaggcaacatcgatctccgccacctcaacatattctgttaataatttttttaagcaaaaaaaaaaacaaattatataattactatatcaccttaatcaatcttaatttttgaagttaattaattacctgtgcaagtgtatatatgattataattaagtttgttaattaataattaaaagaattgcattatttagtgatcagttgagttcatcttctccactttactgtcttccttgttttattttgagtattgctatgattcatcataaatataagtcacaacaatatacataagttatagatacaacgtagactattttaaagggaacatgcataataatacataactcataaattaatctacaatcaaattattcgaaagaaagacaaagtgatgatctatcaagttagttaaatactttattattattattattnnnnnnnttattattattattattaaaaagtaaacagttatgataattacttggttattcaaattttgagtagcactagtattgtttggtgaataattacttggggtatattgaaaatactttttttatttatcaattaattaaatct

SEQ ID NO: 67641 - DNA, 1262 bp, Cannabis sativa
aatatttaaattataattttataattttttaggtacctcacataataatttttaattaatttaaattgttaaatttttaggtacttaattggctgtgaagtgttaagtaaattattacgtgacaaaccctaattaattcaagtcattaaatttttatttttttatttttgaaaaaaaattaatttaaatatatcaataaaaaataacatgtaaatgattgcttgatatttaacatctaagtatttagggatgtttaaaaaatataacttaagtattattaattattactaaaaattaaatttaaatattaattatttaacttaaaattaaatttaattatttataatgtaaattattttattattaggttttaaagctttgaatttgaagttatttaatttttagtcgatgcatgtgtacaccctaccacattggcaatcctctcataagtcatgaccaaacggtctcatttggaaccaatcatgacccacaagtatactacgaactttcttttttatttatttttattttttttattttaaattcagttttgttaatgttcataataataaaaacattagaaaaaaatatatacattaattgagatagcaagtgcacgtctgaattaatgttctaattagattttaacaaaagattccttagaatagataatgtacatactagaagtttagcatatatataattaaaatcttatgtaatatttgaaccgcaaattatttaacttttttcgtgttattataagagcgctgcttatttgatagcataatttttgtgtttgctactcaaatgatcaatgataattgtctttttctttctttgtggctggaacggttgaagatctcgtataattgaaatcttaatttaaaagctaaattggtattaacttataaaacttataaaatagtttattcccctattatcaccccaaatatatattaaaaaaaaaagaataaagggatataaagttcatcctttgctttatttctttatatatatgattttttttttttttgcacaaattgaaataaaaacaaatgcatgcatgaaaaaataatataaaaaagtatccaagatataattgacataaactatatatattacctttgacaagggaaattgaaagaagagagaaaggtaacaaaaattctagtttagacattataacttcatgtgcaagtatatatatatatacatgtaatattaattatatataaaaaagtagtctcaatcatatggtggtg

SEQ ID NO: 67642 - DNA, 799 bp, Cannabis sativa
gagcttttcctgctatttcgtgttatgtttttccttctggtctttcttggtttttaccatctggttctaccttcttcaagcttggttaagcttctacatggtatcagaagcctccaatggagtcctctaatctgtctggtcctgcagtttcgtctggcagagctattgcccaagacaactcgtctcagccctccaacacaactcctccgatatggaatccgttctccagttctttgtcttcttccctcacgatcaagctcgatcgaaccaatttcctgtcttggaaatcccaagttgttcccacggtcatagggcatgagcttgatgatattctattttctggtgttcctcctccgcaaactctggttaatggggctgtcaatcctgtatatcctcaatggaagaaaagagatcagctccttctctcatggctcagatcttccatgtctgaaggtgttcttgcatcagtggccaatcaccaaactttctctgccgtctgaacagctcttgagcaaaaattttccagccagtctcgtgcaagactcctacaactcaaaggccaattttcacatattcaaaaaggtaacttgtcaatttctaattatgttgacaaagttcagtcccttgcagattccattgccattgctagtagttctttgaacactcaagatattgttcttcaacttctaaatggtcttggacccgaattcgatgttgtggtgtctggaatcacatcccgtagtgattctttgactcttgaggaggtccaggcccttctgatgtcccacgagagccgact

SEQ ID NO: 67643 - DNA, 883 bp, Cannabis sativa
  modified_base (70)..(76): a, c, t, g, unknown or other
aagttgttgctaattataaattattattattgtgttgtaactaaaaggtccgtgactaaaagtattagtnnnnnnnattacaatttgttgtgactaagtaaattttaagttacaatatttattgtgtctaaagttaaattagtaacaacttgtaactaaatactatagtttagtcataaataatttttactcacaaaaaacttatgttgtgactaaaaattattactaaaagtagttgttttctatagtggttgtcctaagatacgagtaatgtgaaattacatacttttagttaattcattaattaataaattaattaatttaattttctcttatctattttccacccctcctatgagatataaaattgattgtaggggatagaactattgttattcaattattaattttttttaataatatatataaaaaaaatggtgtagctagagacttgggaacaatataaagagagaaaaagagtttaaaaaaggttggagcaaaacgtgatggaatagtaggattagagagagagagagagagagaagtatggcggcgccgaatctttgtaggccgcgtgcctatagaagaagccaccaaagtggtcccaagatactgacttgttgagaaactgacacgtgtcatgagagagaatttggatttgctgttacgacaactcactgagggccgcaacccttgaattaattcactacttattaatcaaatccacctatccaatctctcacccattcatacatccatatgtatatattgtacacgtgtgtgtatagtatatgtatatatatatacaaattttatacaaataactgattttgattaagagacaactggattccaccatatatgcacaacatatatatagaga

SEQ ID NO: 67644 - DNA, 2928 bp, Cannabis sativa
tgagacccatctaatgtaccacagaatacattccgtgaaagtacattacgggacaaaatcatatccctacatatataaagtttgggcaaattctaccatttactctttcttaaaagggatatatcgatgaattcatatctatttcggtatttgaaaaaaaaaatagtctttttttttaatataatcgtgtagattgtaattatttaagatatcttgtaaattttgagacttttgaaaaaatttaacatgccgaaaataatgttcaaacatgccaaaaattaagagtaatttgtagtgtaaatacctaagtttaactctcacttgtaaataaatacataagtttaattttttatgataataatacctaagttatattatggaactataggtacctagctatcaagtgtcaagttaatggtcacatgctagtttctgattggttcaggttattaaatttttattttaatttaaatatactaataagaaaataacacgacgatattgacttagcattaggtacctacagaagtgtcaaaaaaatataatttaaatattattatcgtaaaaaattaaacttaaatatttatttgtaaaattttaaatatttatttacaataaaaaattaattttaaatatttacgccgtaaattactctaaaattaattaattagcgatcataattttatgtaaataaattgaagatcaaccaacattaaagtgtaacgagcaaatgtaaataaaaatgttaaggtatatggtagacaattatagatgggtttggactttcgagagtaaggggcttttctcgtgcaaatcggcttatcttgctcaagcaaaggaaagagcccctcattgtgaagttgcccaatcactctggaataagttatggaatagcaaaactttggagaggcataagatcctatggtggtgtatattatctaatgcactccctgttagatttgagattagaaaacgctttcacattgaggataccagctatcctttttgtgggttgggagaggaatccatggaacatttatttttgtcctgtgaaatggcgtcacacatctggagaccttctctgtagggcatttatcctgtctgtaatactgggattcgtgtttgggactgggtcaaatttatctggaatctcacaaataggggtatccgagtagaagaaatctttctttatgcttctatagttgttgaaaccatttggaggatgcgcaatgaactcatacataataactctcctcctgatgtcttgaaatgtattgaccatatttgtacttcttatgcagagttacatgatgctttcttgcctagcctcattccttccttgagggagacctggactccacctcctcaagattggataaaattaaattgtgatgtgagggtgggcttagagagcatgtgcacagcggtagtagcaaggaaccatttgggtagtgttattcgttatcacacggctcggttggatttctctgatgtactgtgtggagaagcagcggcctattgtttggcagtttcgacggctgtggatttaggtcttaagtatgtattgattgagagtgactcgaggatagttgtcaatgctctcaatgggactgagtcgcattggccgcttgagaactatgtctccttttgcactaagtcctctccctcttttgattgttgtaattttgtttatgtcagtagaacttgtaactttgttgcccataatgtggctaaatgggcttctacccacaagttgtacggtctgattccgactttgtcggttccgtaaaatattatgtgtaatgcccgcgaggtctaactttgatttgattgaatgaaggtttacgcttattttcaaaaaaaaaaaatattcttacaatttcagtttatatagctaccacctaacatacttttttagctataaatatagtgtgaagactacactttgcaacaagatacaaaatgtatttttaattgattatttgttagtgtatattaaaagaaaaattcttaaaaattagcatagattcacttataaatgttttttgttatatgtaagagagacattcaatattttaattttaattatcaatttaaatgtatttatcacttaaattttaatatagtttgcccctaaacatttcgctccacttctaattaattattatctacatgtcattttcttatatattaacttttaaataaaaataaaaaattaacgatctggaccaattacgtacctactaaagttctaaaaatataactttaagtataattacggtaaaaaattaaatttaaatatttatctataactaaaaaataaatttaaatatttatgtcgcaaattattaaaaaaaattatttttatttattattattatttaaaaaaaaaattgcaacataaatacgtaagtttaacttcccgttgtaaataaatacttaagtttaatttctagcattattataattctgaaatttttgtaagtacaataacttaacatttaaatattaaatacctataaagttataaaaatataagtagaatattattacggttaaaaattaaaattaactatttattttatagtttaagttaaaacttatttatttatgtgtttaaaaaaaatgaaaatataaatttgtaagaaaggaaggaaaaatggacctctttctctctctctctctcattttctgcaaaaccctcaaagacacactctgctacttctctttctctctctctctagaaatcggccatgggagctgggcgcgagctccaaatctcgttggatggattaagggaaaagaatcttatgcagctaaagaagctcaacactgctctttttcccgttcgctacaacgacaagtactacgtcgatgctctctcttccggcgaattcaccaagctaggttcgattccatttcattccc

SEQ ID NO: 67645 - DNA, 726 bp, Cannabis sativa
aactatctatcaagtaaatttcaaagtcatgaaaggttaattttaaaacttcaaaaagcaaccgtctgaccgacacccgcgatcgattgaaaataaatagtctgtctctctcaaagtagttggtttccctgtcaaaggaatgcatccacccatcgaaaaagaggagattttcaaatgggatcgcaggtgtccgtttgggataatctccatcgaagttgttcgtcacctcgaggctcgagagacctttccttagccggagaaaaggtcgggcccgaagaagaccttattaaaagagggaggtgtaggctattcaaccccgggtaggccccttggtaatccaaaactttttggacaaacaatacaaaatctcacacagtggcaaaaggcaacaatcaaatatctttgaacttttgaaacatctaaggaaacattgtttatatttctgagacaacaaaagttattttaacttttgaaaaagcaaccagcaacaaatttctaaacaacaattattctttgtcgttcgaaatcgtttaaaaataaacaatacaaatctcattaacagtggcgaaagataacattccaaaacacatttctatcaagtaaatttttcagacaacaaaagcaaactttattctttaaaaatgcaaccaacagctaattgcataatagttattatataactgtctatcaagtaaacttttaaggcatcacaagtcaattctaata

SEQ ID NO: 67646 - DNA, 847 bp, Cannabis sativa
aaaaaaatggtccagccaaataatttcatggacattacgggatccatagaacacccagtagatattttcaaatcaattgcatgtatagaaaaacacacgcttatagcaagaagatgttcacggaaatatgctgattagattggctctgttcatctagggttcagggagtttaaacggataagatttattttaatgttataatctgtgagtctgctgtgtatgaaaacaaattcaacttttattaagatgtaatttcttgtacttaataaacaaaaagaaaaaaaattagaggcaattaatcagaatgtatgggttctctagcgtggcataataagcataggcatgcgcatgaaattttttataacgatatatggtaaatggaaatggaaatattacaaatggtataaaagctttgggaactagacttaaaatttaaagagaatattaccttgtactttcctggccttgagcagcctacccggtaatcagaatagctattagaccaatgaaagttgaagacgaaaacaaggtttcccctttcaaagacaataaccctatctgtttcatctttccgggatatgtattgatgctcagaagtcatgaactgcattgagaatttgacccaatgtatcaactttttattcagtcatcaccaagattaaaagtgacacacggtagtgttcacctccacgtttaaagcaaattttgtttaaaacaaatcagaaaactatagatttcacatgaaataaaaataagtgcaaaaatagataccacagaaactggacaagcatttgacaagcaaattattatccaggccactgggaactgaaattcagctagaaaggca

SEQ ID NO: 67647 - DNA, 799 bp, Cannabis sativa
tcggatagtcggaatcccttaggccaccgagcttgtcgtacttctgtggtaaagggagaagtcccatacagcttgtaaatgggctttctctgctgctcgattatctttagtgcctacaatagaataccttaatcgatgcctcctggtaagacgacgttgttctaagtcgtcgcgggtgtagttacaacggtagctatatttattgggataactactccagtagtcgcagctggtgcggcaggcgggttggcaagattgtttatgccctgatcgcccaattggggatcacgaggcttttcatcattctagggcatctgggaacgcaccctaaaaattgcgttaaggtgatcacgaagatcacccctatgagcttggtatcttcctcctcgcggtgtctctaccgaacccaacctagtataaacgcttggagtgcaactttgtgagggtgaagagtcggactcggcgtcatttacctcattccgcggctgggcctgctacacgggttacattgttctaggtcctcttcttgttgtacctcgtggcggagctttcatgcggctggatccctcagcgttggctgattcaagtcgatcccaccctggtcggtccttcgttccctacgagtgcggttagttcgtcgtctagtattagttacctgagagttatccgagcgggtggttggtactcgaggtggacgtcgagtcctattttgtccatcaatctcagcctgtaaagcccacatttgatcttgtaatgtcgtgtattggtcgatagttagctagacaatgccttcaaatac

SEQ ID NO: 67648 - DNA, 1644 bp, Cannabis sativa
  modified_base (884)..(885): a, c, t, g, unknown or other
agtttttttcctcaaaaaaaaaaaaaaaatcatatccagtataacatacatatatagtatacatatatatataagatatattagttctaactactccataattgatgagggcccacttgaaactttgctgatatatataatataatacaatgtatatctattcatatcatatacctatataccaagagcaagggatgtgcttagaaaagttaagcaaataaataaataaataaataaataaatattggacaagtaatccgattgtattcacatggaacatttttgataagcaatacaaacgccaggaaagtaggcaaattattaaattaccactatttaattttcaggtcatatataataatttatttaaataacatcacaatcattaaaattccttacataaaactttaacacgttgcatcccttaaatggttcccaaatcccaataccacttaattatgttacttaatcatatacgtgaccaacataaccatgtgaaattactaaacatcactttttatagttgaataaaaccttggtaattaaaattttataaaaccgtactataaggtgaatatatataagattagttaggattttttttctctcaattttaacatgtattaaattatgtttttaatttcgtcaaaaaaaaaaattatgtctttaaagtagttaaaaaatattatttgaactattgagattgttgaatttaaggattttgtctaattttaataaaaaaattctaacacgaatgaaagttaaagggatataatttagtacatgtcaaagttcgagggacataatttgatagatatcaaaatctgaggagcatagtttaatacataaacaatcactcaaatagtaaaattgaatgaaattanncaaaaatccttaaatttaacaatcaaaatagttcaagggaatttttaacggttaaaaaattcagataaaatataatttaatatatattaaagtttagagagtaaaaattctaattaacttgtatatgaacttcgaaaggattttgctatgatttagaagaaaaaaaaaggattttgctatggagacatatatgattctaagtccacgtggtcacacaccccatttagtagcataaatatatatggtgtcccctaccagatcaccatctctgctattattatatttgacctacaaaaccttcaataattcaaatttcaaactccccattctctctctcaactaaaaaaaattcaaactccccacttttattctttatttaattaatatgctaataacttgcaagaaagtgttgagaaactaataaagaatacaaaacaaaacaaaaattattaagaaaaattgtgttatcatataaatctttaatgatgcagtaatattttctttagaatttttgtaaaagtagatttcaataatggcatgctaaaaaaatgggttaaatatgacaaatgctaaaaaattgaattcatctcatattcattgatgcatacattataattatagatatattattttaatctacaacctgacagaaaaaaaaataaaaaaaataaaattactttgataactacgcaatctctttgtaaaaggaaatttgattttctatacttacatatacctaatattttatttctaaactaa

SEQ ID NO: 67649 - DNA, 1254 bp, Cannabis sativa
atttatctttatagtaagagtccaatttttcttttatctatgacctatttcaactcaaggaccgtcccaaggtcaaaaatttgtatgtagtgcacttttatgcattaaaaaatcgtatttttttttttgtaaatttttgtcaaataagcctaacaatggtcacacttcactctagatataacacaaaaaaaatattcttgaatccattaatactcagggctgccctgtatatatacatatatacacatatattgagatagttgtttgaagttaaatcctcgtgtcaaaaattatggagtaaataattattcattgataaaattacatgacacttataattatgtaaaatatagagttttccacaaatttcaagaaatattatgagcaatgtaaaatgtaactaaaattatgatttaagagaagaaaataagtatttaagagagtagtatacagagtatttttgattgactagattaagagaagaaaataagtatttaagaaagtttaaaagaagttaaacacctaatttttttagagcgtttagtttataagtcattattattacattaaccatgtttaagtccctcaatgggatgcttaaaaagaacaagctacaagttttgagtacgggaaagaaaagggaaatcattttgcattattcaggagaagagatcacaattagcaacaaataaaagtacttgggctccaagctcgtgctgctaccccgctatgttcggccctattcttctattttgttgggccaccacctcatagttttagttttagacactttcttaaaagacttcatactaatgaagtaggtagaacacttatattgtaagcaactcttgtttatttttttaatgtgggacttaaattgataccccgacaattatagcatcccctagggctactaattaaagtgttgggttttgttattgttgttgttgttgttgttgttgttgttgttgttggttttgaccattcatgaccacagactcacaactattgtccaatcgcagggacaagctacaatgtccttccattttaggcaaatgtgaggacccacgcctaatgtactacccaaacgcgttgcttccacttttcctaaatcaaagaaaatcaaagcgttaccccaacctattggctgccctggagggtaaagtcctatcggatggtagagaaattcaagagcatacttggcaaggagcttcctttactaggtttgtagtctttgtcccgacatatcttgtt

SEQ ID NO: 67650 - DNA, 760 bp, Cannabis sativa
gaaaaactagggttcccaaaattgtgccaaccggtagaccggttccctaaccagaattctggttctgggaaaaattcctagaagccaaccggaattcctgttccgacaggcctccctgaaccggaattctggttcattgcaggaaagactaaaaatttcataactcgaccaaatcaaccccaattcaaaataataaactacaaagctcgctcaaacaaaataacaacctctaaatgaagcataaataaacataataaaccataattaaacctctgaacacaacaacaaacaagtacagcaaccacagcaaacaaacttcaagcatgcaaaactattctcttccttacaactcaagaaatcaaaaagggaagttacaagaagcttaccaaggacttgagatcactaaatccttgagagaaaatcttgaaatccagagaaaaacaatccaaccctatctactctaagtgggctgaaagagagagagacttgagagtgaaaatgaagttattttctaacttttctaatttttcataaaatgagtaaatgaatgattttccttaatttattacatttcttcagccaaactaagccttaaaaataagatttaaaacttaatattaaaccctcactaaaagaccataatgcccttgcctatactaaatagtcacacaaatcacttagggtattttgggaaaactctaaattcctgactatactcaacattcccaatgtctaactaaactaccccgctatacaaaaa

SEQ ID NO: 67651 - DNA, 965 bp, Cannabis sativa
  modified_base (147)..(149): a, c, t, g, unknown or other
  modified_base (267)..(273): a, c, t, g, unknown or other
  modified_base (723)..(724): a, c, t, g, unknown or other
atagtgatatagtgccatgcccacacatagcaagtcaagtactcaatcatagcgcgaaagatggtggtggtaaccaacccgaaggagagaaagagatccaggctcaaatattgataatactctgcgatagaaaggaacaagggttannnatctgagcggaaggagtcatattattttactgcaatgaatgtaaggttttctaaactcttatgtgtttaatttcatcgaattagagaattcatatttaggatgttaatgaaatatacnnnnnnntaaatctagatcctggtataataaatcccaacagatagcccattaagatgctacgaaaatatctactttcaaggggcgatttgatcatttgtatttattagtttaatatgtaaatatctcttattttattggctaattagggtttgagctctcctatataaagagccttaattaaaccctaaaaggctaagtcttatttaagacataaagctctaagtctgaaaccctagtcctctctctctctctctctcacagacatacacacacacacacgcacacacacacacacacacacacaccttcgatgctccatctctgtctcattagagatatgcctactgattcatactttgtcaccttaaagaaagttatattagatcccacctatagtgatctgaatagcattgtctctcggtatcaatatgactaaaaggagagtaggtcattacnngctaactaagggggtcgaacctttataaaattgtgtgtgctctttatttttcaggctctaattgtgtaacacgtggcaaacatcagattaatacgaccccgctgtcaattggccacgttttatggtcaacaatgtgtttggtcattttagttggacgacttggtcaaacagaaaatagtggctttagtatttcttgatttagctataagcttttcaaaattgtatatggcatggttttcaa

SEQ ID NO: 67652 - DNA, 684 bp, Cannabis sativa
cttcactttgattcaactaccttgctttggttccaacccccacttcttactctgacccttccaagctttctctctctctctatcgaacccttgcgctcaacgcactcactctttttcctcttcattttttttttgtccgcccaacctatggaagtaacgattttggatgtggtgcatgctcatgttatgatatatatatattcatgtatatagaagatagcttaattataaatatattttccttgtttggaatcgtttaagatgtatatacatacatacaatatatatttgtgtgtttgtgtataattatgagagggaagatatgagaatggatccattttgatttagttttttaagatttggaaaaagaaataaataaatgttgaccaaagtattgcattaagcacagtattcataatctttttaacatgtacctatactcttcaaaatgaactagtaaagagggcagaagaataaacgaattatatactatagccaacagttttaaactataagctatagttttcactttgttgacagttttaacccgtcaataattgtttttcgccaaagtttttctacagttgccgacaattatagaaaccgacaacaataaattaaccgactacttaaaattgtcagaaaaatctagttttttaatagtagcttaaggtatctacacat

SEQ ID NO: 67653 - DNA, 1462 bp, Cannabis sativa
  modified_base (1157)..(1158): a, c, t, g, unknown or other
  modified_base (1430)..(1435): a, c, t, g, unknown or other
ttgcttctcttttgtaaaaaatataaacatcattgatacttcgcaatatcccaccaacatattaccaagtaggtagggttggtccaaataattgcctctaaatgggttctgagatattttttcctcttttagctatagtaatgcttttttttttagtgattgaaaaacttcgtagctaaagctcttttttgtagtagtgcatgaggttctcataagagtgaacacttacttgaaatcctttcttattttttttttctagcaaagagaaaaatagaatgagtctgttgttgtggatatggatgcaaagaaaaaatggacaaaagaatgagctttgtgaacaaagtaaaaatctaatcaaatcaaatttaagaaaaatgtgaacttaccttgtgccctgcattgccaatttggttttgagggacaaccatagtgatggccttgtgcgtcgacagtgtgagggtcttagaagaagaagactgccattgtggtagtgttgtgaaggttgaaaaggaaatggagtgagagagagcagagtgtgaaggttgaagaggaaatggggctctcgaatctagttttttttaaaaggcggggggaggaaaccttggcccgacaatattgtgcccaagtgtcatggcccattagtcaattggcacgccatgtcagagggtgggggtacaacatagtcgtgaccatgtgtaaatgcgagaaaaatcatgcctgacccaacgctcggttaacttttggagcacgacaatattgtgtctaatgctattgtgttgggccaattgtctctaatttttttttaaaagaaaaacaaatggcacgacataaagagtattaccaataataatatgttatgcgcaccacattctgccgtgccccatatatgaacgtatctatatcctatcacgttgtagttattagagttacacaatttgagattcgatcccatgacctcattacacacacactccatggccaccggagctaatcttaagtctccaagcatccatatattatagggtaaatactatatattttggaccttgtgtattgtaaaaattaccaattggactctctgctttgttaaatgacaaaatagatcttgtattttccaaaattatacaattaggacccttaactgattttttgtcaanntaaaacttaataataattcgatatagagatgttatgacaaaactagtcacattttctataactgttcgtgttaaaaaattgtcttaaagttggttttattaaaaaataaaattgttgaaaaattgagttcagagttctatttttattattttagaaaatatagatttcattttgtcatttaacatttgataacttttgtaaaacatatgatctaaaatagtatttacctatatactatatagggatatgattttgtcccgtgatgtactttnnnnnnatgtattccgtggtacattagatgtgt

SEQ ID NO: 67654 - DNA, 1279 bp, Cannabis sativa
acagaaattagttaggtgtggattgatgacttgtcataatccattccaattaatttctgttagggattaggtttgtagaaggcctaaggccactgtagtaattttatatatgtattttccctataaagacttaatgaaatgatatcagtgtaagtggaggtttatctaacaatttctacctaaaccttcactgaattgatatctaagtagttaagccaaatctgagggtcattgctctgtgatcctaagatcacattatccttggtccaaccctattaagtttaaacaatgtttaaacttagaatatggtgattaccttggttcccatatctgcaagattctcttctgtgggtaccttgtctatgttgatgtgtccttgtgtcactttgtccctaataaagtgatacttgatttcaatatgcttagtcttatcatgaaacatagggttctttcataagtgcacacaactttggctataagagtatattataggtgtactatctaggagttttaattcttctaggaccccttttacccaaatgctttcctttatagcttatatagttgcaatgtattcatgtacaacgccacaactggctgtaattgaaccttccaactcacacaatttcctcccattagaagtatataggcaaatggggatttcctactgtccctgtccccaacatagtctgcatcaatatagcattctatgtctgtctttccttgttgcttcttgtatttgagtcccagtttagttgtcccaattaagtaccttagtaaccacttcatagcaagccaaagtgtttttccaaggttggtcatgtatctactaagtacactaatggcataagcaaggtcaggtcttgtgctaaccattaggtacatagcagatcatatagcatttacatagggtatcttactcatctcttcatttttagctttggtttcagggcactatttcttagacaaggtatattgagtagtgataggttggttggaaatctttgaacccttcattgagaatttctcaattattttgtgtatgtaataatctttctgtgttaggctaagtgtacctcctgccctgtttcttttgattgtaattcccagaatattagttgctttccctaggtttttcattttaaactcagtcttgagtaagccttttatggtgtttactctggccctttctttgctgataatgagcatatcatctacatacaatattagatatatgactttctttatatcagtccctttgtagtataggcagtgatca

SEQ ID NO: 67655 - DNA, 700 bp, Cannabis sativa
tagtagtgttatttctttctttcttcatattacaggaaaatttaatatgtaactatatatattccgtaaaaaagatttagagaattaaataataaaatttatttgttttttatatgatagaaaaatataatcttttttgacaacagaaaaaatctaatatttaaattaattgtattaaaaaaagggttttttcatataaaatatctatacataataaataatattaaaagatttattttaaaataattatcaaatcaatttgttttgataattatatattttatataaaaatttatttaatatatatctatatgtttaaaaatataatgaaaagtgaactaacactttacatccgcctatttctttaaaaaaatcacatcagaagttttataatatgtaattaaactatctttacataaattggcttttgttaagagtactaaatgaattattcaaagtaataaaaataaaaattttgatttgagaatagaataaatcttctcttttaaaaatttatttaataaacatataaaaaacacggaaagaaaataaaaatttcaaataaaaatttataaacttacattaaaagtaattttaagtgtaaattttaatgacgacataattatttgttcaaatatagttaaaactaagttaagcaaacttgtactttgaatgatagcttcttctttttttttttttt

SEQ ID NO: 67656 - DNA, 779 bp, Cannabis sativa
taatggtgtttgacacaaatttttaaaaattatttttagattttttcttacgaaaaaaatcaatattttagcaccataccatgacattaacctatctgggtctaggtctgggtatggtttcgggtctaggatccgagtatgtgagcaaaatatataatataatatgttaaacaaaaaaaaaattgtttttaaaaaacagtttttgaaaatttttgtcaaacgactcttaatagtttttaaaaactgttttcaattttaatagacagaaaataatttttaactgtaaagccaaacagcctctaagctcctcaaagtgtttggttgttcgtttgttaagaccatattagtcataaagttacttttggatctttcaaagttatagagcttcaaaaatggagttttttaccaacttatattttggtcagcaaaaagccttagattaattgtaatttttgcaggacagcttaattttgcattggcaaaagtagcgttgtcgtgtcgacaccaaaaaataacggtgaaaatacatattatattggtgacgaaagatgcttgtggttactaaccctcttgtcaaaaatgtgtgtagactagtaaatgcagttttttccaggattcaggaaagtgaatttatatgtttgagatttctgacattctacaacattcaatatcattgacaaaacacgtgtattaattactagagaaatactttgtccaaaaagaaaaatgcatattactttttttttttatcatctttattaattacactccatagtgat

SEQ ID NO: 67657 - DNA, 1301 bp, Cannabis sativa
atgatcattctttgtcaatttttttagtatattatttgggtttaactaagaagtttattattagttaaaccttatttaatatggatatttaaatcgtcaaactttaaaaataataacaataaaagaataattgaaaatgtgtataaaaaagtgtgggacaatgcatgccatttaaaaattaaggtcatatagctaattaaaagaggcaataatattattttctcatattttatttttatataatactctactatatgcttaaaataatgtatatcaacatttaacatttttcttctttccaaacaaaatatgtatattttattttaaaggggtaaccttattaggggtaaatattaaaaaattaagaatgttaagtaaaaaatatattctatttaataaattatgaataatataataaggacatactatatattaaaatatgaacaataaaataactcaaaattacttaatcattattacccataataccaaaatttattaaggtttcatacctatagtaacacgattacatttgatgactgaccctacaaaccaacacgagtttttttagcatatttcgtcctcactcgaatatttttttttttttataaaacttcccaaaaagtcattcatttaaaaattgctctaggtcaattactaaactttagagttcttaagtaatggagttactaaaaaaaaaaaatatatcttgttaatataaataatactcataaattcatttaagtcatctttcactatctaataatctcatacttacaaaattttagagcatcacacttaatttttttcaaacaatataaaattctatagcttactcaatattttttcttatgatcattaacacgttaaatatagaaatatagatattttacaatatatcttatattattgtatatatttttacaaaagaaagaaacaaaccaaattaagattctcattgtatatatataagacataaaaagggattagtatgtcttactactttatcaagatattatcatacaccccataaaatagtaataataatttatacaatattatatatcactcttaattcatacactaaaagccaataacttacctagaattttttatagaacctgtgaaaattacactcatatttttccccctaataattaaacattattatcccctatatataactatattatatcataaaagtgttatccctttctaaattatggtcaatttatttattatgtttatgggaagtaggtgacaaagtaggtttcaatatttggaaatgtattatatatata

SEQ ID NO: 67658 - DNA, 1673 bp, Cannabis sativa
gttggaggtttttttttttttttgtgagaatgattcttgtgattttaattctataataggaagtaaatttaaaggtttcattttttggtattgggttttatgggttgttcaaaggacccatcaattttgtaattagaggaataatgcagtgcatttatagagcgagacagcaagttttctttttggattctggtatgtgatttttttgatattacggtagaaatgatgacgtgtcacgttactaaaagattattaattaatcaatgttatttctgttattagtatgtatattacgtatactaataaaaatttccctttaaaaattcactacaaaaatcttattttcagttacaataaaatttgtgactaaaagtaaaatagttgtgactatttataaatcatcattcatatgttgtgactaatctgtggctaataatcacaatttgttatgactaaatatatttttagtaacaatacttggtgtgactaaaattaaattagtaacaagtacttgtgtctaaatatatattatgttttagtcacaagtaattttttgttgtgattaaaagtcacatttaaccataaaaaatttatgttgtgactttatcattataaagatagttgattttttgtagtgattataaaaaattatttcaaaatttataattttttttttaattaatatattatttatttctattataataattttaatttagtagttttttaaaataaattttaaaataataatattaggtttaccaatataagtgtgtcatatgtacaatagacataagtagttcatattgcagttaattgtgaaaaatacatgacaccctaaatttacaaacaattcaatagtttagagggttttattgtcaaaatttaaatttaaaaagttaagtacaaataaaatgatagtcgaagagtttagccgccaaaaattcaattcttaatcggatggggctttatgaactttagttgtaactctttcaataatgcaatacaaaaaaactcatttttaccaaaaaagtgtaattttttgcatataaaaaatcgattctcgctttaattattttatataatataacactacaagaaattttacttttagtcacagcaaaatttgtggctaaaagtaaaatagttgtgactaattacaaatcaccgttcttatgttgtgactaaaaatattagtcataaaaatcacaaattgttgtgactaaatatgtttttagtcgcaatacttgttgtgactaaaactaaattagtgataaacttgtgtctaaatactatgttttagtcacaaataagtttttattgtgactaaaagtcacatttagtcacaaaaaatgtatgttgtgactaaaaaattgtcactaaaagttgctattttttgtagtgtaatatcgttttaaaaaattttacaatgcaccctttgaaaggattgtcccgatgcacctttatctgtttcggtatctagaaaaaaagtgtagtccaatttttctttatgatcgtatacgatgtagttatttaagacatcctgcaaaatttatcatgccaaaaattaataaagttcaaagattctgttacacgcatgacttatttattttatacgtacgtgaaatagacagtttgaacattgaaaactatattgtaaattattctaaatt

SEQ ID NO: 67659 - DNA, 852 bp, Cannabis sativa
cctatctatagctagctacatatacaaatttagggtcatgacacattttaaagacatgcaatacatttgagaaaataaaacaaaatatgagacaagaaaacataccctaaacaagttacaataataattaataattaaactgaatatattaagctcctgatataagtggcttacataaataatatacataattatgattgaggagtgagataatatattaatatataataattaccgtagagttggaagaattgataatcttaggtttcctttgccaaatataccccataattgtatgtctttagtcttctaattaatatattgagaaagatatattagatacatatatttgctgttatattggccccgttatatatagacaacataataacatgcatgagtgtagagagaagcatctttttctttttcctaagggtatataccaatattttgcaaaggtaaccgggataagaaagaatatttttttacccatttatgtccccacacaccactataaatatatatagatgtaaacacacacacacacacacatataatatctactactgcgccaagtcccagtgatcaacttggttgctcagagagattttgggaataaaggcatggcaagtgctgcaagctggggacctaataaggaatatctcatagggtatctgcgggtacatacctttacaagaaaaggagaaagatacacaccactcatgaaaagagaatctctgggtcaaatatactagctatactatattgcaattagttttacataggatagaattacttattcataagtgtataaaaagtgcaaatatgagatttgagtttggactcaaaggg

SEQ ID NO: 67660 - DNA, 605 bp, Cannabis sativa
gtcacttagaagggcaagtcttttgagatggatgtcccaatcttgaatgccaaagatcagcagtcacagagaacacatgagcattctgagttgaagtatccatcacatagaggccatcaatggccttacctctgccaatctccttctggctggacttgtcctggatagagaaactgtcagcatgaaatttaactgaagcagccccactgttagtcaagcagctgacagataagatgttatatttgaaacttggaacaaaaagaacatcagagagaattaaagattcattaatagctatagatccactttgatgaacagaaatataatcattatttgggagaagtaatctggtttttagaataggagagacatattgaaacatttttatattgttacatatgtgtcgagtagctccggaatctattatccatgatttattaccaggagcaatatgatggtgagatagtatgatacctgttgttcctgaggaagaactaggatctgtagttggcataccagtttgttgatttgcaagaaggtttaaaagctgttgatattggagggcattcagttgtggcaaaacagtgtgactttcatcattggga

SEQ ID NO: 67661 - DNA, 918 bp, Cannabis sativa
agtaacttatgaagttgttgataatattgaattttgtttaagctttactattatttacataatgattaaaagaaactaaaatgttactatactcattttggttatcatttccagggacaacaaataaatatatgattcttacatattaaaataatcaatttaaaaaatatattataatagtgtaatttttgagactaaataattatcagtgtggtaaaaaaaaattgtttacacataaaaagaaaaaaatgagagagaattcttttcgtattaaaagttaattacacatatattaaagtaataaattaattaaaagtaataataaaaaaaaattgatgtgcctgtttgaaaattttttttattaaaatttcaaaatactgataaaagttaagtaagaaaaaaaataaaaaagaaatgaggaaaaaactttttatttatttatttcaaggaaaaaatgataaatcaatcttttgttatttaattttttttttcataattatttggttacaaatgagagtagggcagctagcaagtacaacacatgagttgataatgttagagaagaaatttgcattaaaaacgaaatgagctacttcaatctaagaaaggtgaacatcggtatgcgtgtgtgcaattattaaaaaaaaccgacattagggcattcatacaattatttttaaatgcacgtatctccttacaaatatctctttttttaaaaccatcaagtttttcattttaaaacaacaaatatatgtgaagcaaaataaaaaaaagtcaatatgacaaagctaggaatcgaactcactatctcaaacatatgataatgctcatacactaactgtgctactgcctgttcatgcaattaaagaataacttatttatatattataatattctgtacatatatatatatattat

SEQ ID NO: 67662 - DNA, 814 bp, Cannabis sativa
aaaaaaaaaaaaaaaccttctcctattctatgtgtgatgctaactaaagttgaaccaataactctaaagaaacttaaaaaaaggaaaaattccactttagtacatataatctcactttattacattaatctcataataattaatttctttcatttttaacttatatttttatattattattatttatgtaccgacttctataatcttattgtatttataacttaattgtgttataaatcataataaatgcaaattctttaaataaattaattaaaataataataattttataatatttataatttaatatatcactatttaattctttttttacatgagtaatttttgtgtaagagggttgtttgtacagtattactttatggatttcatagaataaaagaaaaaaaactttaatatatatgaagatatttgttcttctagagagaatcatctttggatcaacatatatcttaaaaaatacattatgtgattgtatatatatatactaaaaggtaatattaacatattttataaaaatatggtttattattatttaatttcatttttaacgtattttttatattattttactaagtatttttaattttatattcccattagatttaataaaataaaacgtataattatagtacacaataaaaataaattttttaataaaaataaataataataaactatattttataatatatattaatattactttctttcgttggattaaaaactatgtaccttttagtatatactaggtgatttttacgtgccaaagccacgtagtgttagttttatttaa

SEQ ID NO: 67663 - DNA, 598 bp, Cannabis sativa
ttaatgcttgatcaccattaataagtatagatattttaggtttttctaaaatcagacttagaattccatgacataggaaaactgtgagattgacactaattctatgagtttcatttaaagagaatcatatttgctttattattgcttaattgattaacattgaatagagatatcttattagttaacttgagagaggttaattgtttacattaggatttttaaaactacaaattatagaataaattgggataattgttaaactaggattcatagtttaaaataggaaaattaatgctctaagtctttactttctgaataaaattgatccatgtgggttcgacaatttttttaaaattaaaactttattataacaatattgcacgcttgcaataaaaattatatatcagtaaataatattgaaaagaatgtaattaatagtgacctaaattatataaactaatatttaagtgcagttgaactacattaaatttttcttttagtggtgtaaaactcaatattagtaaaacaataattttgttaccattgttttgttaattttgttaaatgttgatcgattagatttattgctccaaccaat

SEQ ID NO: 67664 - DNA, 749 bp, Cannabis sativa
ttccaactcctccttcctcccacggttcactaccaccagaagccaactaaagaaatctacatcagtagcattgccaacatcgaccagtgacctgttccagcaagattttgccacaggacaattaacaatcgcatggaaaatagtctcttcttccacattacaaacagggcagattacactgatagggacatgcctcttctgcaactgaacacaagttggcaaacatcccgaagctgccctccataagaaattgcagacttttgggggtactttcaaactccaaatggtacgccagaaattagaagattgatcatcagaccaggcacccttaagcacttgaagatgtctatatgcgcttctgaccgtataaacaccattattttcaaatttccaacaccaatggtcctccaatgcattactactcagctgaatagataaaataaaggactgatctctatcatcaaaaatatcccgaataacctcttcatcccactccttcaaaccaactttcataaggctactaacaaattggttagacaaagcctgatgcctagtcaacacaaaggggttaacatcaggaatccacgggtcatgcaatatggagacagattcaccagagccaatcgatcggcaaacaccagaaatcagcaggtctttagcttcgaaaatgcttcgccacacaaaacttgggttgtctcccaattcagccttgagaaaggtggcacttggatagtatctagctttaaaaa

SEQ ID NO: 67665 - DNA, 710 bp, Cannabis sativa
ttgtattgttagatctattaggtctttgttatttgtctttctgggtgtatgtcttcttcatgtgatgcgaaatggtaataccgctgcacatgagttagcaagatatgcactacagatggaaaacgagatttcttggttggaagaaattccttaatgaccaatatattgtttgactctcagcaataaaattggctattatgataaaaaaaaaatagattagcataatttaagtggctaaatctaatttaagcatctatggcaaatttctctttaagaaaagaaaaagagaagaaattatatgtgattatgttttttttttgaggggattttttcttaacaaagattatgttaacattttgatttgagtgcatatgatgtggccaaaagtaccacacatatgtctaacaactaactacgtgaaagtgggtttttagccaaacccgttttcggttcaattcaaccattgccgagttgttccaccgcaaatgttggctaccggcggcggcggcggctgctctcgtgtctctctgcacctacgagagtgtgaccttagcttaggtctttgcagttccacaatagcccaccacctgtcccgctcttctcctctcaacacttctcggaatcgaattccgcagaggatgatttcttcttcgctcatctaccataaatcttccactgaggttcctcttctctcaacttgtttcaggttt

SEQ ID NO: 67666 - DNA, 1495 bp, Cannabis sativa
taagggaatctctgtaatcttcataaaagtgaagaatagagtcaatacaatgattcacattatccatcctgttattatgtaccttatcattctgaacccgccagatcgtgtcaataacaatagacgcgttttctccggagttaatactttgattgagaaattaaaataatttttattattattgatattgaatgatcattgagggtgtagattgagtgctaattatttttcaatagtatattactatttttatttgctttctagtttatgttatttaatgtttatatttaaaactcccatttttaattcttaattctaatttttgaataataaattgataatattcttcgtgggtcgacttgtatttactgttatactaaagtaacttgtaatattaaaataaaaaaatggttaatttattgtgacaaatgacacgcatcattagtgatgatactggtttgtgtaagaagagaagaagacggagtgaaatggtatttttttttttaaagaaagagagtttaattttttagatttattataacttatttattttagaatgtaattggtctttttttaattttatcattatttatttttcttttaattttagaattatttcataagtttttttaattaaaaatttgagtggaccactaatatgttgacatgtgtcaacttaatctgttttaataggatttaacaaactggaagtgatggaaatgtaacttaatggcacattaactgtagttagaatctatttaacagaatgggtgaaatgaaagaaaataaagtattaaacatacggaattaatattttattatgttgtttactaaattgacttgaaagggaatcaaactcattttattttgcttacaaaattaggaaagataatcggaatagtttagatagactaaattacccttcacagaaaatatttatttattttatttctttattttaaaattaaatcataaaatataaaactaaatttataaataattagatggtatatatgtcttttaattttttcatataaaaaattaaaaaaaatatattttttacccgtaatgtcattacttgaccaattgggtgatgaagttctctcttatttttctcctttaggtaggagccaccaagttttataattactgagtaaataattcaatggaaaatactctcttacacctcattccttttctaacaaagtaaacatggcataagtatttaatttgtcaaaaatatataaatatatatatgtgatatataagtgtataaaattgaaaaaatttaggtattgatgccgcaaatactgttagaatttagaataaaagaggttaagatgaatgaggttccatctcaaaactaattgacaatgagaggagtagctcattcatcttatatatgataatttatttccatacattagcaatgtaaaactaactctaatataccctcctcacgtttgggcccaaaagtgtgggtataacaaacaac

SEQ ID NO: 67667 - DNA, 885 bp, Cannabis sativa
ccctcattttttatactttgtaggttgtgagtagagaaataaggaagattttgactgagaaggctgccaatttcaacatcgttctggataatgagtcaatcattgctttatcatttgggagggaatttacaaatataattgaggccaaacaagtgtttgtacaagaagctgagagggctaaacaagacaagtgctattatcagagctcaggtaagaaggaaaacaaaaggctaggctctcattctgcatacaattttcatttgatcatcaaggtgaggctacaagtgcacaactgatgagcaaaactattgctaacaatccgatatttatcaccctaaggaagattgaagctgggagagaaatcgctcgcacaatttcaaaatcttccaataaggcttatctgaacacggatgatctcttgctgaaccttcaggtgatgaatttggagcctgctgtgaaaagataggcatactatattttgagttgtctcatcttttagttggactggatttattaatagttcagtgctacaggccaagtgatcggtaaattccacaagtaaatgtcttttaatagtttatttgcaagtcaacgactttcacaacttacatctatttaagatttgttttttattcccgactgttcctacaagagttgttggttcgtgatgaaaaaacataaatacattttttcttaatatttggtaaaatcataaacatttacactcgcaaatgcaagagtgcaatattttggcctttagtaaaaaaagagtatttgtttagacaatctattgggaccttgaatccaaagatgtcaaattacgggcaaacatttatacattaatttataagagcttcgccaagtacatcaaagaaattaacacaa

SEQ ID NO: 67668 - DNA, 776 bp, Cannabis sativa
gcctggaggagtaggaaacagcctgccatatctcggtcttgcacagaatcatgaatacataagtgttgtcaatgttactgatgaattaacttggctacattatttattttctgaatttggagttgaattgcctcaacattcaatcatttggtgtgacaacctaagtactgtttttctcactcaaaatcctattttacatgcttgaacaacacatagagcttgacttgtactttgtaaggaaaaaagtgatggataaaatggtgcagatcaaacatgtcacagtctatgatcaactagttgatggattaaccaaagccatttcaagtcaaaaatttttggacttcagacgcaaactcaaaattgaagactttttaattatgagttcgaggggaggtgttggaagagacagttaagtctgttagtctctaggctttagttagttagtgatatcagctagttagttactctattatacaaatttttctcgttctaactttctacaaaccaatatttaatatgcttgcatgacttacctctctctattaatatcaacaatgcttgctttgaatcaacaggactttcaaattgtaatgaaatggcttaggtacattgttgaaattcatttaggttttattataccacaagcacattatgaaccaatcaagcactcatatgcaaatacactatcccataattcacaaagtttttaatgattgagggcttactaataatgttccaacatcactatgattatttcaactctctctctctctctc

SEQ ID NO: 67669 - DNA, 704 bp, Cannabis sativa
gtcactcatatttatttagtgacagactaatatttttttagccacaacctaaatatatttagccacaaaaaaaattgtgacaaatatttctttagtcacaacaaaaaattgttgctaatatttctttagtcacaataaaaattgtgactaatatttctttagtcacaaaaaaaaattgtagctgatatttttttaagtcacaataaaaaattgtgacaatatttctttagttacaacaaaagtttattactaatactagttgatccacaaatttttattgtcactaatattcttttagttgcaactcattattaatctaaaataaaatgtgtagatattttttagggtagatatttgataatgatgacattagtaattttgtttattaaatatattctacaaccttcttctcaaaattaagtcacataaaaacaaggcaaacaaactcgaaactcaattgaaatgattcattcatcaatttgacatttcttaaaattcaatccaaaaactaagtaacatcaaatcaaactaaacaaccaaatcatcaaaaacataatgtttttaccgagctccatcatgcaatgcttgttgttctagtcctctttgcgcattatgtaacattaccattgcttgtccctaaacaattcatactaaatttatctaattttatatttacaaacaacttatgaaaacttaggtaatac

SEQ ID NO: 67670 - DNA, 794 bp, Cannabis sativa
gttttcgggtgacgatcatccgtttaagtacttcgacggcgacactttgtctaattacaccgtcaatgcttcttcccccgatgctgcttctaagctccaacattcctcggccaccgccatccactcggttttcacttttagtttgttagttacttgttactgcttcttgtcttttattaattaatgtaattaagtattgaatctcacgtatgcagaacttacataacctaatactcaattatgttgttcgcttctcttttaaatgtctttatttaaagtttttttttaatataattgtgttgtaattgaaactccatacatgacagggctatatatataatgtttatatagtagttggtatttgtgtctagttttttttttttcatgatttgtctatggatcttaagtgcattgtcaaattggactttgaattattattttttttaataattgacttgttaattaaatgggatttttacaccacttattaaaatttctcatttttttttcttttctattgtgaggcgaatatttttttcaaaaatactatatttttttcaaaattattatgtagtgtgttaagtttttaatgttattctattgtttttttttagttattgcattattgtttttaattattctgttttattgttttacggttattttataaaaaaataatattttttgtaaaaatttatatgtagcagcaaaattgtaaacttttgctcaaaaatataatacttttataaaaaccccaattaaatccaatattttctttttcttgagtacttgcc

SEQ ID NO: 67671 - DNA, 2900 bp, Cannabis sativa
tggaggcttgaagcggggacgttacagcgactttgttcgagggtggtcatagttacggtttgggcctgcttgcaagagatgccaatggtattttgattgaaggtaataccattttctcacatgggcaagtggaacccgtcctggccgaagctatcggagttagggaagctcttagttggattaaggatttaaatgttcaacaggtgaaggtggaaattgaatgcatgtgtgttgttcaagccttgcatagtcatttgtctatggtatctttatttggcatcgttattaatgattgtaagaacttgttagcaagtttaaggagtgtttctgtttcttttgttaaacgatatgctaatatagtggctcataatttcgcaaaagctgctatgttatatcatggtcgtcattttagtttggagtctgttccaaataatttgctaccttgtttggtagtagaagttcgtgtttaataaagttgattattacattcaaaaaaattttgccttttctaaaaataaaataaaagagatattgaacttcttgggaagcacatattgagcctattacactcaactagcacctcattaataaataaaaatcaaatagttattaaaaaaaaaaaagacaactctgtaattttttaatgtattttttttataaatatattttttttttctataaaagtaaaatgcaatattatttttttaaaatgagttattttgtatattattttttctagtaaaatattttttttttttgaaaacacattaatatatttataatgaaaaaaaaaattcttacaaaaaaaatatttatatactaattaaatttatatattaacttattaatctttttctaattttatagacaaataatgtataattttttatcttttaatttttaaaataaaaattatatatattaaaatatttattaattattatttatttaaaaaataaacatattagtaatcattttgtattaatataatttacattttaataaaaaatagagtaatgccaaaaggcgctattagtgtttagtacttttctaggtgtcataatttattagtacaattaagtatcaagtctcatataatttgattaataacttttaaagagtatcactaaacaatcatagggctacatctctagatagcgataaacaccactaatgctctataacaaaatgtaagtagaaaataaataaaattaatgattaatgattaatatttaatatttaatataaattttctatcttatcaacaaaatatataactattttttatgatttttaattagcacataaataataatagactatttatgatttttaccaaattataacccttgaacttttcaagccgttagaaattctctttgaattattgagatcgttggactcaagaacttttgttcaattttactaatagaaatcgaacgtgaatgaaagttcaggtggtacaatttggtacatgtcaaagtttggggacactatttggtagatatcaaactttagaaggcacgatttagtacataaacaatcgttggcttagtataattgaaaaaaaaaattgactgaagtccttaaatctaataacctcaatagttcaggagaaatttttaatgacctaaaaagtttgagagatatgatttggtacatgttaaagtttacacaataataatcttaattagcctaaacaataaaatacaaactactaaaaaaaataaaatatataattaaattttaaatgtggtccctagatggaatgatgacgaaccctacaaacgaagatgcatcttattcatataggtaccaatcaatcaatttaagccttcttcaactatgtagtctcatacctacacaatctcaaaatcatcttaaaaaaccattactttttttaaaaaaaaaaaataaaataataataataatatgtaacccttaaaacataatgcaaaattcttgactaaaaaactttctgaattttttaaaataataaataaatcctaaaaaattctaattatatctccaatagtaatggaccaaaacatattgatgataattttattccttatgatcgaaacatctgtattctctattataatcctcatgatatgtcaatgtcatctcataaaattaaagactatgcttcttcaacctaacctacactacatgatcaccgaaaggtaaagccatgatttgcgtaattcaaactcaaaaggtgatgatctttctttctccattgtcctagctagaactagaaaaagaatggtgttgtttttaattgttcattttattttagaattttttataaaagaaataaaactatactaaattaatgtcatgtcattaagaatttgtttgcaacttaaatttaaaaaaataaaataaattaagaggtaaaattgtagaaaaaaatagtaaagagaaatattttctataaacatgatgtgaaactttttaatatttttgctctaaattttataaaattatactacactcatattttatatttagaaaaaaaaaagatttttttttgagaaaataaatgtatctattatagacaaatcacaatatgtagatatagctcaaagagcaaaaacaacaataagaaaataacacgtgaataatagcttgacacgtaatggtcaggtacttacggaagtttcagaaatataacttaggtattattactgtaaaatataaaacttaaatatttatctacaattgagagttaaatttaagtattttatgccgcaaattacttaatggtgaatccaaagacaaatatcgtttttgtataaatacgtatttattataaacacatcaacaaaaggggcggtggcgcagttggctagcgcgtaggtctcatagcttagagtgatcctgaggtcgagagt

SEQ ID NO: 67672 - DNA, 882 bp, Cannabis sativa
aattttaaaattttagtaggaaaattccaaaaattatattctgtacacgtggcacaatttaattggcttacgtaaataaatatttaaaattgaaataatatttaaaataaagaaaaatatattaaaaattaaaattaaaacaatttttttcattccaacaaatctttttttccttcattattttccatttttcttcttcttcatcttcttcatatgatcgacatccaccactaccaacatctatcgaaaccaccaccacctaccaaccaccgtaccatccacaaccaccaccaaaaccaccattactcaccaacgccacttcgtaccctattttttatacctaaatcacacatacacacaaaaaaaaaacaaaacaaaaaaacaaataaaaaaaaaaactaaatctaagaaccccagatttgaaaatactttcacattcatccaacccagatctgaagccttctctcgcaacgcctccaccgctccttctcttgccagaaaacttggagcaaatctgaaaatgacctctgtaatatcctaagattaagaaaatagataagcaaactctaactagttaactgtgtattggtgtggaattatattattatataatctattatatgtgaattaatctgttttatgacatgttaagaccctgttggtgagccaagggtattttagtaattttgacccaaaagggtaagactgtggaatttttattatgatgtgcttatggactatattatatagtatacttgtcttgtctttttttttcaggtattttctgataggttggcgcggtatagttacaattgagaatttcgggccgaactcatgaaattcattttcgggattatatattggcattttattgatgtgtga

SEQ ID NO: 67673 - DNA, 642 bp, Cannabis sativa
attgttattattattattagttaacatgaatctattactgctatccctttattttgagcagaaataatgggcctggttgcatgacacatgtacaacaaaaatgataaattaactcaacaaatttaataatcgaagcatgatagtctcctcaacatatgaagctcatgcatgctcttctcaaagtaaactcatagttacaaagttaaaagcaaagagactgaacatattcctaaggatgctaagtttgtcaaggcattttaggaatgttcttggtatcgacattattcacgttgagatgcttaatttgtttaggcttaatcatgttcatcatctcaggaataatatgagtatatcttcgaaggaatatgttatttgagccataactccaaggatagatgtattttccaagaatccatcaccaaaacaatcaagtgccttgacaaccatatgtcaaagccataaagaccaagtaaaaaaagatagttatcttatttaaaagggagatgtttacatgctatttcttaccaattagataaaatatatataacgtgaggaatgtccatatttcatgatcgttgtacggattagctcaaaaataagtgctatcccaatcctataaatggtagtgatcacattgtaaaa

SEQ ID NO: 67674 - DNA, 678 bp, Cannabis sativa
ataagtttaattttagtgaatttttacctcgaggtttggtaagaaaccctaggtgttcttttacacttattaagcaatgttttgggataaacactcattagtttatcatcgttatgacatagggcccgggatgatcgatcgttctccaagcaggtcaaccaacatacctaaaccagaacttgaggtaagaaaagtattaagtattgtttatgattaatgatatgattgttatagtctcgactatgatcgagattacgatatgcgtttattgtgactcgattataatcgagaataatgatatatattcgttatgactcgaccatgatcaaggtaatgaggagaagaaattattaccatttgtgactcgattgtaatcgaaggagaggcccggttattactgttattgtgaataaataaagattggaaacgatcattaccgttacgagtatttacacctgaaatcacagttaggtttcttacttattgttcgcattatcaggcaacgatagtgacatatgcagctcgtggataacaagtggtgaagattgaaaacggtcattaccgttactagtatttactcctgaaaccgcggttaggtttcttacttatcgttctctttatcgagcaacgatagtgacatacgtagctcgtggataacgagtggtgaggattgaaaac

SEQ ID NO: 67675 - DNA, 4078 bp, Cannabis sativa
tttctacgatttttcagtttcacgctgcgctattcttattatacaaataccattatccataggaatttgatattgtgaaatataaggttgataaggttggtgagttataccatacccaaagttagtatacaactaccctcttcactgatcatggatagttatttatttttgtttttctgaaattgtgagtttgatcaagattgcttaaagtacttatttttctatatagatattagattctttattctcattattataagatcattcagaaattgaatttataattgtgagattaatttttgatattacttaacttattcaatcaattttcaacttaattgggaattttgattaactataatcagttttagtgaaccataaacaagtttcatgtataaattcatttcactattgaaacaaagattcattccattttcatttacatatgaaatttttgtaaagccaagttgagaatccaaacaagtcaagttcactgtcaaagccccgatgaacattcaacaaccgaacggtgcacaacaataggtatgtcgaggttcagatcgttctgcaagttcgattcatggtgttttggtatcaccatttaccctgttcctgcaggtgaaaccaaagaaaatatgttctaaaaataaattacagtttctatctttaatctaataattaaagtttagtagtactcaccaaaatgttggcagagattagaccataataataacccttttgttgataagatcatactcagaaatgtctcctggaaattgttaatgaatgatcccttttgtattagaaatttattcagaaacactctaaatattgtttgggagcagctggatgaatacccgaaaggcgagctatgaagtttctttcacttgtggcaaccatgcttgaaatggagtagtttttggcacataaaccattctctctaagccaaagaaaaaagttgtgtcttcgcttaatccgattttccaagtggaaattcaaatatcttggaaaactatcaagtatttctaaagacgaatcgatttcctggcacaaaaagttcacctttttctctaatatttctggactttgactaaggatctttggtgatatgttaatcatcaaacatagctttgagtacgaaattcctgcaccaagaagacaatcgaatcgttcttgcagctcactactggtaccgtgggaatgatttaggacctttatagtcgaagcattttccccgaaaccaattcctttcaagaaatccaatttactagctgtatgagcatgaagtcttgaagattcaatctccttcaaggctttattgaactcttcatcgatatcttggtcagggaaaccgatggagtaagtaaccaataatcgactgttcgtatacataatcttattgaaaaaccattcatgtagatccaaagccctcatcacttgaggtaaattagccattttatttcttcccaacacatgattgtaattctgactaacctcttgtaattttttagtgttcaatccgaaatgttctaacaatctcaacactgatatcactggtgtttctaagtcaagactcaaaacttttggattcttaagaagaaaccaacccacataatcctttctaacaccaaattcacaaaagtaatcaacttttcggagtaagagatcattcgggcaattaagaaaaagttctttcttcctacaaatccattccccaaccttccctttctcacaacctaaatcataaaacaccttaactttacaacaaacctcataccaaccatcaacatttccctcaacaaaactccccatattcaattctacataaacccttttcaaatcatcaaataatgaatctatatcatcacaacccgaatgaccttccaaactcagcaagtgagggaaagctagacaaataccaactactgagagattacaaaacccatactctttaaacccacgaagtctagcaattacctgagcagaatcctgactaaaaatcgaaactttctccttatacaacctccctaaagtattccatggaaacccgaatccagaaagagcaaaagaaacattcaatacagacacatcttccgaaaataagaacttttcaggcaaaaatcgaggaacatcttcatgatctatgcctatgctctcaaagaaaaattcaaattcgttgatgggttggtacctgaggagcttactgaagcttctggagaaagtggaaacgtagaaagaatcaatcttcttgataagattacagagagaaaaaatggagtttctagcaatgtgttcggcgaatgtgaaaggcaatgaccttgtggtgtgaaggtagtcaataaaggcgttctgagcttcttgaatcactctatgtttgtacttggaatgaactttaggaaggtcgggaaaccttgaaagcttccctcctgaatgagttgaagcagaagagaagccgtgggcaaggacaattaagaaagctttcgaaaagtgcatagacctcatggcattattgagggttttgccagaactctaccaatgcattggttctcatttctgcaaatcaacaaattgggaattgggttattcaaccgaaaaatgaaaaatctcatcctacaaaggtcattagtttcaacaattcaacataacattatcattagttttaccaatcatgtcattataattttctctttttccgaaaaagagaaagaagtcacttgtcttagactgaccactccccaatatgtattgaaaatcctcacttgtggcggaggaaactttggttacagcagtatccaaaacagcatacaagatatatgtcattataattggtgtgtttgaagatctcataacatcaacagatgactttgaataagcaaatagtttagttcaacaattggacagtatgaacatataactattagattcatcacttcaaaaaattcctctattgtttttatcagcacatacattcaaaccaatgaaaactaatatataattgcacaaaccaatatacatacatagattttaattaaattattgtgtaaaactaacacatgactataattaagtctgcattttcatagtaataaaagaaaaatcaaaataatttatagattaagagattaaatccacaagcaaagttacctaacaaacaatttatatataaaatttgagtaaattagctcaaaaatctattctttaactgaactgaactgaactgaactcatctctcacctcatccaaagaaaagattataaatttcaacaaacagttgaataaggaaaagaatcatagagtttgaaacctgcattttcgtgttttttgagctctgattgagaaagaggggaagaaaatcttgagctgttaagcatcaaagggagaagagatggtcggtggacggtgtcgttctgttcgccgacggtatacctagccacactgaatttctctctctctctctctcctatgtaatgtttgtttggtataagaaagaaaaatgagaggaaagaaaagtgtttgagaggaaaagaaaggaaaatttatttgtttgtttggttggaaagaaaagaggatggaaaatggaattggagaaaaaaaaattaaaagttttttggtttaatttttttgataggaatgctactgttaatcaattattataatttcttaattaattttcgtgattgaaaacacatgccggaagtaatgttcgttatagttacaacattatttttctaaatttttaaataatttcgaatagtttacggtgctgaaaataggttttaagttttttgaaaacatgtgctaaactggtatattaaaaactttggttttcggtaaaattaattttttaaaaaaaatttacaaatataatattgtaattataacgaatgtcactgtaaaaaatttgaaaaaatatattccagtgtgtaatttcggacatgaaagttgactaaaagattgtaattagttctcttcatttttgaagttatatgcataaatactagagactcgatacttaattgtaccaataacaatatgttgcccctaattttgtccaatatacgtggaccaactagacaag

SEQ ID NO: 67676 - DNA, 2005 bp, Cannabis sativa
tttaggatttagcttcatattgaaattttttaatattgcaaagcactctgcaaggtcttcagcatggtcctcacttttgattgattttaccaatatggcatatacatacagttccaaattctgacatatctagttcttgagtataccattcatgagacattgatatgttgctccagcatttttgagtctgaatggcatgaccttgtaacaatataaccccatatttgtaacacagcttgtgtgtttttgatttggaatgtacatcttaatctggttatatccaaaatatggatctataaaggtcatcagctcatgttcttctatcgcaccaaccaatttgtcaatccatggcaatagaaaactgtccttcgaacaagttttattcaagtcaaaaaagtctacgtaggttctccatgtcttatttggtttcaagacgagaacagtatttgagatccatgagggataaaattcttctcttatgaagttgtcggttaacaatttgttaacttctcctttcaaagtattttgtcgctcgggatccaagggatgcctcttctgatgcttcaaaggataagaggtatcaatgttgatatggtgacaaattacatttgggtcgatgtcgaccatgtctgagtggcttcaagcaaactgatcttggtttgccttcaaaatgtgattaatttttattttagttcttcccccaaatccttctcaatgttaacatatttagttgggtcatttgggtctaaatttatttcttccaactcttctattcgttttagtgagttgtactcagcttggatcctaggatccaagtcttccatctcatatttctcattctcctctatcaaaattaccattagctagtgggtttcccttcgattctttgatttgacactatagaactgtctggtcaacagttggtcacctttcactatctagactctaggatgagctggaatttcaaggacattcgctttattaagcttactacccctagtcatattagtgcaggatgacccatgagcatgttgtataccgaagggatatctatcatttgggtcgctgatagtggcggctctcgcatagtgagtgggagttaaatggtgccaaggctcagaacaattcccccgtgaagccacgtaagttcaccacgcatgatctaaatttgacctcttccaaacccatcttctttagtgtttctttgtaaagaatattgatagaacacccgttgtcgatgagaaccctttttattcttttgtttgtgagctagactgtaataaccaaggggtctgaatgtggaaaacacatgtactgcatgttcatcaatggagattattggtagttcctcaggcttcgctcgcttgaggagctctggtgcaaagtttgattgttggttcttaacttgatttatatacctctttagggcactattgttgtttcctacgagatgcgatcctctagtattaaccaagatatcctccccctcaatttgggggaggttgtacaccttggttttgattctgtttgtttggcaggttttgctcattccctctatttcttacgtacagccttaaatagcattggaaaatcagtcctttgatctcatcttttaattggcgacattcgtcagtggtatgtccaatgtctctatgaataacaatatttgttcagacctcacttatttcttgagtgtctcataggttcaggtttttaaaaagtgacccgattctcatttccgagataaatattctcacgagtcttgtttagctttgtataaacttaatatattagagcatactagtttccaaactaatatcagattttattgtgacaaagtaatgcctttgggacttaagaatacaggtgctacttatcaaagactagtgaacagtacactcctcaaccaaatttgaaacaatatggaagtctatgtcgatgatgtggtaattaagttgaaaagatctgaagaccacatcaaagatctagaggagtgctttaatat

SEQ ID NO: 67677 - DNA, 1124 bp, Cannabis sativa
tccccaaccgaaattctggttctgtggggtttcctgggagccaaccgaaattttggttcctacaggcccctctgaaccggaattccggttcagtgcagaaagaccaaaatttccatagcttcatcacttcaaccccaaactcaataaaaccttccagacctgttctatacaacctagagaacatattcaaagcaataaaacactattacaagcatagaatcgaaaaccaccatgtgagaggaaagtttgagctcttaagctcaaaccttgaataaaccacataaacagccaccaaaacactacaatctaacttagataacctcaaattaaactcagaaaacaaaccaaaacaactaatgaaccctaaattccatttcatgcaaaatttccattcttgaagcttaagaaaacaaaggtgattaggttaaagaacttaccttggattaaagctctaagaatcaactacaatccacacaaaacaagttgaggagaccccaattcttgctggttcttcaacgaatttgagagagagaaagagaaaagctatttctcttaaatttctaattttggtaaaatgacatacaacctaatgtttatctacttaatctaacataatattcagattaaagcataaatataatcccactagaagacaaaactacattaggtcaaaaaagaccattttgccctccactaagctaaatgtcataaaaaaacacttaacggtaatttagtcaattctaaaatctcgactaatcccgacattcctaaagtctaactatactgccccgctataataaaatactacgatgtgattttaatagccaaacaccgcgttccaatgttgcctggcacaaaacatgcaaaattatgaattttctattcatgacatataaaatgcattataaattcaaataaaacaccataaattaataattcagaattaataaataattttcataattaaactctaattatttgctaatttccaaatttaagctaagcggtctttacaactattcccccctaaaaaggatttcgtcctcgaaatctaacctgaataactcctgatattgggctctcaagtctgattctaattcccaggtggcttcctccaccttgct

SEQ ID NO: 67678 - DNA, 706 bp, Cannabis sativa
ccatgaagctaaggagttcatgacttgtggtggcatcaataagttggtcaatgcttggtaaagaaaagttgtccttgggacaagctttatttaaatcggtaaagttgacgcatgtgctccatgagccattgggcttgggtccaagaacaggattagctaaccagtttgggtaaaatgactcctttatgaagctgcatgccaacaaacaatctaattcctctttaagagcttggtgcctcgcggggtccattttacgacacttttgtcgtactcctcgcactttagggtcaatgttcaactggtggtacatgaccggtagcgatattctgaccatgtctgaatatttcaatgcaaaaacaatcagattctatttgagaaaagtgacaagcttttcttactactgaaaagttagtttggaaccaattttaacactttagtattatcaaaagaatcaataggtacctcgattgtttcttctacgacttgcgctgtattggtatagtcaaggatcctgggatccaaatcgggcttttcaatatgcagtatctcctcgattctgaaaaattcatgttgagggggaggagcttcgagcagatatatgacgtttactgtttttttcttttctgcaagcttcaatgctgtattatagcattctcttgagtctgactggacccctcgcaccgatcccacacccacagaggtaggg

SEQ ID NO: 67679 - DNA, 914 bp, Cannabis sativa
  modified_base (65)..(72): a, c, t, g, unknown or other
tttttattatttttatgttgttttaataatatttttttgttattttcatgtgattttcttgttgnnnnnnnntttttgtatttttatagaatactggataaataaataaaaaaaacgtaaaagtataaataatttaccaaacaaaaatagtttatgtaattttctcatgttttaaagcttctttcactccttacttcgtattccaaaaataccacagaaactaatttcttaaactgaaaaattagtttcataatgaaaaaaatcttaaacatagcattcaaagtggggggcacctgatttgggacggatgaagatcaatgtggatgccagagttaaatgtggaggaggagtgtcgggtattgggtgtgttgttcgtgatagtgagggacattctcaattcgcgtcctctaatgtgattaccagggagattgctccacttcagttggagttgcaggctattttattgggcatacaggtcggaatacaacgtaaaatctagcggtttagcatagaatcggattgtttacaagccattcaattaatccaaaagaaggatgaaggctctcatgatgtcgattgtttgttaggccaaattagaactttattgttgtatgatagttgtgatggtatctcgtttgtatttcgtgaggccaatagagtagctcatgttttagccaattatgctttgactaacaaagctagtgccatgtggattggggttgatccctcttgtgcaagtcaagaaatctctcttgacatgcctaatcctgtttgacttgtttttgatgcagaattccatttcaaaaaaaaaaaaacaataaaaaaaatgaaatatataattggccaaattttaatttgtttgttttacttacgtaattagtttttctgtgttagatttttaattagtttttttt

SEQ ID NO: 67680 - DNA, 529 bp, Cannabis sativa
aatccaacagagaattgatcgcgactgtactgtaccatgttcatgctcaatcaataaagaggatttggtggggttccagaattagattagagtcatagatcacattgatctataggacttgaactagtatatatcttggtgttaattttattgttttattgcttttatggcttctggttttagatacttcattcatccctttaattaaaaaggttattcgtaccaaactcaaaaatatataatttatgcatattaccttttttaaaatacataatccaaatactacagtttggaagttcaaaaaagaatttgaacaaactattccaaaataaaaataaaaaatatgagtttttggcggctaaactctctcaactgtggtgtgtggtttcacttgtatttaaccttccaattttaaattttgacagttaaatcctccaaactactaaactggtagtaaatttaaggttctatctagttaagtgtcactataactgcttatgtatacactcttgtacacatgacatgttta

SEQ ID NO: 67681 - DNA, 1427 bp, Cannabis sativa
tagttggactgggcctgctcatcaaagacttcagtcaactagaaagtccacacttctgctttaactagaccttatacacacaaagatgctaagcccattaactatatgatcactaataatatggactaacacaacaaagaactatctaatcaactaaagtcttaataaaaccaataaaaattaatgtaagcccaaataaaagtctaacagataaatctaaggtcaagggatcctcactaaaagagaagaagatggacttcaacattgttgaatgacggtttatgaaaatcttcaattttattttatgtttgtaatcactgcggataattttaaatgactttcaaaaattatattttggactttcgaatttggatgactgtaatgtgtgaacttattttacttatgtttgaactttgaattttatattttctttattttaggtgtgaattttatgatgttaatatttatttattttttttaatgtgaaataatagttacaacccaacccataccgtacgagttgggttgggttggattgtacaaaaataataatattaattagttgaaattttataggccgatctaattgggttagcccactaaaatagcatcaacacgcctaactcaacccatgtgcaaccctacttaggaactctatcttatgttgcaattttaattttattcccacaactaggggtgtttattgaatcacatccaatggatttagacccaacccaaccgatttaatccatttatttattagatatggaattttgtcatccgatccaattcaattgaattgagtcatccaatttgacctgatccaatagatatattggattagattagttccaccattggatgcatgaactaattttctgttagattagattggatccatctagtccacgttagttgccatttaagttgatttcattaaaaatatatatatatatatataaagaatatttaaaatctaataattcaacatacataataaacattagtttagtccaatctaaatctcatgatctcataataaaactgtcaaaaaataaaacgtattcaatacgcattgataatttcattagcgtttaggaaaatggaaattaatattttagatctaaggttttttttaatctcatttatatattaaatcaattaatatatttttgaagtaaaatatattaaatatataaaattataaatatattttaaaaatatataaatataattgaataatcattggatgataattgagtcggtttgattaattatctactagatcgaatgtctcatccaacaactgatccgatccaattatgattgaatatccgattctattagatctgttaagattggatgggtcagttataattaaattagatgtctttctgcacacccttacccacaacttctaatttgta

SEQ ID NO: 67682 - DNA, 954 bp, Cannabis sativa
attgtatgattattttgttatttttcaaattgtgaatatatcgacagaatgtcgacatgatgtcaatattttgtcgacaattgtattatatgttgttattttttaactgtgaatatatcgacagaatgtcgacatgatgtcgataattttctgtcagagtatctttgatattttttaatatattttttcagatggctccacgactcatagttctagcatccgagtattttactggccgggtgacatatagaggcaccagtgcttttgcaaaaatcaaatctcggtttgaggagtaaaatttgaataacacggcgaaagaaagcagtttcgataacttttggaatgttgtacttctgacattctcctcgatgttatttcaccaagtcatgttgcacaagatgaaggttgatgttgatgaggatttgcatattcatttttacattggtcggaaggatctcagttttggagtggttgagtttgcgctcattacaggcctgaacttctcctcggggccaacaaaagaggagaaagctgcgcaggttgcctgctcgggattagaccgattgatcaacaaatatttcaacccgtttgatagtgtgaagacagaagcagtccaagataggttcacaaactgtcagaacccgcacgattgtacaagcttggcttgtgcttgtttgttgaggtagtgatgttgggtcgcgaggctaatgcgttgattacgattgacatacttagatatgtcgaagatctcgagttcttctggattccttaggagaagtactcattcaccaaacttatgtactcgcttcaaaaggacatgttgaaacagaaggccaactacgagaagaagttgagtttagaagttcagcatgagtgcaaatacacatcttatggcttcgcacctacaatattatattgggcatatgagaccattttagaggttgggaagaggta

SEQ ID NO: 67683 - DNA, 773 bp, Cannabis sativa
  modified_base (79)..(80): a, c, t, g, unknown or other
ttttagaattctataaagttttctgtataaatttattattatttttaataaatatataatttaaaattttttaataccnntttatataataatttgattgccgcacgcgaaacgcggtctgtttactagtatacctataaatagagacagaatcaagggtaagaatgacgaccaatttgagagagaaaaaataagatattattattattgatattattgtattctgtattctaattattattcctatggtatatttcttacaaaaagacttatattttttgctaatgaaaatttgcgttaatagttagaaatagttggatgatagtacattgctactagccaaagggtaagagctttggcttggcatttttaagctttttcattaacttttacttaatagaatcaagtggtagagtcttaaaatttagtattttattcatatatcgtcttgtttataaattgtcattctaatacaatttatattctggtatttattttgtgatgtttcagttagtttttcaatgttacaagctgaaactctagctcttctattgtgttatttgaagacgttataattttattatctaaattttcggcagcagttttgtgatatgttgcttttttacttttgtagctcatgatttggtaaagcatatccttcgattaggcaaggagctatcctaattcgatggcagatgccaacatcgtatattccaatagtgatcttcatcactatgtcaaaaaaaaattatctatatatatataaaggagaa

SEQ ID NO: 67684 - DNA, 990 bp, Cannabis sativa
aagagtggcttcatgaaaaaaatcagaccatttattgtcaatgaaacctctatccagtcgttcctgaaccacattcccatggtgatttttgttagtccaagtaaaagcatcaccattaaaaggaacaacttttaaatgacagcgatcaatcgttcttctaaaattatccataagagtgtcatctcgaggaggacccccgactttatcctcatttgaaagtaattcattaaaatctccaagaactaaccaaggtaaagttggagcattggaaacaaggctgcttaaaagattccaagtgttgatacgcaaatgagtttcaggtgcaccataaaaaccagtaaagtgaaattgatgacaagaatccgacgaaaccaaaacatcaaaatgattcattgagtatgtatttagagttacatcaatattggccagccataacaacaataaaccacctttcatacccatcttaggaacttccaaaccatgattgaattttaaacaagaacgaaaatgatcaacagaattacaaatcaatttagtctccataaggaaaagaacatcaggacgctgctctttcactagcaacttcagctatctgaatgccgaagggcttcccaatcccctggcattccagcttatgattttcatgactgtgggcggggctgcatagaagcaacctccactgaacaagaagagttcccctcaactgaatctgtattctgatcgaaaacatgctggaaagatgactcctcaacaccagaaatgttaattgaattaccacggcatctctttagaatacttcgcaaattctcaggatccatttgacgcttataagtcttgacagagtccttattcccttcaaaacaatcggaattcaccacaactttccctttattaacagtcacattaatcggggcatgaaaagaagtagtaacagggacctgaggagtggagaaggatgacaattgtgaagtagtttcaggttgtgacgag

SEQ ID NO: 67685 - DNA, 1618 bp, Cannabis sativa
atgtcaaagttcgggggaaaattactaattagcctaaatataatatatgtaaaattttataattttcatattttatgcccagttacagtggaatgtgacatatgaaatagtgatgcaatatagtttgacatttagaatgtcgagaatgttcggggttatgatataagaccattttacccctaagtacgttgattaccttatgattaagcaaggggtagattggtctttttactctagttttgtctttagtgttttgaatggatttttgtagtaaaatcatttcttaattatataggttatatgctaaaattaggatttaatatccttttattcacttagacaaaattaaaaaaaaaaaattattactctttctcccctagggttcggccaaacaaaagccaaaagcaactaggatttcttcaaatttttggtttatttctaaggattctagcagaattctaagtggctttagtcagtttcaagctcaaggtaacctgtttccttctcctctttgaatttcatagcaaagtttgagtttttgatgtgaatttcaagttttagtttttgtatagacttgttatgcttcgggtgtgtttctgatgatacttttgagttagttaagtttgttgtggctgttatgttgcttgttgttgagcttagacaaactttgagctttgaatcttaagctttgctctttaatggcagaacttgagtctaagggtttttccttgtgtcttttgtttttttatgtttgttgtggcttatataggtgttctagaagatttagtatgatttggggaaaaattgagtttgtggtgaatttttatagattttctgcaaagaatcgattaattggttctggcagtcctatagaaccggttaaccgtttccctaatcctaggatcttgttttccattttgggaatccaatttatcgattctagtagtttcggaaccctatttcttgcgttttagcaatatttagggtattaccacgctatccattgatatggaaacttctagttttaattttaagtccttgagaagtgatttagcgtatcacttatcaattttacgaatgttgtgacttaagggcctgtaaatcgacgagcagtagtttccattcaggttgactggcacacctgaattcaaaatcaagataagattagtataataattgcatatgcgatcacatgtttagcgtgcatatttatgaatgcttgttagataacatatcagtaatgtcattattagtgtacatagagttgcactgaataccaacaaatatatatttggcaaaatattaattgacgctatcacatcagtacgactagagtactgagtataggctgatattatggttaaaaatattgtcgtacaaacattctagactcagtacgcgttagacgtgtgatatggttataattggtgtatggatgcctagttataatctggtttatgttatgttatgattatgcttttcttactaagtctgtcgactcacagatattgtttgcatgtgtcggtaagggcaaggctaaagatgaataacagtgagctcaggctaataaagattgtacatatcgagatggttagacctagagtgttcggtcttggga

SEQ ID NO: 67686 - DNA, 715 bp, Cannabis sativa
gtcacacccagattgtagggggctgaggtatacgaatgtgaagttcagagaataagtaatgtaaccatgtgagttcagcagtcacattagctacactcgtatactcagcttctgtactcgagcgagatatggtctgttgcttcttactcttccaagcaatcaggtttgaaccaaggaaaatggcataacctgaggtagacttcctgtcatcggggtctgaagaccagtcggcatcacagtatgcaacaagatcatggctatctggttttgtgaatctgagaccgaagtccatagtaccactaatgtatcttaaaatcctcttaacagcctgccaatgagtcgataggggcctttgcataaactggcataccttgttaacactaaacgacaactccggtcttgtaattgtaaggtattgcaaggctcctactatggatcggtataattggacatcagcaaggggttcccccctggtgagcggataagcgaagaccacttgtcattggtgttggagaaggcttggaaccaagcatttgagccctgatgagtaagtctcgagcatactttgtttgacagagatgaattccttcatcagaataggcaacttcaatgcctagaaaataagtcaaaggaccaagataaggagaattgactgttcagatcagcaacaagagtatcaataagatcttggtcactccctgttattaaaatgtca

SEQ ID NO: 67687 - DNA, 884 bp, Cannabis sativa
ctctgatatcagtacatgcacaatcaatccactttatatattagttcaatgaacttataattagtttttttttttaattaagttaaattagtaatgttaagtgtagtatgtttaattttttttaattaggtaatttattttttgaattttttttaaaatggagtttgagagggatttcttttttaaaaaaatttagctattgttatattggtgtacgtatcatttgaatatgattatatatacatatttttattttttttaattaagtaatgtatctgataatacatatattgtaatttactatattcttaaccaaaattcacataactaaatttaagtgtgtatatatatataggttggattcgtatattatataaagattttttattcttaaacttaaagaaaaatatagtgtgtgaattagtttactatagctaaaacaagtaatcaatttcttattataaccattttaatttaaaatataaaataaataataataaagttaaaaatatgattaaaaatatttataatattttaagcattttaaatttaaatttttttatataaaatatttatataaattttatttttaaatatatataataatattataagattatctaagaattccgttactatgtatgtatactctccatcattgatctaggaataatggaagaaaccattttccatactgatttcactcattttgcacatctaaccaatttgtgtagcaatattattacttctcctctggtcttgttgactcttatcataatacaagaggaatttcacccccaaaaccactgaagtttatatacttttcttctctgaaactcgaattctgtctataaattaaaacactgaaaaggtgactataacga

SEQ ID NO: 67688 - DNA, 627 bp, Cannabis sativa
tgttgttgcatgaaaggagggattcattgatgtttatttgtgtaatatgtatatgtttgcgtggtagcttatcatctacagttttgtgcaatcagtcctctgattgatttgctgaaagtaaaaaggttaaaaaaaaaaacttcaagtctcgtgcctctcccaaactataaaaacacttcatttcatgaactctatcctccgtttgtatatgatggtaaaaaacttcagaactctgctgtctatttacctggccttacactgtattctatcttgtgtctgctgtggaattactttcatctgttcgactgatagtgtgatagtttccacgatttgtgactgtagtctaaatgcctccccaatgtttgtgagtctatatttcgcatccttagggtgaaatttgatgtacaaagaactcgaaactgctgtgtggagacttttcctgggtttgtttttggagtagataagtgaatttcaagagtacaagcttgaatgtactatctgttttagtgtaaaaagtatgaactacattgtggctctataaatatagagcctgtaccgcattttttcttggtgaatattactagctgaataggcagtgtggaatttgattttcaacatcttcatgta

SEQ ID NO: 67689 - DNA, 1096 bp, Cannabis sativa
ctagtcactttagaatagccaacaaacatgcaatcctaattcgaagggattttatccattcgttcaagaataaaaaaatccatgttaagaacccacaacatctttaatacaatcctatagaattctagatacgtcaaggaatcattttcaagaacgacttatagaattcttgctgagtacataggcgacctaagaggcatagcttgccgctagacactacactcgattcgtccacttcccatccttcatcgtttatcacattcaaattctatctcctacaaatcctctattgttaccgtactccaatccaagagtatactgagaaggcccttcatgaatcacgagagcataatccccttctggaggaggaccaaaataatcagtgtcagaatgagaaggcacaaacccaacaaaaccctaacagagcttaagttggatactttctaatttcacttttaacttttttttttccttttaagttttatttatttatttttatcattatagttttatttaattagtgcactgaaattcgtaaatcaaattggtgggcttttattttctttttgttttgtttttgaatctatgtatataatttattaagaggtttttacactatatcttgaaatttttaattttttttactgtgagacggaatttattttcaaaaatactgtatatatactgtgttaagttttcacagttattctgtattgttagttgttttactgttattttaatttttctgttttgttttataaaaatacactatttttgtaaaaaattttgtataacagtaaaacattgtaaatttttgtcccatttattaaatatatggcttaattcggtattgttaattaatgatatcacttatatagatcaaatcacaaattcaaggtaccacaatttttttagaactagcctagatctgactctaaccgtcacattttattatgaataaaagaatacataattttgtttagtcatataatccaaaattttattcagattcattatatatatataaaaagaaaatacaaaaatagcaacagtctcttagagagatatattcatagtacagaactaattagcgttg

SEQ ID NO: 67690 - DNA, 1041 bp, Cannabis sativa
ggcagtgcaacatggagggtttcggtcttttaacattttgagttgtattttgtagttgccctgtaaaatcatggttgtcctgtgattttgtactgtgtataaaaaaaaattgtgtaactttatatacaatatatgtattttaaacaagtggttttaaactcgggatcccgatttacgaggttatataattatattataattgaattatttttcgaattagcaagttttaaaagccgggcgttacaaacacacagtaactcatcaatcgacttggtctttttcacaagatctgatgatgttgggtctcatttcttcttgatcttcgttgccttggtcgtcttcatccccaacgccttcaatttggtcactggagccttggagccttcgttgacttagtagttctagtcgattttctcagtagtggcctcctcgccatggctaagctccagccgaggagagcaaatttgaacataaataaaccatctcaaatgttgctaaggtggaatgactatttggaacacctccaaacaaagtaaagttccatgtagaaaattactcaatatgaagggaaaaactaaattgtggttttcgaaggaataatgtatgttggctacaacaataatataaaatacatagacaaaaagaatcaaatgctagacataatgatgtcaaaagatgctagttgttgaaaaaaggttttgttcattagcttgaaagattgaagataatacattttaagatactgatgttcaaataactgaacactcaacttagatcaccaaaaaaagtctgctccactgggaatattaatagggaactaacatctgataaatgaactccaaagttgaacatagaccataattgaatattcaccttgccaaaagattaactacttgaactaaaagataaaaggtaaagggcaacagaaatttgtctggttcaaatttatagaaggatcagaatccataaatgttcctctaatagctacacttactgaaatgataaattttaacgaactccggttgaggatttaagtgttga

SEQ ID NO: 67691 - DNA, 798 bp, Cannabis sativa
atagaacgtccaaaacggatactcaaatcaaaaattatgacaaaaatacgatttctgatctcctatgaatttccaaaaactacgaaacacgaaaatctcaaatttcgcactcaccgaaataccacaaaaacttatcaaatcactccaaactttacagggcacatatataccataaatattaccatctttatgtaataaaagttaaaatcgagcccttaaataaaaaaaacgccattaacgttcggactaagatttaaaaagttccaaactcgatttctaacctaaaattacctcaatttcagcaagaaagcatcggagctagtccagtgactacccgagaataatcttataaggttgataccttcataactattctaattcacaaaattcctatacaaaactaattgttttcttaaacttaaaatgaaattaaaccatactttaagctttccctcttcaaggatttgctatcttgctactagcggagcttagatcgctaggtttcaagtttgaaaataaaaagaatggggatatagaaagagaagattttatcgaaggggggagaacgagagttcgttcggtcgtttttgtttatgtcaactataacttataatatatatattaacgataattttttatatatatatatataaaataatattataataatataatattaataaaaaatttattattaatagttattttattatttattagccactaatctctatttttagaatatttggccaacttcgagtatcccaaaataccctggtatttttaaaattaacttat

SEQ ID NO: 67692 - DNA, 960 bp, Cannabis sativa
  modified_base (62)..(64): a, c, t, g, unknown or other
tattttattatatataaataataatttattattttattaaatataaataaaaagtcacccannnatttctcataaaccaagaattcaattatataggcacactttatatagaatagatactagctggtcaaaaatgtgtcaaatacatgtaattccccgttaaaattaatggattaattattttttttttttttttttatcaattgtatttaaataaagagataaaatatctaattaaattagcagattaaatgtaaaaaaaaattaaaattctaatcaaaattattaaagataagtacatattaatattagtaccaattaattattgagtaccagattaatatggtattgaacaccttaaggtgtcacataacaataatagtacaaaaattatttaccaaaaaaattgtacaaagattatttatataaagtaaaataaaaaaaaaaaagacaaaaaaaaaattactaaccactttatttggtaccacaccgatatagcattaagtacatgaagagtactaataacaagttcaaaaatcatattaaaaaaatacaataaaaaaataaaagataaaaaaaatagtaaatggtacaaaaatcattcataaaaaattactaactaattaataattatttagcaaaaataataataaatagtacaaaaatcatccatacaaataaaaaaatacaaaagacaaaaaaaataaaaattacaaaccacttattgagtatgataccgatatgacattaagtgcattaaaaatattaatagcaagtacaaaaaattatttttttaaaaaaaattaaaaaaagtacaaaaaaataggatgtcattaaacacattaacgataaggcattaagcacattaagagtataagtaaaaaaaaattatttaacaaaaataaaaacaaaacaaaattaaaaaaaataaaaaaaaaaaacaaacttataaaaaaaacc

SEQ ID NO: 67693 - DNA, 1172 bp, Cannabis sativa
tcttcgtctcactttcttacagctcttcattataatcatattttaatagttgccgaaaacctcggtcaacagtcatcaacagaacaacccaatccgcatcactaaaagactctattgaccaatgatttgaaggcttcaatataattccttacccaattatgcctttaagataccgaagtagtcttttccaaacaaaataatgatgatgagtgggactatgcatgaattaacttagcttattaacagtaaaagctatgtcagatttgctaagagtgagatattaaaggccaccaagtacacttttgaagaaggtaggttgatcaaaccatttgctatcactactgttcagtctttcacttggagagataggagacgaacttggtttacaggttagcatgttggcttttttaagcaaatcaatgttgtatttaccttgggaaaggtaaatcccttatgctccctgagtgatttcaaacaaaggaaatagttcatggagtcgagggacttgagtgagaagaattgtttaagttgagtgatgattttcgtaactcattgatggttattgctagtcaattgaatatcgtcaacataaatcaggagctaaagttcgaaaccaacatgtttgtagtagaagagaggaatctgaaattaaattttggaaatgaagggacaatagaacctcctttaacttgttaaaccatgcctgaggagcctactaaagatcatatagagctttatttaacttgcatacatgattcaaaagagacagtcaacatacctcttatcccaatttttgcccacctaaagtggcatgcttacgtggacaatatcagcgccacgtagtggtacagctcaccaataacgaggtcaagtcaattgccaagccaatggggatcccagtactcaaacaggacgacatgtgacataccagccacctcaagggggctggccaatagcttctagatagcacagggccggctagtcagcttcctacaggtgcctggccgtccaagattaaacttgacaggattctggtgcacagccttacatgtggactacaagctgtactacgaattgagccttaacaacccaataaagtagatagaaaatacttatgtttaaggggcattttagtcttttgtatttaatatttgttaattagggtttaagct

SEQ ID NO: 67694 - DNA, 910 bp, Cannabis sativa
  modified_base (317)..(317): a, c, t, g, unknown or other
ttcaattgtaagggatgatcttatcttaagttaaataaaactttacccttttctcaaaaaaaaaatagtaaaaataatataaaaccatactaacatcctaaacaaaatatcaaatacaacttcaagtgagtgtaaaatattaaaataaaaatagtgagtgtaattaattagtgattttaacacaattaattttaacacaaatacaactaaaagctttggaatccatgtaacatttttttttttctttttgaaatgaaggaaaatgtaacaattttgatttaggtccaatttcaactttttttcttttttcttttttnttttttttttttttttgtagcaactttttttctaattaagggaaaaaggaataaaagaagttgttaatgaaattattaattttgtaattaaagatgaggtggggccacgtgaatgcaacgtggtacggtggtacgacctccgagtacatttaatttaaccgaccaattatattaaaaaaggattggcttatacttcaatccaatgcatttagtatcacttcataaatactttgccccattcatataacaccacgtgtccatcattatatgatgtctcggttgactttttaatatattgttacattcaatttttaaatcaaatatctcaaatttattaattaattgtataaataatcatagcaccaccgtctaatggagtgttcgcggtgtgggttgtgcggtttttgactattttttcaaaccaacctgcacatgttgtttttccgatttcccaaactgcacccgcatcacaaaactcaaaatatgcagaaaccgcaccgcaaaaaatggtgcagtgtggtgcggtttatgcggtttggactatcattaaataattaaactatcacaactacaataaagtttgagcaacactt

SEQ ID NO: 67695 - DNA, 1465 bp, Cannabis sativa
tgaatttttatacaacttcagccttccttcctagaagccgaagcttgtgtcatgaaaattcaacttggctttcatgtgcacgtttttgcaggaaacatcactgagggtacaatgcgtcttcaaccctccttcctggattggaatgactacttgaagtctatcctacccctcgtgaggcttttccctatgatcttctcaagcaaagtctaagcttgaatttttatacaacttcagccttccttcccgggagtcgaaatttgtgacataaaaattcagcatggctctcgcatgcacgtttgtgcaggaaagatcactggggtacgatacgtcctcaaccctccttcctggattggaaggactacttgaactctatcctacccctcataatgattttccctttgatcttctcaagcaaagtctagcttgaattttttatacaactttagctttccttcttggaagccgaagcttgtgacataaaaattcaacatggctctcgcatgcacgtttgtgcaggaaagatcactgggggtacgatgcgtcttcaatcctccttcctgaattggatggactgcttgaagtctatcctacccctcgtgatgcttttccctttgatcttctcaagcaaagtctaagcttgaatttttatacaatttcagccttcatttccagaagccgaagcttgtgacataaaaattcaacatggctattgcgtgcacgtttgtgcacgaaagatcactgggggtacaatgcatcttcaaccctccttctcggattggaaggaatgcttaaagtctatcctacccctcatgatgattttccctttcatcttcttaagcgaagtctaagcttgaatttttatacaacttcagccttccttcccggaagcggaagcttgtgacataaaaataaatttcatgaaaatagggattttaactaagttatagttgtggagatatttaaggaaaatatcttatgagatcttctgatattgcgtccttttttacgtagtatggaactaagcttgacatattgaattcggttggtgaagtgcaaggcatggaccttgtttggcttggctatgaattactctggacggaatcctgagtaaatataccccattaactgtgtacatacttgagatgtattagattgtttagtgccacgtgacatgcgaaaattaaaagaacaataacacaatatttatatttattgaagatagtatctcactctttttagccaaactatttaggaggaggattgttttattgaattatattctagaaaatgaggaattatttttggtcaccaaatacaggattagtcctaacctaatcctagtttctcattccatgccatgccaaacgggcgggggcgagggttatactgtcgtttttggcttagttaaaaaaactactctgcggtgtcgtagctacttcccacccagttcatgttaaaccctaaa

SEQ ID NO: 67696 - DNA, 896 bp, Cannabis sativa
catcatcatctccatcatcatcattagcatcatcatcatctttctcagattgtgatgatgaggaggatgaaataatcactgtctcaggaacagtattacttggttggggactgtactcacgagaatgtacatcttcattaatctactgtgctgctaaatcaccccgttgtaaaagcttgttgaagaattcatcattacgatcatgatgcccttttagattgacaacaacatccgctactaaatcactgtcagatggcaacttctccaaaatgcacttgtccaatttatcaggttgaggttgggggacatgcgttactacctcctcatccactctccattcaactacaaaaactgaatttaacaataccaaatatatgttggcctccctgtaatttctacctcttaaatcatccaacatcatattaattttactttcctcaatcaccctaaatcccatattcaggttcttcctttttggcttaaacagaaaaccaaaagggaatatgtatcccaattcttgaggcatttcttcaagatggagcctgttgaatccatcgaaaccacagaaattaaaggaagaagttcgaccattctcatactttctattgccacattgggtgacccaataaccaccatagaataatttcacagtaaaatttatccaaattcgaacctgtaaagttaatatataagtataagcacacagttatacttacatgtgacttaagcaaaaccaattaaactttcccaacattttgacttaaccccattgcaattaacacccaatagcaattaatctcccaatgccaacaaacaaacaaggaataatataaaatagagaaaaatatgtgaaaatgtttccattaaagaaaacaacaacccaaagattcccaaca

SEQ ID NO: 67697 - DNA, 649 bp, Cannabis sativa
tggctagatgggcctttgctcatcaaatgtttggaactatcccggtctctgttttaccggagaaccttttatgtaataaccatgagatctatctttaagtaatttaatgatatcacgcttattttaaaaaaaaaaaagacaattttatagtttctaaaatacatacgaagaagtgacccactgctttgacaactacttctgccgcactattgatatatagtgagaaacaaaacaaaaacagagaccataaacattcataagcaagccaatgaaagtttaaaataaatatatatatctttttcaagcatgccaaatagaatgatgagaaagtgaactttgtacatcgctatgatgtggtagataaaaaagggaaaaaatttcaatactcaaacacacatttggtaaaatcgcatccaacaaaattctgtagtaatgtattccagcaagcatagaataaaacttgacctgaaaataatctagattgttctcgtaaacgtaaaaacttctttacctttctttgaagagcccgactttctgaatttaaagaaatctacacacaatatatttttttgagtaatgcaaagtgctccaactgctaatctcaccatggcaatagtgctttagctttcatcttatgagcaacgcatga

SEQ ID NO: 67698 - DNA, 987 bp, Cannabis sativa
aaaatttgactaaaaaattatttatgctaaaacagataggggtgcatcaatatatctattttaagggggtgcattctagaattttcttttattattttaggggtgtaaatatagccctccaactaaaatgatcaccttagagcatctctaatggtgtacaattttcacaaaattgatgttgaattttcacatcattttactatgacataccaaattatacaccaaatttcacgctattatgatgttggatttttttaatataatttttttttttaattctagtccttattttaatttattttaaaaattaatcttacattttagtcatcaaattaaaatttataacagaagttataattgatttaaacactaatatattaaaaaatacaaaataacaataataaaaaatactaatattaaataaaatacaaacaacataacactaagttatgaaattaaaaaaaaatagtataaatgaaaataaatattaattaaaataattatttaataaatttttagtgcaattttatttaagttttctttaaaaaaatatataatatttagttaattaaataaatatttaattttcctaaattatcttaagattttaaatttttactattaagcatgatataattatataagtaatttacggtataaatacttaaatttaactttcggttgcaaataaatacttaagtttaatttttagaagtaataatatttaagttatatttctgaaactctgtaagtacctgactgctaaatagtaagtcacaatctacatgttgtttttttattagtatatttaaactatatttttttaagaaaaataaaaattcaattagtttatttatttaattaattaggattctaaataatgactatgttttatgtatgaattttactaagcaatatcatatttgagaaagaaaagatgagttagagtaagagactttaaatggtctaattaataaatatgtttaa

SEQ ID NO: 67699 - DNA, 944 bp, Cannabis sativa
gaccctcacacatcaagtactttgagatgtaactcgacctccaaaaaattactggtaatgtgcggtgtcagatattcctggcaactctatcaaaaatagctcaacagtggtactttaagttagctccatgaagattcaattccaaaaaatgagttttcctgagaattctacacacaattctcatccttgaggcttataccatctcagccgaaagaccttgtcaaggtcaaacaacgataaggggaacctttaaaggattacatccaaagtttcatggatgaggccaccaaggtcaaaggcttaatagaagaaggttagtatatagccatgcaggggggcatccttccactaagtgacttttggaaagatatctggaggaactcaaccaataaaatgaaggagttccttgacagagctggcagctttatcacgctggaagatgttgtctggcaagcctagattgggaaagttggcaataagcaatctcagggcaccttgtagcccaataacttaccaaaagtgcatgctaacgccagcacttttgcgcaaacctctaatggcaaaaacactagaggcaagcgcaacaacaataactctggaggaaacaatagcaaaaagtgaaagtataatacttctcccatgccactaaatctaaaagataaagaggagaagtacacttgcttcacccttctaacagaaaaacatgatgccatcttcatggccacttaggaaaatgtcccatacaagaagccccctcccatcagaaagaagatgagcaagagcgacatgttaaagttctctcattaaattctactattcttcacaattaataatacatatcataacatatatataccacacacatatcatttaattttatcattaaattacgaaattatctattttttataaatagggcttaaattaattacgcacatgttatt

SEQ ID NO: 67700 - DNA, 761 bp, Cannabis sativa
agaggtcttgggtgctcatttggaatgaagtaagttttttatcaaaaaaatacgttgctagaaaattctaaggcttgatgattcccgaagctattttcatgagaattcccttagtgcttagagatagggaaaataaacttttggacaaaggtgtaataccttgttcaagtcatggtgatccccactaatctatactcaaggttatgaatagtgtatatatatattcttctttatattatattgttgaatattacatgtattgtaattcatctcttctatttttttttatatataatatatagtgtttatatatattatatatatgtgttgtaatatttatgtaaccaatctcttattttaattcttgtattatttttacaattgagttgtaatttatcttgatttatcttgtattgatatataaaatctctaacaagttaatgatcaagtttttgagcttataaaaaacatctaaaatttatatgagttttggttattgtatagttggattttttattaagaaaatagttttgattatgtggaataaattgttttcttatttaattttcataacaaaattatattactatttttttagtctttacatgtttttttaaataagcttttatagttacaacatttgtgtaagtaattgattattttatataatgaaaaaataaattacactttccagtttttgtgacatttctttttatctataaaggtttatcctatatttttaagatttttaaaaaaatatc

SEQ ID NO: 67701 - DNA, 578 bp, Cannabis sativa
  modified_base (279)..(281): a, c, t, g, unknown or other
ctataccttatttgttttgtgtgtttatgtttttaagtttggagcattgctattaggtactctcatgacgttttttaaatttggtgtgtattaggcattataatgtctaacaccgatatgtgtaagtttttaattaaatttggagtattgctattaggcatcatcacggtgttggtacctctaagcacctttggtgccctacatatagcatttctcttaagtttggtctttttatatattattattatcatggataatttaaaaaaaaaaaaaacacannnataataaaaaaaaaattataaaaatacggtttgtacggagtttttaatatttttacggttttttaaattttatttacataaactatagtttttttagtgtatttttatgttgtatttttgttattttattgttaattttttgtttgtatattattttctatgttattttcttgttacttttatgtgattttcttgatttttttttatatttttttatagaatatagtaaaaatataaaaaaatattaaacataaaaatgtaaaatttttactgatgtcttatgtaattattattatt

SEQ ID NO: 67702 - DNA, 1321 bp, Cannabis sativa
agacaatcaacaacttgatgtataacaggaagtacatgagagatttgtatcttttctgttgatcaccaaaaaaatacaaatcaattttaatatattttgtacaagtatgtataacaggattagcagctaacattacagaacttaagtgcgtttggttggaggtaataaaatggaatggaatggaaaagaaataattttcattcattcttttatttggttgcattttaaagtggaaggggaaagaccattctattgtaacatgagaaaaaatttaatgattttttatcaattttttttacgcattttaaattttatttcattcaattcctattcctattctcattctcattcctatttctatatctttattccttccgaccaaacgccaccttaaattgtcacaccaaacagcgagagtgagtgtggatttgacgttgagctttgtaagtaataattgaatccaaattagttaccactgatgccatgcttctagattcagcttcagtagataatcgagatataatgttttgtttcgttgattgttaggctactaagttttcaccaaaaaaaaaacacagtagtaggtagtataccttcaatcatcagggtccactgtccaatcaacatcacaatatgcttgaagatgtagagaagacacattgttgagttgtagatcataatttaaagtacctactaagtaccttaatattcattttactgctatccactatgattaaaggaaattttgcatgaactaacatactttattaatactgaaagcaatgccaaattaagttcataatgagagagtatacaagtaagttcattggaaaattttaaatcttgacgccttgcatttgagccttacatagaaggtcttggatgtatttttactgtgaaagcaggatttctttggcatgtagaatagagcttgaatgctgagaaagattattcaaagttaaagttttactcaaagttgagataagattagagattgaagaagcatcactacagtgatgagtatatcatctacatatactagtacatagagagggtgtcggtgaagtcttgacaaacaaagagtgatcatattgagctgagagaaagccaagattcttgaaccaagctctaggaatttgtttaagtcatacaaaactttgttaagcttgcaaactctggtggggcatgattgatttataaaagcaaggggttgtatcttatatattttctcttgtaaatctccaatttaagaatgtgttgttttgagttatcacataggtcggccttttgatattgtaatagttagaacatacctaattgt

SEQ ID NO: 67703 - DNA, 3878 bp, Cannabis sativa
  modified_base (594)..(594): a, c, t, g, unknown or other
ctgtattttctaaaatattacaaaatacatcatgaattcaatttttattaatttttttttttaatataaccaacttgaaaccaatttctagcacaaagagttgaaaaaaactataatcattcttgtcttaatactttcaaattagattattaaaaaattttaatttgataaaaattaaattcagtatctattttataccattttaaaacacacatagtttgaattctcatttaataaattggagagtctaataacttttacaaaatatagagtctaaaatagtattctcttaatttttcataaaaaatatttgatttttatttatggggtattattattctttattaacttttgaatatttaaatctaaaaataaataaaaagaagaagaagggtattattgcaaatttgtattaaactatttagttgtacaacgacatatgtttgatactgttggtatattctttgtatggattcaacagttcttcctattatatctaattgggtgtgattagcaccaatcccactcaaccagctcccaatctctcttctttgagaataaaaattcaatctttacagagagagagagagaganagagagagagagaaagagagagctttgtgtgtttgtgttttgtgtttgtgagagtttttcttcattgtgcaatggtttccagttatggtagtggcatgaggaccaggattcagggaggaactgggcctctctgaattcccaattttttcattgtttcaagctttggagctcttttcttagctgggataaaagttgggttttgacttttgagtgaatgtgaagaagctttcaagagaaaaaagctttcttttttgtgttctgggttcatctcctttcatcaaatcaagttcttcaacagattttctgagcaacccaagaggtatttttgattattaatatgttgtttttgtttatgttttttacatgaatatcaattgggtgtgtaattaaaggttttgtattgatgtttttgtaatattgaaataagattagagaagtaaaaagtttggatttttatatgtttgaatgaaatagttttggagattggttgtgaaaaaaatgtaatctttattgggtttgcatttgaatacaaaaacatttgggggtagaaaatatcaaggttggagcttttttagtaactaatataataagaatatgaaaatattatgtgaattatgatataaaatgattagctggagaaattataatataatcccttatgtgaatgataattcataatacaatactaagttgaatgtgctttagtgcttccatggattaaaaatcatttctagaacagttcctagaacattcccaagatccttattttcactctgcatacttaatttaaaactgtttatgatctcttaactttccttgtgttagtatttgttcttgatttttctaaatatcttctcttcaattgcttataaaggaaaaactatagacactctcatcttttcatgttgatatttatatttttgtttaatattgatatgcaggctctcaagagtgttagactggtggaaaatctgagttgatattttgagtttgaaaggggtttagtgttgttacatatgacttttagaaccatcagggaaacagcagccaattgttgttttttcagagaaattaaagcattcatagaactcttttgatttgaactttggcaatgtcagttggttgttgagacaagactcatgatccttgatagttcgaaaagcattgtttgaactccttcattcatacatatctgtctaacttctgagtagtttttgattggttaagttccttatacagggcaaatctcctcttggcagtgaatgaaccaagaaagaatctttggtttcttttttggggcaaatctcctttggcattagatttcggtctaagtattgttgttacttctggattcagctcttttgggcaaatctcctttggcaaagttacttactttatttatcccttttgtttgagtgacacatccctttatcgtttggaaaaatctccttgatatcgagcggttaagttcactcattcctttgggacttatctcattctgcagttgcattatcatttggtatctgcagttggaaacttcaaatcaagatttcctttgggcaaatctcctttggcattattaggaagtcctcggttggcttccatcgtccttgttgggcaaatctcctttggcattacatctcctgttttggagatacaggcacattaatttgtgtcacttatcaactgggaaattcaagtgtttatcacaaagaattgttctagtttttccctatcgattctactaaaactgctcatccttaaagaagttggattgtccacattgctaaacaaggtaccatgctgccacttctctatgttataactgtttttctttgttagttaatcacatattcataatcactcctctatgttataactgatctatacttgtatataacagacttgagcgatggatctatacacaagcgactctgactgggaaagttcaagtgatagcggtatggaagatcaagaagaaatcgattttttgtatggtggacaagctcaaagcattttctcaagtttggaacaaagcattgaaaaaattgatgattttctctcatttgaaagaggatttatgcatggggacatggttctttcagcgactgatccctcgggtcagatgggaagagtagttggcattgatatgcttgtggatttggagaatgttcaagggaaaatagtgaaaaatgtcaactccaaaaatctctcgaaaatcagatccttttcggttggagatttcgttgtttgtggaccatggcttggtaaagttgctagagtcattgatcatgtaactgttgtccttgatgatggaacaaaatttgaagtgaataccacggatcatgacaagctactaccgatgtctccaaacatactcgaagatgctcaatacccgtactatccaggacaaagagtcaaggttaagctctcaaatggttccaactcggctagatggctatgtggtacttggagggcacatcaagatgaaggaactgtttgtggtgttgaagctggtttggtgtatgttgattggctcgcctctcttctcacgcctaataatccagatcttccttctccaccacgtgtgttgaactccaagaaattgacattgctgtcatgcttttcccatgaaaattggcaacttggtgattggtgtatacttccaatttcgggtcctgcatcatctactacacaaaaacacatcaacactcaaaagacattcgaaagaggactcggaagaaattctagctcaaacattgaggaaatatctgtaattgtcaagacaaagaccaaaattgatgttgtgtggcaagatgggagtatctctttaggactagactcgccaatgttgcttcccgcgagtgttgtaaattcttatgaatttttccctcaacagttcatacaagaaaaagccacatgtgatgatcctcaaacacttaacagccaaaaatggggtgttgttttgagtgtggatgcaaaggaacaaactgtgaaggtacaatggagaactcttaccactcatgaaccgagtaatttggatgatgagcagacagttgaaactgtaagcgcatatgaattgattgagcaccctgaatactgctactgtttcggtgatctagtgttcaggttggtgcagaatcaattcgatgatgaatctgataataaagaccatctaaacaccgagttttccaagagtgaagagggtactgcagactatgataataacaagttttctgatacatgctatttgtcctgcgttggcaatgtgacggggttcgaag

SEQ ID NO: 67704 - DNA, 2553 bp, Cannabis sativa
aaataatttattaatttcattaaaattatcttttagtgtaccacatggatattaaattacttttgcataaaaaaaagatagatatatatatattttaaactttaaaataagggttaaccttaaaaaaagaaaaaaaataatattgaaaaataataatttaaaatttatatatacatatttaaaaaagagaattttttatttaaaatttataatgaaactaatttgattaggattagaaatagtgttcgagtcttgaaaagagtgaagaattagaaaatgagaagaaatttattgaatatttcgatgactgcccttatattattaagtgtgttggtcatgatactactcttactattattgatggtaaagagaaagtattttacaatgtattcttagcggtgttgactatattcatgagaaggggtttgtacactgtgatttgaagcctgagaacatattattagtcaaagagataagagaagaagatttttttctttgtggctaaaaattctgattttggattggcgaagatggttgatgactcgacgacccctactctgttagaggtactaaagcatatttagttcttgagtgtcacagtgaaaatagagttcaaggatagttttcggacatttgggcaatttgtgtcatggttttgttcatgttaatctaaattggaataactatctatatcagtaaagatgcttctgaattacccaacaaatatgtaaaaaaaaaaaattcacttctgatatattttttttttaagagattttatgttttttcatttccaataattattttttattatgttttctttttttagtgtaatcatgtttcttcacaatttaatttttaattatgaaattttgtagactttgtttaaaaactaaactgtgttaattaacatttaattagtcaataatgtcatttttgtaatttagtataaaaacatatatatatatatatataaatcaatctggaattttatataattagcaaaatatattggattagttagttaatttagatagaaagatagttcaaacaaattttggctttggaatatttaataatttgttatatttaaaaaaatgagtgagatagagaaggtgatgatatggtatttgattgagatcacattttgggttgaagacccattttgatctgggccagcccaattgatagacacgcggcccataacctcatagcccaactcaaagaaagggtataattggtacaatttggttgggatcattttttttgttatctagtagagactagatagtatcttttaatttatttttctttttataaagaaatttaaaataaattaaacttgataaatatctcactatttcaatatttccatagcaaccccaaaagtaataataaggtacatgttctagggatatgctattcaagattttctttttctttttttgacaaaagttattgaatttatgtaatttgtcattatatcttttatcacttttagactaatctccaaagttacttcacaacctattaaaaaaaattattctgaaaaaaaaattatgttaatatttttttatatataaatatatattttttattgttaaaaaataaatatatattttaattaaattatatatctaagtttaaatactaatatttcacatgtttcctctaatctatgtttcaaatgtaaattagtttatacaatgaaagtaaataaattataataaccaaagttggaaaaagatgaataatacaaaccaaattattttattacacatttattttattttatttttactttcatttaccaatcaaatacttcatccttagttattataaattctaaattacaccaaatgacttaaattcaactcataaacaaaatccaaaaaaaaagtgaaattaaaactacaataaatagatcaagcaaagaagagagctaatcactatgatgaaaataacccaaagaaggtaaaagtaaaaagtaaaaaaaagatcaaagctcagattgttgatcattattattattattatgatctttagagaaggtgtttttgactttgtctttggtaattttgagagtttcttcagcaatttttgcagctgtttttgcagacatttccacagtttcaatacctttctcaaagctttttcccatagctcctttcacattctcaccattactaccaacactattactactaacccctctaatttcttcaccacctctgaaactacaaacaaaatacacacaataaataaacaaatataaataataaaacttcatgtccatttgtattttaaatatttgtaaatgtaagatatagtgcgaaaatagtgtaaatctcaacaagggtaataattattattatttccaattaaactactagcccaacattttcttacacaaatctaaaacatgggttttttttcacaaaaacacaagatctagtggaaaattagtgtaaatctcaacaaggctaattattattattattatttccaataaagctactagcccaacatttttttttacacaaatctaaaacatgg

SEQ ID NO: 67705 - DNA, 574 bp, Cannabis sativa
atggttgtgtcgctatgatagttccaataaatactttctggggtgaatatcactcttaaccagtacgatgcccgcactgatgaaccgacacaatggttgtgtcgccatgatagcacccaaacatatatattataaacacagcatgcatatatatcacacatacatacattcgcatatatacaatatgttctatgttattcttacctcgttttttatttcaagtgagttggtcgacctgaacgaaaaacctcgtgctggatggatgccctaatcacataacataattgggtaaataacacacctaaaaccctaatttgggaaacccaaacctccaacttaaggttctcctattaataactaaaactacaataccctaagaaattgggaattacccaaataaggctctgaaatggacacgaatcgaggaaatgaattgttcgaggaacctgccagaatcggctaactagttttacaggtcttggtaaactgattaaccggtttgcaccgggttttcctaaacaattccaaacatgctctgtaacgccctaatgctaagacacgctacaatgatttt

SEQ ID NO: 67706 - DNA, 1226 bp, Cannabis sativa
ttatcttatattaattagtaaatctgattatattaaaataggttttatttagggcaaaaaatccaacatcttcccccatcctttttggtggtcactcagtgtagcatatatacactgaatgtgattacttgattgtgtggagcaggttgtgtgatgtgatgattaggggagtaatggaacaagggagagtgagtgagggaatggggagggagggagggagtgagggagcgtggagagtgagagtgagggagcggggagagtgagtgagggagtagggagagagagctagggagcggggagagtgaaggagtgagtgattactcatttactttctttttttgtgatgtttgtccacatgtaactaaattagatcccaagtcattaaactatgtgttctttggttattctcatcttcagaaagggtataggtattattgttccgatcttaacaaatatcttatttttatcgatgttacttttgtaaaaaatataccttattatttatcttcacccactctttctcgtcaggggaaggatgatgattttttagtatattttgtcacatcctctgtgcctgatatatgttatgacaaagtctcttgtgttgggattttatgccctaagtaaaactcatttcaatataattttatttactaattaataaaagatcaaaaaccattttatgtttcatggttcacatgattactttcatgattttatgtttaatatgtaaattctgttaaattccgaacatatagttactcatgattatattgttgtctacaagtggaaaataatcataattatatgcttcaaattatttagtcccacaatttatctgtgtactgaatttatactgacatgataatcaaaaatatgttttacttacagttgtataagtggaatgttacatcggactggtccgacattgatagtgaaaaagatatcacaaacttactattatgtcttttctaagtaaatgtcacttagttgatcttagatcaagttatcttaatcatgagatgattaagttttgacttaatatactatacgggttctttgacttgttcaataccagtatacccatagtactaggccatacttacatcttgggaattcataatgcaattgaatatgagcattaatcatagatatagaatctatagcttctataactatttagaagtgaggtgataatttcttttgagcttggctaaatgcgataa

SEQ ID NO: 67707 - DNA, 686 bp, Cannabis sativa
  modified_base (611)..(613): a, c, t, g, unknown or other
agctgttcaataaagcattgtacattttggctcaaaacttctctaaagcactgcctattttgcttctcctaataaagtgccggatttttaaaaaaactacaaatgctctctccaatcaacaacacaacattgttccaagtaacatatttgtcactatgtgtagttaaaatatttacaagtcacattgcctagaaacaccataaactagattttacttggagagaagttcctcaatgttaccaaacacttcatcaacaccaatatataattgtcccaaacttaaacatagcactgtaataaaatatatgtaggaacaaataccatacaaatgggattcacatgaaagaaacagaatttttttaattgaaccaaaatcagaaatttatggaagtttctttggccctggctcttacgtttcaaaaaattgagagcaaaatctcgtatgattattaacacgatttctacaatcttagaactaaacattataaactaattatgacagaccttactattattaagaagaagaaagaaacaaaagagaattggatcatagctaaatcatatccctgtagaatacgaaagtaaaactctatacaaaacagagagaatcnnntgagaaaactcaaacaaccagacaaagttcccatcctccctctgtattttaatccttattagcagcctcaaag

SEQ ID NO: 67708 - DNA, 1121 bp, Cannabis sativa
atttggaataaaatgagatctggaatgaatgttattgggtttttatatttaaaatggtatccctgacggtttaaaaccgccgggtttcgaaatagagaaagggttcagacgtttggggttgtaaaatgaattttttttcttttatataataacgggtatccctgacagtttaaattgtcgactatagatttttgacggtttaaaaccgtcggggatacccgttacacttatttttcaattttgaaatcatgactattttaaacagtcgagaattctaaacgattattttaaatcgtcgggaagactccactattaccgatagttttaaatagttacctaactttataagtgattgttttcgaaaaaaatagatatgaggaccgacgagaataaacctttttgtagtagtgtgagaagagaaattgatacattgagagaaaaataacagagaaagagaaagttaccaggtcgtatttatgactggaaatttgaggcttgtattggcgatttgccattgttgatagtagaaactcaagctttctctaagtcgaccttgacagagacatattccgtctttggggtgaactccgagatcactcttttgtgtcaatcttcaatttctgtttgtatttctaactctaaataactctcattttgtagatttattgtgattcgtttgttgtattggtaagattcctaaatctaggttagatcagaggagttcttggtaaggaactcactctactaggatttgtattctttgatctaggttatgtgctttttatttactcacttgtgtttctcgactcttcctatgtttgtgtgtgcgaagtaagtgacaatcgtttgtcacatgttaggtaaaaggtcaaaattgaccttgacgtgtttaacattgtgagttattggtgtaggttgataaggtaattttttttcctacaactgtcttaataatctacacctttctttcccatcttcatcctccacatttagtttcacatttttttcctcttccagcaaaaccaaagagtagtctgttgggaattatatatggctcaatattcttacatttgatccatgtgggacaatattgtccaatattccccctcaagatggtggct

SEQ ID NO: 67709 - DNA, 579 bp, Cannabis sativa
cctaactttccccctcacttggtaagatccaagtgcattataagaatttattagctctacattaagttcaccctgatttggggtttttttttcccatttccttttggacctcagaaatgcaaaagttaacagtgtttttcaatttgttaaccatgttggcttgttcttctcactcttcttcattcctactgtaatatcttagtgaaacaagtcttaattttgtgtatgcattattatttattcaatagaaaagggcagctggcacagagggaagaagatcagaacaagatgctccagaaagtaaatatgttctatttgattatatttggtctacttaaatggtggttgtgggggttctgatgcttttacaattgttatttcttttaataatttagcatcgacaacaccaagatctcaaggatcagaaccggcaaggaagaagcgtcgctacaagccaggaacaaaggctctccgggagattcgacaataccagaagacttggacactgctaattccttttgctccattcattagaacggtaagtgtgttgtctccattcattgatatacaccaagattt

SEQ ID NO: 67710 - DNA, 624 bp, Cannabis sativa
aatacttgatgtgggacataggatcttctttttgtaatgtacattttccaagttggcattttgaacttggtcggaatttctaaggaattgatcctaggagagaatggagaatctcgacttcgatcgagttctagctaggtcagtgactttttggcgtgagttttgggccagtcaggcttttaagtaaatctaatgggcttgtacccctggatctatttgtgccacatattaatcgacctatgccattggttgtttacttggaactctatttggtacaaagttccttggttatttgggacaaagttgtcctgattgttcgggaaaaagttacccttattgttcggatggtttccctatggtagggcaaagtttgattcccaattttctcttctcctattcaggtcatcttgtaagtcatcgccaggcctcagacccatccttcaaaacacaaaatcagtcatgggtctcccagcaacattttgtcattatgtcctttcttgtcttgggggatttccaccattgtggccattattgcgattattctgatcatcattatgattgttgttttgatcggcatgacaattttcacacctttttgtcaattgtcatctcaggctcgaattt

SEQ ID NO: 67711 - DNA, 784 bp, Cannabis sativa
gtctgggtccgggttcgggtctgggtctcgatcctagtcgaggtacacgaccgtgtttaggcttgagttccggtctctgtttgggtctggggctaggtccgagttcggttataggtctcggtccgggtcctggtctcggtccaagtcttgttcgagggtcctagtttggtagttcttgtttaggttctagtttagggtctcgggtcttggtcttagtcctagtccaggttcgggtcctggtctgagtcccagatctagatccctatcacgtgtcccaatctggttcttgttcaggtccggggtccaaggtccaggtttgggtttgggaccgagattagggtgcgattctatgtccaggcccttgttttatgtcctgagtgaggttcaatgtttgggtctgagttcaggtccaggttcgggtcccgagtctaggtgtgggttaggatccgtgtctgggtcccggttcgggtctatgtcttggttaaagtctaagtcctgatccgattacgggtttgggtctaagttaaagtccggttacggttccagatccaagtccaagttgtctttctggtcccgttcccaggtcccggtcaacttccggtttcggttccaattttgattcacagggtacgggttggggtccatgtttgggtttgggattgggttcgggtccaggtttgggttcgggttctagtctgggtttgagtccaaggctaggtcccagatccagacaccgactcaaggttcggaccaagccccgtatccagatgcggatctcgatctc

SEQ ID NO: 67712 - DNA, 988 bp, Cannabis sativa
cttcgacttgtgctgtcacctgcgggagaagaggcagagaagaagagagactgttaataagttttttagtttattttttaactttttattcattttataatattttttttttaattttatcactcaaaaaaaaatatataattttttaattttatttatttttttataattgtaaataatttataaagattaaaataattaaaattatatggactaataaaaacatggcatgtgtacataaatgtacacaatagcaatccaagttggtattttttttttttttttttgaaaacatccaagttaacatcttagttggcatttaacactgaaatttaactattacattggatttgcaaacagaagctaagttaagggggttttgccaccaaaaataaagaacatgggttaagtgtatactaattgaaacttaaaggggtttggccgcaaatttctctattttatatatcaaaacaatatttttttatatatatatttttacataaattcacatagcaactcatataataatcaaaattcacatagcaactcaaattattggggctatccaaactataaattttaaaatacaaataaaaaaataatatatatccttttttttttgaaattaaactcttattaacaataatcagagtttaatacatcaatagaaaatgataaaaactatcaatccaagtttgttcacaatccaccctaagtgcatgcacaactaattcatgaacggagacatgaactagagatgcctcaggaaaaatggaaagtaatctagccaaattagctaagaaagtgtccaaatttttacatcaaacaaaacgcttcgaaaaagctgagatcaaaacttaataattagaccctaaaaatgaatagaaagctccaacaaataagagagaccaatctagcccttccatcaaaataactgttctctgcttgaatgactgaaaatttccctaaaataataacaaaacaaaaa

SEQ ID NO: 67713 - DNA, 696 bp, Cannabis sativa
ttttagataaagtggtcatgtattttcaatggtgatatgcattattttaaggataaaatattaaatatatgtaagtatagaaaatcaaaatcaaattttccatctaataaaacaccccactcttacaataattttagcggaaacaaaaaaaaatccagcaataaacatctcttagcgaaagaaaactcatagtagcatgatggtctacagaaaatatttggtaaaaataaaaatttaaagtttatcgaaaaaaatgaacgataaattgatattatttattaaaaaaaataagttagatattataaattttatcttctaataatatctatatatatcaacaatgagaatattttatccaaaaaaaaacatggagaattttataagacaaaattctcaaaaactaattcaacaaaaaagaataataaaattaatttattctatgtgaattaaacaaagcattagattaaaattttaaacttacataatgtaaattatccaatctgcaacctttattcttatcaatacttaggccaattccaattgtatggcaaaatattaaatatagtgtggttaatttaacattaatttttattaaacttgattgtaaaaattaacccaaatataagtatgtctcttggtgggcacggcaggcggtagagggttttttttttttttttttttttttttttttttttt

SEQ ID NO: 67714 - DNA, 936 bp, Cannabis sativa
actcagcatagtgaggaagattatatagtccaattgtcactagaaggagaatccaagtttagatcttgatcatactctacaacagaaaaggatcaagggttagtaatctaaataaaatgagtcatattattccgctgccatcattgtaaggattccttaatctctaatgtgcttatttattgttttaggatttatatatttatgatgttagattatagaattataatcgccatacatgttagtaaatctagattctagtataataagttttcaacaattcatctatctcaggataaatacttcagagacttgttgtgatgaaaaactaagatgtagtgagctaaatctcgctcaacccttatgaccaatggcctcaagctccctgcttatggaagtgattcagtgaaagatgttcaattacataggtcatttgttgaagatcttcagtatcttgtgattaccagacctgaaatttcatttaatgtaaacaaagtctatcaatttatgcagaatcctttgcacgtgcattggattgctgtgaaaagaatcttaaggtgtctcagtggggcaattaaatttggtttgcatctttgaaatccaaatcagcttgagcttacagccttttgtgatgtggattgggaagtagatcctggtgacagaagatcaacccttggtttcactactacaatgttggcctttagaggctatttttcactcccacttataaaaagggaagctaaagggtgtgaaaatacccgtttttttcgaaattgacatttagaggtggttttttgataaaaaccgtaggtataaaattgcattataccatttagaggcggttgggaaataatatttttttttttaggcgcagccctatggcgtcggttcctttataggaaccgacggcatagggtacacgatttgctgacacgtgta

SEQ ID NO: 67715 - DNA, 1394 bp, Cannabis sativa
cattaagtaatttcttgagaggtgctttatatcagcagcaacaccatgattattaggctcctcagaatgtcaccctcttgcaagcagactaggccaaacaattacccagaatagatcacttgatcgagctttactaagccgaaagtctcgtgttaaaaagttgacaatctctgggtggttagggctgagcatgctttgccaatcggtatctctgggcgaacatgtgcaacttgattggaccttggtgtctccataattaggtttggagttttgttagttaaatctataattaataatattaaaaattaatccattaaaaaataatattaaaaattaattataaataaatatattaattatagtatagtttttaataattaatttaaattattaaatcaaatcaaagactataaattattatcaacatcttacttttactgtaatagctccgataataatatataaaaaataattgtaatataaataaataatttatttatgtggtaataaatgtatccactttatgtgagacctaaaaatcttaaaagcataatatataaaaaaaaacacacacaaagatgccttatatatgcaacaattcaacaaaataatgaattttaaaacaaagagtttttaactcaacggtgtaaatttatgtttttgaaacaaaacaagaaaaaggtaatattcactactagcattgctattaggcataggagggtgctagacaccactagtaccatttaacatttctctattcactactagactgaaatcaatgttagtctcttgtcaaaataaaaatcattgttgggtcaattattattataaggttactaaattaaataaataataattagaacttaattttcaaaaaacttttagctaagccaaccccttaatttgcaaacccttgtaaaaaaaatccctttattaaagccacgagtctaagaataatagaacaatccaaaatcttcacgtggatggcaaccttgtatttcttaattattaaatcgaaaaatcaactaaattttttatatataaaaaaaagaaaagaaaaatcaactattttttttttttttaaaatcaacacctcaaggctaatttggtcatttagccaatttaatccaatctgaaactgttagtctttgacgcgtatagatacgcgcaacgacacttatatcaccctcttacccttaatctcaccgaaacgatgtcgttttctctaatacaaattaaaatgacaaatgtttttttctcatctggacacgtcgcaaaatcttactggctgagaataaatcacgtaaatgataattcatgtacgagagaatcttaaaagccacgtgtcgatagtcaaatcacgtagtgtatccacgcaccatcaaagcgcgtct

SEQ ID NO: 67716 - DNA, 1065 bp, Cannabis sativa
ttcaggggcggaggtattctttggagtggggtagccatggccccggcctcctcaatttctcagcaaatattttatgtaccttgatgatattattaatctattagaaaaaactttaaaaatactcttattgtgattttttttttggagatatatgattgaaaattataatttgttaaatagaaaacaggtcactaaaattatatatagttttgtattctatatctaatagaatgttttcttttatggaaattattatttttaatttctactatttatggctacacaaaatgatcttttttatctccttaaaaaataaaatctttttatctaaaaaaagaaaaataaattataatacctctaacactttgcatgcatgaatattttggaaggaaaaagagttttgactaattaattactaatgtatattgaaaaatatttataaaatttattataattattaaaaactttctgtgttaaatatttttttttttgagagattatgtattaaatattaattattatataatatatatttttttatgtaattactaattattttactaagcaatacaataaaaattcatatataaatattatttttacatataaatagactatttattttaaaatataatataattattagaaccgtttaattacgaaattaatatcatagtaattatacaattatatctaaacatgtccttattaataatttttgtgatgtgcaattctataaaaatattttcttcaaaatataaaatttttaataattggcctccctaagtgtttcgttctggctccgcccctgatggtattgactggctttcgggtgatcctcttcttcttcgccatgggagaagcaggggaacctcgcacgcccttttttcatagaatttgttgttacaacttcatacttttaaccttttttttatgataatttatttatcgaaagttaaataaataatcaatcaatcaatcaatcaatatataaaggaaagtttaaaactttccaagtggcagcttaattagtatagtttcctaatctctcttttctccattttt

SEQ ID NO: 67717 - DNA, 500 bp, Cannabis sativa
aaaaagctatatagggtacacatatgtaatgtacgtgggaactttgtggttcttttttctcttgtcaattattctacgtaacctcattaattaattatatataaatattattcaacgcagggaatattgaaaacttgaaaaacaatagtcctcatatcatagtcattgagaaagaatatacaggaatattgatagaatttataacactaattagtcttcagttaaataattataataatggtgtgactatactctatatatatgtattaagagattaattaatatttatatatatatatatcacatagccagtactgcacatatctataagcttatactagatcagtgtcccacacacacacatatatattgctatattattctactatattaactattattattatagtatagaattaattagtagaaactagaaacccgaattcgcgaaattaataatggctttaacacgaattaattattcgtttcatgcatgaaag

SEQ ID NO: 67718 - DNA, 830 bp, Cannabis sativa
tgactaatatatttagccacgaactttttagtcacaatataagaattattacttataattagtcataatctttttatttttaattacaaattttattgtgacttaaaagtgaaattttggtagtcaccatatacatggagattttttaagaatagtgttttatataaatggagcataaatattaaatttaaagaatcttttaaaataaagaagaaagtttagagtatatcatctagtctagttaactaagcataaataatttaactaagcttctacttttttaataaatataaatttgatgatttaaaataatttaagtatgcatcataatacatcaaattataaaaacaaaatcaaataatttaaaatatagagtttatgattcaaacagtttcactacaacaaataaaagttggaagtgcgatagtatcatgaacatgtcattttttatattgatagtattaggcatgacttaatgaactcgttcccaaagtcggtcttaaaaatatatataggcccacaaattaaattttaagaccttaaaaaatatatataaaaatattaaaagaagagtgttatgggagttgaacccataactttgggtattataccatccacttcaactaactaagctatgaatatttgttgattataatacacttaaattttacttaaataaaaacttaataaaatgttttatttttttattttgagctctcaaaaaatgtaaaccttaagtactaacttaacccgtctatacctagagtcgggctggtggcttcgatcatgaactttttttgttgtagtgtttgttgtgcatgtgtgttagt

SEQ ID NO: 67719 - DNA, 1142 bp, Cannabis sativa
gttgagaggaagcatagacatgttgttgagacaggtctcactatgctagctcaagccaaccttcctctcaaatactgggatgaatcttttagaactgcagcctatctaatcaatcaaatgccctcacttattctaataaacaaatcacctattgaggtattattccacactgtccctgattatacaagtctcaaggtctttgggtgcttatgctatcccaatctaagaccatacaacaaaaataagctgcaatataggtctgtcccatgtatttttctaggctatagcatggcacacaaagggtttaagtgtttatctaaagacaacaggctctacatctcaagagatgttgtctttgatgaacacacttttccctactcttctcagcctagaaatcactcaaccaccactgaactctcttcacattcaccttctggtgttcctcctatagtatcttttctaaatgtaaacaatcccccaatctcacctactgccatttatctcaacaatgacactgctacaaacccaattaccactgcctctgtgtgtcctaaccaatctcagcagccttctcaccattctccaaccataactgtcaatcccaatgaagatactgctcctgtacctaccaacaccactgtcaatgtcatacctgctattactgacaatttacctgcagctaatccagtgccttcaacttccacacatccaatgacaacacggctcaaagctggaatcaggaaaccgaaggctttattagccatttcagagccaaagtctgtcaaaacagctttgcaggagcctcattggttcaatgccatgtcaacagaaatggtagccttaaagaaaaataagacatgggtgcttgttcctcttccagatgatcaaacttgtattggatgcaaatgggttatgagaatcaaacagaatgctgatgggtcattcaataagtgtaaagcaaggctagtggcaaagggttttcatcaacaagttggattcgacttttcagagactttcagccctgtggtgaagcctatcacaattcgaattgtactcactatagccatcaccaaaggctggacaatacggcagttggatatcaacaatgccttccttaatggtgacttaaaggaagacatcta

SEQ ID NO: 67720 - DNA, 554 bp, Cannabis sativa
ataaaacactgtaaattataaaaaaaaaatcaaaaaaaatttattaattagtataatgaccgagcgaagcgcggttatgttgcctagtaaacatataaaaaaaagtacttttatcaaacacttggtgttcactcataaaatttagaaatacaatacaaaaactcacatgtacacatacctattcgaaacacacacatatatatatataaataaatacacaaacatttatatactttataaatcttttataaatctacagatctcttagatttacagatcagacattagggaaattttgcttcttataagttgaaaaagattaaaagaaaaagagatattgaaaggccaaatgaaagaggaaaaattaacttctcctaatactgtaattgaaaagaaaagctatatttagaaatatatatatatatatataaaaacatatatatatatatatataccttaatatttgagaaatggagacttgactttgattttggtaatggatctgagctgacgaaggaatatggtaggtttgggtgaaattatctaagattaga

SEQ ID NO: 67721 - DNA, 527 bp, Cannabis sativa
ccataacctggcaattttcatataactgacactgtatctacatgtcgccatgagaatcgcatcacctaatcaggtgagcccgtacctatgctcggtactcatcatatgtcgctaatgctcgtacttacacccagtacgtcgctaaaaaaattacatcatctaattaggtaagcatgtattgtgctcggtactcatcatatatcactaacgatcgtacttacgccgagtatgttgccaagaaaatcgcatcacgtaatctggtgagcccatatatcacatgcataatatcatcatattatcgatactcaaccaatcaatcttgtcaatatataacaatattgacgatatctcaatattaatcaattcattgcaatactaattgtattacatacaatgtactatgcagtacaatatactaatcttacctcaagttttagtttaggtattttgtccgacctgcttagagaacgatcgatcatcccaggctctatgttataacgataataaacaattaagtgtttatccca

SEQ ID NO: 67722 - DNA, 744 bp, Cannabis sativa
gggcgcagttgattcactcggtgttgcttgggattagaaactattggatgagcatattcatcatcccttccaaaataacagcagccattgacaaaagttgtcgtgactttctttggggaagatcggggaataagagcaaactccaccgagcttcttgggaaaaggtgtgcctccctaaaaagcttggaggagttggttttcgggaaggaaaaaaatggaacaaggctttgttggctaagtacctgtgggcgctttctaagaaggaggattgcttatgggtcaaatggattaactcaatctatttaaaagatcaaagcatatggggctatgcaaagaaggatgatgcaagttggtacttcaagaagattttgagtataagagagtacttggatgaggctaaacttcaacaagctgctaggggagataaattcagcaccaaaaattgctataattctcttgtggaagagactccgtttgcctatgcaaatgcaatttgggatactcttgtgatcccaaagcatagattcatattctggcagattgcaaactctcatttgcttactcgggattatcttcatcgcataatggttactccaaacaatctttgttccgtttgtgaaactgaagtggaaacacatgatcatatttttttcaactgctattacacatctcaggtttttgtagcagtcaacaggtggctaggggacttccattggcctcgttcgactgttgagatgcttcagt

SEQ ID NO: 67723 - DNA, 645 bp, Cannabis sativa
aataaattaaatgctcaatccatataatatataattaattatgcatttacaaccatataatatcttaaatatttttactagaaataaatttgtataaataaaataaatacacaaattaatacaatttaattatatgaaatgaattaagtgcaagaattaaagaatatatacttagtggcagattatcaattaattcaatcaataaattacttaattgataaataaatataataattacacacttaaatgtggaaatattcaaatattcacattcttaaaatatcacaattattacaattacatgtaaaaagaaagcaagtaattaatttaccaaattaaaaaatttctataattatttcttactaaataacatatatgaaaacatgttttaaataaaaatagaaaatttaaataaatataatttcatctaaattaacaaaaataaagaaataaaataaaaaattctaagtaaatcaaactaataaattttcagaatttaaagttttcttaatttttttttattgaaatctgccccttaaaaatgacgtatcgttttccattgatctaccgaaattttaccttagtcatctttcgagacctgaatttggtttctacatcaacaaattgatgtagaaacatggaaga

SEQ ID NO: 67724 - DNA, 1350 bp, Cannabis sativa
attgctaattagcctaataataataataataaagttaattagaatttttactctctgaattttgatatgtaccaaattataccccttaaacttttatgggcgttagtttaaggacttttgtccaatttcattcaattttactaattgagtgattgctcatgtattaaattatgcttctcagactttgatgtctaccaaatcatgtccttcaaactttgaaatgtaccaaattatgccccatgaactttgattcatgttagactttcctttctaaaattggaccaaaatctttaaatccgacaatctcaatagtttcagggagattttaacggctttaaaagttcaggggacatgatttggtatgcgtcaaagtttggggcaaaagtcctaattaacctaataataatttgtttttttatttagaaaggaaaatttgaatttctatgcatttattggattaaaattatttccctaaacttaaattaacccatattagtagaatataaaactcaattctacccctcccatttctaacatctaccctctctcttcctccatcaaccacgggttctccatcgtatttttttgtgttgtatgatttagggttaaaatatataaaataattcatatgtttttttttttatatatagtttccttatgttttgttaaaaaattaaattctggtgaaatctacattttcaagattctttatgattcttctgtacagggtacgatggtgggtacaatactagtgtaatttggaggttatgaatgaaagttcgataaggtacgaaggtggtaccatagtttatactgtacgatagtggttcgataattgcttaaaatttatggcataatatggaagttatggtaccacaaaccctatcttaccccactcgtaccataacctccatatcatgccataaattataagcaactatcggaccactatcgtaacctatcgaaccttcatccctaatcttcatattacacaactattatacccaccaaaattcgattctttacctaaaaataagaaaataccacaaaaaaatcaccgatcaaacatctaaacatataataataatgatttgatttttttgatttagaaacgacatgtcgtttgattaaattagagataataagagtgagaaagagtggaaatagagaggagaagagaagctgcctttcctgtattttactatcgtcgtggatcgtctgagtctgagtaactccaacgaagaccaaccaaccatgtctggcccagtagtagtcgtcggtgttacctcatgggccagcgcccttgccaggatctctccctacacttactccgccctaggaatcgccatc

SEQ ID NO: 67725 - DNA, 797 bp, Cannabis sativa
ggttctagtggagatgctaaacgagccaagtatatgtgaaaaggaagacatcgagatgatagatagctcacctacatggatgactcctataatcaactatttgctcgacggacaacttccaactaacaaaaacgaggcacggaaactcttgtattcagtgcctcactacacaatggtcgaaggaaaattatatagaagaggttatttaatgcctctacttcggtgtgttcttcctacagaaacaaagagatcatcagagaattcatgaaggcttttgtggggattatgcaggttggcaaagtctattaaaaaagatcattagacaaggatattactggcaaacaatcaacaaggacacccacgattttgtcaaaaaatgtgataagtgacgaagattttcacatgtacctcgcgtatcaccaacaaaactgaggatgatgacctcaccttacccattttctatatgggggattgatcttatcagactacttcccacagggcgagggggagccaagtatgcagtggtagctgttgatttcttcactaaatagaccaaggctgaacctttggtctccattacctgcaagaaagtcctggactttgttgtccaaaacattgtctgcaggtttggaattcgactaaagatagtatctgataacagaacttagttcgaaggtgacttgttcactgagttttgtgtaaggaataaaataattaagagcttctcgtcagtatccaggccttaggcaaatggacaagtggaagctgttaacaaaaccttgaaggatactattaag

SEQ ID NO: 67726 - DNA, 1888 bp, Cannabis sativa
aaaaaaaaaaaaaaacaaacttacgaactcgcaatcttttatgttctttaccttgcacctaagtccatcaaaacgacgtcgtttcaattttagagcttcctttttaagggattctttttcattggcccgaactactactttcgaacatggtggaaggaagtctttacgatttgattgctcgtgctcaagcttgaaatcagatgtgaattcggaaaatcaatccaaaaaacaaagaaaacaaagccacaatttcaacaccttgtttaccaagcaatctttgagggagatattttttgtgtcttaaaaaattaagagcatcattttgcttaatgttgccactctctgtaatctgcctatttcataattgatttaataattgtgatatggttagaattttataagttatgagtaactcatcaaattcttagaagattactatagatatttaacttatgtcaaaaatttaaaatgtttgaaaatttcttgagtttctagcaaagacagttaaaaatgtcataaaagatcttgcaaacttataggggtatagaagtatttgatatgtagttcaaagattatttaaataaacttcgaattgtaatcgaacttacctcagaatttcagaatcgtatattgatgaaatgattaggtatatgattagttactaacagctattaaagttcttctagggatatgcctgaaagacaataaacatattttaaatgtcatcccatctgagactaggtcccaagacaactttggatgatataatggtcaaatacttagtgtacactattactaaatttagggatgccctgtgagtttctcgagacactccgtatagtttttcttgtgtctgttctactggctatcaccttatcaggacatgcaattttttctttccccgaggcaatcttttaatatatagtgggttgcttcatccatatctgaacgtattttgactagtattcttcaaggtgcctcatattgggtcattcaatatgcaagccaaattacttcaagaatttaatatgcatgccatatgtttaaacacctataataattgctcgaaatatggttataacaaaaaccaatttgaagataattcttaacataaatagatgcagaaaatataatcaattttctcataacacctctagatcaagtgattattatgttttattttgataaaaaaaattaacttagggtactatttagtactattttaaaaaataaatagtctaatttgtcatgtaacaaaacagatggtgcaatagataatttttacaaagcatagggtttaaaatggtattaatactaaaaaaaaaagactaaaatatacaattatatccaaaatacaagaggattgttatgacacactcatggtgcttagtaccacaataaagtatcgtcctataattggttaataattttctacaatatttattaaaataacataagtaaaacttaatattaaatcgtatcaatagatattacactttataaaattgttaagcaccatcatgattagcatttctcaaaatacaatgtttagcaaaaacaaaaaagcatcaaaaacaagaaagatacattgcatccctttttagaatgcaagtgaaaaccacccaatactttttgtaaccaaaaaaagaaaaagaaaacgtcattccaagacacaatgaataatacattcaattaatgagcaaacattagtagtgtctagcactttctagacgtgtcacgttgtaattagctagcgatactctttaaaagctattacattaaactatatgagacttaatacttaattacacctacagtgatagtaacatataggaggatgctaagcaccaccgataccttttaacatttttcttaattaatttaagag

SEQ ID NO: 67727 - DNA, 602 bp, Cannabis sativa
ttgatcgatctcctatctcctggaaattaaagaagcaacccacagtgtcacgatcatccgctaaagctgaatacagggccatggcaaatgcaacatgtgaactcacttggctccagaacatcatcaatgatttcaacattcaaccacaactcccctccactctcttttgtgacaattctgctgccatacatattgcagaaaacccagttcatcacgaaagaactaaacacgtagaaatcgacagtcatattgtccgagaaaaagtctcaaatggcagcatcaaaaatgaactatgttatttcctccaaatccaacttagctgatgtactaactaaacccctgtttctaactcacttcaatgaaattgtatccaagatgggtgtgaaaaatttttacactccatcttgaaggggtctattaaaaatgttatgttagttatttcagttggctagtttgtagggttaggtaggttagttcagttagttcaagatctctgttctggtacactgatgtaactcaaatcctacattacctcaaaagcactcctggccaaggtttaattttctatgccgactgccctaccattcatttccaagcctttt

SEQ ID NO: 67728 - DNA, 892 bp, Cannabis sativa
aaatcgtcgaccttctccacagtatcaccgctgacgacctcggtgacttcggcgcgtccacccccatacgcaaccttctcgttcttctattcgtaacctattgctgggtatgggttagactcagtttcattattgctactcaaaggatttgttagagtttttatctattttatttattatttcttttcataatttttttattcttccaaagtaatcgaaaaataatatcaacaataataagatttaattttaatcaatttaggctaataattaacattaattttttatttattttttttaataaattaaaagaatctccattaaacaaagtcaaaaagagaactaatctcattcgaagtacaatctaacagaaaatcatctctattagcatattatttaacaaaaaaataatgtatttattaaatgtaatttaggctaaaaaaatattaagagaatatatttattaaaacttatttttgaaaaataattatttgatgataggaaggagccatgtgaaaaccaattaattttgttagaatatgataactaatttgatttgtcacatggaatgaataacagatgatgtgtaggattttcgttctttaatgtttagaatagcgtaagtttgtttcaattttatttgtgtcgtgtttgtgtcatattttatgtgactcgtttctatattttgcgttatgcttgtcgacgtgttttttgactttgtttaattttctcaaccctaactcgacccgtaaaaaatcgtatcatattaacactttgacccgttttgctattactaaaggaattgtaaagaaaaataataaatttagattgcattgaaaaacttgtaaatatttatgtgtatatagtttgttatatatatataataaaaatt

SEQ ID NO: 67729 - DNA, 847 bp, Cannabis sativa
atattttattgtcacgtacgcataactaataattttcttaagatttgatcatttatatattatttataattttacacatgcacgcgtgttaatcattagcttatctatctatcaaaacatatatatgtacaatcacatcacatgaataagaaacattaattttgatattaattagagacaacattctatcaataagtggcaatttgtgctatcatatatatttgtgtttatgttatgttggttgacatatttaattaattggtaatcctaatccaagttatatatatgtacacacaattcatgccaaagtgttatttctattattttggtattcttaataattaataaaatgattttatttttaataagttttatatatcactctatttttaggcttttagctgacttgttttgttgttaattatttgttaactgttttacagttaatttctgttatttttgttagaccaagttagttagctctttctttcttctctttttttcttaattagttaagttggtttggtactaaaaccaactttactatactatataaagatgtaatggctctccttgtatgatatatgatatcacattcaataatattttctagctggtttttgttcaaatccgcaatatggtatcagagcgggcactactacaaaaataattttttgcttcagttgtaaaatgatacataaacattttgtgtcggttatctaaaccgacgcaataacggcagacataaatagtcaagttatttgcttcatttccaaacggacgcaaactgttttttgcttcggttgagaaccgaagcaaaatatatgctctattagcgtcagttctt

SEQ ID NO: 67730 - DNA, 563 bp, Cannabis sativa
gttccatgaaaataattttatttttattatgaaaatattttctttcgattcgttgtcaaaaattaagcaattttggtttttacgaaacttgattttgataaaaactggaaaagatatgattttttgaagtttcgggaccaagaggtgtcgagttgggtgcattggatgcaccaggcactcagacaaggagacctagtgcacgcacaagctcgaacaacacccgtctctgaagacacggtgcactcgttcagacaagcctcaccggcatgcagtcatactgcacctgaccgaggtttctcgatcaaggaggctgcaactccttctcgtgcgcgcgtaggggctgcatgcagcctcctactgggcagccaccccaaaatgcgatttttgtgggatattttaacgaatttcgctttttccaatttcaaacccaacaattcaaaataaaatattatttttaatgtttttaaacttaaacattattttaaattaataatatttattttcttaatagattattattaattctttgatattttgaggtttaaatttaaaaatagattatt

SEQ ID NO: 67731 - DNA, 1141 bp, Cannabis sativa
tcatgatggagggtccgagtatagtggtccatagctttgcttgtttcggctgatatatggggctcgccaattatgacccctaggtgacccaccactagtagtggtattgggtctctattttaggcatcttgtgcctatgtctagtcgtcttgcacataacgacacagatgggaattgttctttctgattaagaactcgatttctaactttaagttcttgcactcgttggtatcatgactaaaataattgtgcaattgacagaatttagaggtgtccctcttacttatttttttccttatgggaggaggcttcatgtacggaactatggacttaatagctgtgtagactgtttcaggagtttctgttaggaggatgaagcatgtgaagctccttttcttctcttttgagtcttgtggtgtggggaattattaaatttcctccttttgccttttgcttggccagagttattattgccacgcttgcctccaattttttggcctttgaagcgctggctgcctatgctagcaggtgtgttggacaaaacttagggttttccaccacttaggacatgtccatcacttacttgtctcccactttaggcttgtcagatatcttattcaagcttgacaaagccttcttcctgatcaaggaaatcaaccatgttttgagttgagtatcgacagatgtccttccataactcactcaaaggtaatatgccactcatgatggttatgtacctttcttcctccatcagattcttgaccttggtagcttcagtcataaatctttggagatagtctttaagaggttcctctgacctctgtatgacctccactaggtcttccagccaataaggtgtttacttggaagacgagaactgtgtgtagaactctcttgtgaaagagtaccatgaatggaaccttctgttcacaagtttggaaaactactactgtgcaatctcagttaaggttgccaggaagattcatgaatgggtatcaaccttaacatttttaaaatccatctagttttcaatatattgtatgtgagacaagggatcttctttccctgtgtacatcctccaagtaggcatcttgaacttggtaggcaagggcatcgcatttatgtgcacagagaaaggtga

SEQ ID NO: 67732 - DNA, 951 bp, Cannabis sativa
tctcattaaaaccccaaccaattgggtctttaacttacactgacatgcggcaataatgtgatgaaatgcaacaaagaacgcatcgggctgccctggttggtaagggatggggtaggctcgacaatgtgagaaataacaagaaaaaaatgaaatcagtgagtctgtagttatgggtctaattatttatttattaattatctttgaatgtgctctattaatgtggttaatttggatcttttataatgattaatgtcaaatcatatgtttgcttcactcttttcttagattctcattattttgcattgttctacaggtaaaattaaaattgtctgtacaagcatttttggaactacacagattgcaaaaggaaactaaagagaataaaaagactttcttgaagaaattagagaagaaggagaagtttatattatgcttatgtaatttgtttttgttaatttttgtatcataaacgtttgatttttaaagtgtttattaatataatactgttctgtaagtttttttttttttttttgaaatggatgttctgtaagttgtttaacgattgaaattattaagagataatcttgtcaaattgttcacattacacgctttagaaaggaaaaaagaaccgaactgcttatgtattatatatatttaataataataaatatataaatatgattattataaataatttaataatatttcaaaatattttttatttatttttagtgacatttttttaaatgatacaaaaagaattatagtaacatttgcacttttactcagtatatcttacatttgtaggaaatgttattaaaacaataaatgttactaaaactaagccataagacatttttaaatgttactaaattcaaattttggtgtagtgaagctaatgaatcgataacaagtgcaaccattttcttttctaaaaagtccttcaactta

SEQ ID NO: 67733 - DNA, 815 bp, Cannabis sativa
  modified_base (428)..(429): a, c, t, g, unknown or other
ccttatcgataaaccacatggcaataccctagatatctcaaaattgggaaaaactagggttctaaaaattcccccaaccggcaaaccggtcccaaccggaagtctaaaaattgggacaccgactggtcgactggttgtttcaggtcccccagaaacggtcgaccggttttgtgctgggaacacaaaaaccaacccccttaactcaattcaatcccaaaccttcctaaaacttccagggtacctatacaatgcatagacaataatttccaaccagaatttcacagaacaaaccaataaatctcaagttgccattaaagctcaaagcttagaactccaagcacaaacttgcataaaactcacaatcaaactcaaaaccagctgctatgaactaatatcaaaccatacaagccctagaattcgaactatgnnagcatcaaaccctaacagcccctaaaaccataaatcacctcttgaaactaaaatacaacttcaagaacttaaaagggaaatgagctagggtttaccttgatggattttccttgaatccttggctgaaaacacagaaaattacagtattggttgggttttccttctggtttgagagggccgaacaccaagagagagagaagagaaatggtattatttttttctaattaatttctttttcttacttttgtttttttttcttcaaagtaatccctctttcccaatcacttaattaaattaaactaggtgtcatcacccatggctgccacctactctcatcaaggaaaagactaaaatgccctttgacccaaaactagggtatttcaaaa

SEQ ID NO: 67734 - DNA, 1080 bp, Cannabis sativa
tgagcaatgaggtttctaccgatttgcggtttgtaatcatgaatgattgcagttaaataaagtttgaagattttattcaaaaaaaaaaaaaaaaaaaagaaattatatatgtaaaaaaattcaatattataataattacaaaaaaaaaaaaaatcaatgatttttaattaattttttgtgtatattttagctgtttctcctcaaaagttatacgtccaccacctcaacaaccaggagccctttatcatctcagataaattaatggcatttagacagtgaagaattcttgtaaacatgatgttagtaattcctttcattttgtgaaataagaacaatatacaactttatgttaggataccaacgtatgccaattaaaaaaatttcattctgtaatcaaatcgagaattgaatgaacgaagtacagagaatggaaattgaagaattcagttaaaaatgacatgtttttaatcaagttagagtggatggtaacatataataatgaactggtttttctcgagactttcaattatatgtaaatcaattaagtgtattattaagctcttaaaacacctaaaacaaataaataactcttctaaatatacggtctgaataggttagtaataatgaaatgagagcaatgacaatcgggtatatatatttatttttcttgtgctaggctgttaaatataataaccacaaacaagaagtgtaaaaatgagttccaatacagccccaagaataaacaacatcggtatgggcaggtaattagtaaacaacaaatagtataaaaacaaacagcaaagagtataaatacataataaacagcaaagagtataaaaaaaaaatcaagatagtaattagtaattactaagaaatatatacatttaaaagtggtaagtagtaccatatatcttctatttacctgagttggttttaattgctttaccaaatcggtaacttcattgttcttgacatattccagttttgcagcagatgaatttggagaatacggatatgtaggtgcttgaatagtaatattatttatgtctgctttgttattttcagcccttgacattgtaa

SEQ ID NO: 67735 - DNA, 650 bp, Cannabis sativa
tgctttttaaaattaaaatcctttctatggttccaattattgaggtttttagcacaagaagcttgggtagcaactaaattaaggatgggctcatgctgggtcaggtggcaagtccaggactggtcgaaaacacgatttcaatttgggtccttaagccaaacattctcgaagtgaaaacgtttactattactattgggacgagtgcccggaggattggaagtgacaagctcaagggctcggtgatcagaaccgaagaaacccaaatgattaagagcggcgtcagggaagttttcggtgcaagagttattagcaataccccagtctaatcgttcttgaatgttttttggggatgcgacattattgttccacgtgagcaagggaccaggctggtcaagcggggagaggttaaaagagtcaaggaactgtctgaaatcagaggaggggcccctgtcgggatttcccccttatttatcatgggaaaagagaaaagcattaaaatccccaatgataagccacggatcccgaggattactcttaccaatccgattcagaatattacaagtgtgaggcttaagagagtcaactggagagccataaaaacacgtaaggtggaaaaacacattagaaaccgtacacgaaacataacaatc

SEQ ID NO: 67736 - DNA, 718 bp, Cannabis sativa
tttttttatatatattttttataattgaagttagttatcatttgatgttttaaattttattttatttttattaaaattaataagcaataaatttttcaaaaaaaatttgagttggaccaatcacaaatattttaaatgtgtcatatctcactcaacaaaactaaaggaaagaaactaacaaaattactcttttggtaactttatgtacctttttcactaaaaaaattcactagatccttgttgattacaactattaatcaatgtgtccatacgcaacaaagatcccatacatcttgttaaattcttttcaaaatatataatttcattgctttaatttttttattttcaatttgtagtcgtcaaaatttaaatatagtacttaacttaatgtggccatatgacatattttgtggtgttggacgtatatataggatagtgcaaaaaaaaaaaccttaaagaaatactaattaaaattaaggcactaatagtagtgttacaaaatatcatatgattattaatataattaaatattaattttacatattctaatttaataatattatgcaaaatcactaattaaaggcttttaaaaatgataaaacaataagaaattctaactaagaacttatttgacgctgaagcaagacttgcatatatgatgatggtgtagaagaatttataattggagaactattccatatattattttttttaactt

SEQ ID NO: 67737 - DNA, 809 bp, Cannabis sativa
gtccagcaagacagtatcaataacatgtttaccacactataataacattaatggtattcttatatgcctatgtgacacagacctgcatgttacgctcacatgcctatttatgcctgcgtaatgtaggcctacgtgttgcgctcacacgtctaaatacaataaggcctttgaatggttcatctcagttctagttaccgagtccaacctggttatgccttggacgcataaccctaaatctcaacatacttatatattcagcatggcataacatttatacaacatatatcattagggtaataagcttcggctattaaaccgctcatgttcgggtgataaccctaatcatagttactaaatactcacataaatcatttccaacgtaagtgccaccgcacgtaactctacgtgctaaatactgtcttacctgatgtcccgcaatagcagagattccaaatcccttggtgctcttgaccaggtgctagtaatcctagtcataatactaggatttacacaaatagggttaacccctaattcaacattcataaaatatattcatggcatttaaaatatagataaccacatagagctaagagtgagctttccaaccatatatagaactcccaaaacaaagttcggatcacaaagttacgaatttccaaagatgcactcgaatctgcccagacactctagggcgggccgcggcatgcaaaagccctgccgcggcacctagaaccaattcccaggtctcatatcaggggcgggccgcggcatgcccaagaccatgccgcgacacctgggtttcaaaccca

SEQ ID NO: 67738 - DNA, 2066 bp, Cannabis sativa
  modified_base (1504)..(1510): a, c, t, g, unknown or other
  modified_base (1541)..(1542): a, c, t, g, unknown or other
acatttctaatttctttatattttgaacgctgtcttcttctttttaattttttttcttcgagcttccctatgtgttaaccgcatgaaccccactttcacacacacacacacacacacacacatatatatattttatgtctcggaaaatgaagtgaaagagaaagagattgttgggaaaccctagctagctttgacttggttttgacatttggacttagtatggacaggttcgcctctatatataaattaatggcatatccttccatccacattttcctctctttagttgtcaggaaacaacatacttaacaagaaaagtagcagaaaattatggaggtgtctataagatttgctagctctctatttgtattaattatgttatatgtaagatattccagtggacaatcatatccaggtataaatttatgtttatattaatttctcttgacactaattaatattaattattcctttgttttttcaatagttataaatttagcttgatttcaattcttctcaactatttgtagccgcttcaaacagaaaattattgggttatgtaagaagtacttgtactacaattggagttgctgggccagaagagtctccaatgcattttgaaaaggtatatttatactaatttgttgaatattgttcatttttatcattaatatattatttttttatcttctataaatatcatataacaacacatttttttaaaacatatctatggtttaatttaacaggaaattactttcaataatggtgttcctagtgcacctgatgatcatgaattcgaaaataaaatgaatggaggaaggaaaatgatgatacagtctaaaaagcatatggaattagttttcttagacgaagaagataggcaaggaattttaaagccaaaaattagtaccagtcatcgtcggttgaaggccaaaagggctgatgttatagctttcaattctgattatcatgttcctagacctcatccaccaaaaaacaactaaaataaaaggattcaggagagagtatagtagtgtttaattaagctgtactagctagtcatgtagagtgtggtgaagtcatcccctggccttttgtttttatgattatatttctttactagtttataagcttcttaagttatattataatttggcttatatatatatgttttccttaatttgattagttttgtaagcttttacaaggtacaagtgaagaatatcatacttgtacgaatgtacgtaatactactacgaaagaagaagaaaagaaattcatggatatctttatatgttggtatagttttttttattttgttaaagttaataattaatactaacactgttaaatttattagttaattattattttttatataaatttattaattattttgcttaaaatatctaaatttaattatttattaaaatataatttatatagggataatttcacaatacacaaaaacaataaaaaaaatacaaaaatacggtttcannnnnnnttaaacatttttacaatttttttgattttanntatagaaaatacggtcttttatgttgtattcttgttaatttgttgttgattttttgttatctgcatgttattttttgttgttattttgatgttatttaaatgttattttcatgttacgtttatgtagttttcttgttgtttttatgttgtttctatagcaaaccgtaaaaatgtaaaaaaaattctttaaacgtaaaatgtaatttttttttacaaaaaattgtgtcttatgtaattatccctataataatatttgatatatcgtatcattgaaaattaatatatcgtaaaaataaaattatttaccacaaaataattataacaatactaaattaatactcaaaaaatatgtatatcatgttaacaaattaaataaattactattaaattatgtatatatacaaaaaaaaaattatatactactattatacgtaacaaaataaaaaataaatatcatcaaaaaataataatataccatacaataaaatagaaatatattttataacaaaatctatataccaaca

SEQ ID NO: 67739 - DNA, 1008 bp, Cannabis sativa
cagaacccaggaaacacaagggttacgccagcagtaaatcttggacagccatcaactgcgggtcacggtgtgacaactcttgtggatgaaatcgggcctggtgtgctagagactgggaatactagttcagcagccgaccaaggcattcatagcacagttgttccgcccgctaccaatgtttaaacaaccattggagttgacactgagatctagaacctctgtgatgcacttggaatcatgcaaggtcataccaacaccctgcatcatgattaggaggaactccatgatgcagttcatctcgcgtttgaagagcagaggggcatgtttgccgaatggagggacaaagatatggaaactttaagggctcaacaagcagtcattgacgatcgtagttggcaagccactgtgctgatacaaaaagcctatcaaactgtcgggtagcagcctgcgaatgtcatccccttgggcaaaacagatgaagatccagcgatgattacctcccaggctataaatggtcagccgtcaaatccccagtcacaagttccgcctgcaggccaagtggcaggatggcagaccttgtctagtaattcatttggagaagtcatacccaataactcaaatcaagttaatggtgtcggtcagcaaattggcgaaaccaaccagtcattgagacagccaggtatttccgcatttgataggctggggacgactcatgatctcagaaaagatctgaataggaggagaggagtagacgatcagcttgacatgccgatcgtgcagcccgaaacccgcactcaaattcccactcaaaaagatgctgatgtgactcagatcggttaagatgccgaacaggttagtccagccatgcaggcacaactggacaaactaaagagtatgttccaaggcatgccggccagaggaataacgatctcgagttggaccgagcacatggaacccctttctcccctgagattaatatcctggagttgccccacaagtttaagatgc

SEQ ID NO: 67740 - DNA, 782 bp, Cannabis sativa
tgatttttaaaattatataaaaatataaaataattattaatatatcatcattcaataactataataatgagtgataataaattaaataatcaaatactttaaattaaaaataattttctttataatagataaaatgtatcattatatgaaaaaaaaaatcattctgcacatatattgtaataaaattatataatgtatactaaattgccctaatccgatccaatatacacactgatataaaaaaattaagttataatttcttaaaattctaaaaaatgaagaaatctcaaacaacataatgtccagctatagaaattccctaatattttgttgtgaattttcaaagccatttgatttttttgaggccaccattctgacaactacattctcttgtctagttttgaccattagcaataagttgacataattgtcatcttttttgtggttagaatttttttatcatataatatgttcattttccttctttccattcttagaatgtggaaaattctataagcttgatatttaatcgtaacatcatgtcatcatcaactaaattctcacaacttattccataaatgaaaaacaattgaacataaattaaactaggagtacaataataaggaactagtcttttttctttctttctatttttaatattaaaaaaattaagaaacatacccgcatggtttcgtaataaagtaaatttagattttgtgttaaaaaaatatggccatcctctatatattattagatgacaatttgtatcttgtgttttaaaa

SEQ ID NO: 67741 - DNA, 3389 bp, Cannabis sativa
cggatgtttcaccccttgcttcctcggttcgtccttcttcatctacaaatcccccaagaaccaagaaactaagatcatcatgctccaactgtggcaaacctagtcacttggttgacaagtgcttcttcattcatggctttcctccttgttatggggacaagaagaaacaagacaaagacaaagttactgcccctcaagcttctacagaaacatcgactactcaaatacaagttgatttgtcaactcaatcccaacaactaatatcactccttagccaacaattgaaccagaatgcacctgctcccgaccatcacatacatgttgctgcatctaatatggctggtaacacctctactactctctctcaatcttggattattgatagtggtacaactcaccacatgtgctccaacataggtcatttcacttttttctctaaaactacatttcctaaacatgttactttactttacctaataatactaatatccttgtccatgccattggaaatgttcaattaactcttaaattatttctgcataatgtcctatttgttccttgcttcaagattaatcttttttctgtcactgcatacatgattacacagctaatttagtttcattcaaacctgaaatgtgtctcatacaggagtattctcaaaatcaggtgattgggatagctaaacgttgtggcaagctatatttgctgcactagaaacctggtgctatggcatattcaagtcaatcttccccttttattttttagaataatgtagatcaatggcataattgccttggtcacccctcattgtatgtttcaaacatgttcaatgaaaagattgacccttcttatgatattcaatctcgcatcactgctccatttgccaattagcaaagcaaaaacgactcccattcccctctaacaacaattttgcacaaaacatttttgatttacttcacatagatatatggggacctttccacataattagtgttgaaggctataaatattttctcacaatcgttgatgataaatcaagatttacatggacacatatgctaaaaacaaaggttgatgctcaaactatgctcatcaatttttttaacaacatttgcacacaattctctgcaaccatcaaagttgttcattcggacaatgcaaaagaacttaatatgagttctttttttcctctaaaggcattaatcactaccactcatgtgtggaaagaccacaacaaaactcggtagtagaaagaaaacaccaacacatataaaatgtgactcgggcactttgtttccaatcaaacatacccctatcctattggtcttatatcatacaagcagctacctatttgcttaatagaaccccatctactttgctaaagggactcacatcctatgaagtccttcacaataggcctccaacttatgaccatttaaggactttctgatgccttgcttatggctccactttggcctcaaaaatacataagtttacccctcgatgtcgtgcatctatattgattggatatccccatagaatgaaagcttacactttgttggatatagaaacaaaccaaatttacatttttagggatgttgttttccatgaaaacatattctccttcttctctaaaaacccaacatagatattgacttatgtttcccacatgtcatacttccatccaacacaccactcccacccatacttctactccataccctgatatccacactcaatcctccacaaaagttgtcgggaccaaaaagaaaccttctcagcttaatgactatatttgccatactgccttccactgctcacccaattgagcaattcctctcttacatcaagcttagtccttaattcagagatgcagtattagcagcatattttgaaatcgagcccaaaaactatgttgaagcatcacagttcactcactggctcaaagccatggatactgagacacaagcattagaaaaaaaccacacttggaccattaccaaactaccaccagggcaaaaagccattggttgtaaatgggtatacaaagctaaatatgactaacttggagctgtagatcggttcaaagcacgtttagtaatcaaaggatacaatcaacggcaaggacttgactactcccaaacctatgccccagtttctaagttcaactcattaaaagtttttttggcacttgttgcaatgaataattgcaatgttcaccaattagacattaataatgtctttttacatggtgatatttaagaagaagtttacatgaaacttcctcccagttataatgcccctcctaattatatttgcctcttaaaaaagagcatctatggcctaaagcaagcttctaggcaatggtactcaaaattgagttccacactactcacacacagatggattttcacaatcctcatctgataattccttattcactaaaagaacaaaaaacatgtttcttgatatattaatctatgtagatgacattgttgtagcaagcaacaatgatcatgccatatccaactttaaactttctctcaatagcaagttcaaattaagggatattggttcctttcgttttttcctaggccttgaaattggtcgtaccagccaaggaatatatgtctctcaacgacctttcactctacaatttctcaaagacacgggtaatctaggtgttaaactagcatcctccccaatggaatgtaacctcaaactcagtaaagataaaggggctttactccctgatcctactgctatcgaagcttgattggcaaattgatatatctcacaattacaaggcccgatatcacttatgatgtcaaccatttgagtcagtttttacaggccccttgtgttcctcaccttcaagctaccaacaggatattgccatacctcaaaagcacaccaggacaagggttgttcttccctaccaacacttccccaactgtctcaactatgcagaaactagcctttctccagctaatgtacaagcttccttttttgctgatgctgattgggcaacatgtcaggatagcaggcactccttttcttttgtgttttccttggtcggtctcttgtctcctggaaatccaaaaaacaacaagtcgtctctcaatcttctactgaaactgagtattcgtgcaatggcaaatactacatccgaagtaacttggatccttgctcttctccaagactttggcatatctcttgaaatccttgcattactctattgtgacaataccgctgctattcacatcagtgagaaccctgtctatcacgagcgaatgaagcatgtagagatagattgccacttcattcgagaaaaaattcaacaaggctccctcaaacttcttcatgtatcttcacaacagaatttagca

SEQ ID NO: 67742 - DNA, 1515 bp, Cannabis sativa
cctcttgtgtaaccatgaaacactaccgaatcggaccaacatcgctgaaagtttcctccaattgattaaccaagtaaaaaaaatataatctaaattagccaaaatctagctcccttaagcattcaatactgattaatccctaaaatacagcttataatccctaattttgtatacatacaaattagttcaagtgttttgcgatggtttatcgagaaacaaaaatagataaatcacatagctaagataaattttttggcaaaattgcattcaccgctggaattaacactaaaaacagaaagaacaattcaaaactttgactccacatgaacaattcgccccttaccttttctacaaagctcaagataagatgaaaaacttctttcactcaccgacaactcagatccaagcaaaataaaaaaaaaatgattaaaaattcatgaagcgagaactcactccctaccaaatagatctaaccagtacaaaacattaagaacaaaaaaaaagtttgtaaagactaaccccacagggtgtcgaatggcgaaaaagagaggtcttgatgagagagaggttgaacctgtgcagtgccgacttcagagagaagaaagaataaacagaggagagagattgattgcgtgtgagaggcgcacagagaaaggggaatgacaggggagatgaggaccactcgtcgttgattaatggaagaggaggtcgaaaatcagcaaagcaacctgattcggagaagagaatgaatagtggtagctgatttcgcgagttaggtttagaggaaataggccatttcgtgagtcatactcgaccataataaaccgatgctgaacatcaataaatttttaagttttctttttcttgtcagttatcttattagcgtctaatatagcacaaacacaaataatggttttttagtgtcagttttaaacactggcataaaatacatgacctactattcacgtcggtcaacaaaatgaacagtagagttgaccgacgtgaatagtgtaatttgtagtagtgaaagtaaattaaaattaaataaaaataataataacaaaattacattaaagtagcaataaaaaaaatttaaaaacgctcataaatatattttaaatgctaaattaattatagacacaaaaaagtaaaatatgccaatataatcaaatataaattataaattcaataagtacacttataaagacaaaattaaaattaaaaatggactaaatatagaaatatatattcttaaaataaatttgataacaataaatataaaagaaaaaatattacataacttacctaataaataataaatagaaaataacaccaaataaaactaaataaattcatattattattaaaccgctgtaaaaaaaatgtaatgttataataaatgcaatataagaaaattcctttgttgtaaaagactcttcttaactacttacctactaactatttctccacgcctatcagttcgcaagatctttaactacttatcttaatggtttt

SEQ ID NO: 67743 - DNA, 870 bp, Cannabis sativa
gagttaggaatgatacttattgggaaggaaaggttctactattgttacttgtgtgttaatagaattaaaggaaatgtacagagtcgattttggtttaagacaggttaggcttgtgcttaagactcactatgccattgagttttaaaaaaaaaaaaaagtaaaaattacaagagatatggtaagaatttaagagtttacttttttttttatagcataattaaataatgataataatgtatgagtttttttttttttttttgcttacatttttatgagcttttttatgctatagttttgtaaataacatctcaaataccaattatctttttcattatttccttcttttttttaagaaaatgataataaaattgtaggaattttacttctttaaccctacaccaacaaaacaacaatgatcggtttgcaaggtcaatttcgaccttttctcaatccaagtgaatttagaccaaaacggcaccactttgaccaatacaaccacaaatctttgtgtctttaacccacagccaaagagacctttcaagaaaaatctagaaaccctaagaatcaaatacaacacactcaaacacagaaatcaaaccctcgaaaccctaacagagcaagttcttctcaagatagtacggacgtggtacccattatataatatccatgcatgctactaaaaaagatgttggaattctattccctatttaacacaacttggtaaaaaataatagggtttgattcgttttggactgtaagagtttgtcttaataactggattgagtttggacggtagctctaatttggatgaattcaagcaacaaatttcattcaggaaaatgttctctaatttaaatattaaggtagaat

SEQ ID NO: 67744 - DNA, 801 bp, Cannabis sativa
agcttgattggcataggaatatgtttgattaggttcaaagattgattgcataaaatttggaagagttttatgcactttattggagttcttgtttacctgggatttttgctaaagttttgctgcaacaaaacgcacagtttctgctaaacataaggggattcaatagttcaaacctttcacatttcaatagtttacaaatcatttttattttcatcatgcatccacttttgagttaatttacttattttctttttcatttagttgaatcatgaatgatttcaatttagctcttaggcatttttcttggtaattaacttttgcaatagaaattttatttttaaagtccttgtggacacgatactcattacttatcattgtattacttgtttgtgactacgtggacttgcgtatatctaattttagcacaacagccataaggtagaactaaggtggggcaggtggaagtccctcatttaggtcatcatggtcagcaagggagtgtatggtgttttcagtatcagtgagatgaaaggctgcagaaaaagcacgagctaagtcttccatatttggcaaaatagaatcaagcaaggaaatagtagacttttagaacgaaaacagggcatgcagaggtaacaacagatcattacttaaatagggaatttctagtatagcaattaagagaagtgtagaacaagttttcgtatctcgaagtacacttgagtaccaaagatagaaaaagggcaagaattaaaaactgaatcaggcgggggattatccaaatccagcccctgactaggtagg

SEQ ID NO: 67745 - DNA, 1142 bp, Cannabis sativa
ccacccatgaacaaaatggggttgcaaaatgcaagcatagacacttaatagagtcagccctcacatttcttgctcatgcatctatgccattgtccttttgggatgaagcagtaagagctgctgccttcaccattaacagattaccatctgttgttctgcataacaaagcacctctccaggttctatataatagagatcctgattactcttctctaagagtattcggctctgcttgtttccctaacattcggccatacaataaaaataagcttcagttcaggtctctaaaatgtacctttctcgggtacagccttcaacacaaaggctacaagtgtctttcacccactggtcgtctttacatatccagagatgtgttgtttaatgaactctcttttcctttctctgaaatcactccatcttcttcaccttccccacacagcagcctctctacatcagctcacattcccactgtttctacaacaacaccaccatctcctaatccatctacatcgaactccatttcaccatctctaccatcttccacctctaccacacattcaccctcaccaaccaacacaacacctgtcatttcaccaactccccctgctgcctctactctaaatacccatcccatgacaacaagagccaaggctggcatacacagaccaaaaattctccttgctcatgccattcccaagtccataaccaaagctttacaagatgaaaaatggaacaaagccatcaatactgaaatgacagctctggtgaaaaacaaaacatggtctcttgttcgtttacctgatggcagaacagctataggctgtaaatgggtacttagagtgaaagaaaatgctgatagttcggttgacaaactaaaagctagacttgtggctaaagggttctctcaagaatatggatttgattacactgagacctttagtcctgtagtaaaaccgaccaccatccgaatcatgctcacagttgctctatctaaaaattggccaatcaagcaacttgatgtggataatgcttttcttaatggtgaactaaatgaggaggtttacatgttgcaacctcctggatttgtggatcccaaccaacctcacttagtttgtaaactacataaagcattatatggtctt

SEQ ID NO: 67746 - DNA, 767 bp, Cannabis sativa
ttttataaaaaccatatgtatagaattagattataccatttggagtcggttgggaattggacaatggtgaattatgtttgagaagcctatgccatcagttattatctaattactgaaggcatagggtacacgtggaatttgacacgtgcatcctatgccgtcggttattagataagaactgacggtatagggttatatgaataaccctatgcttcgtcttcttccttcttcctcacgaacaaacccaaaccagcccactggccaccagaaaaccctccccccttcgccaaccaccacctcctctagccaagttctcccccattttttcaccatttgagccaatttttttttttttcaaattttctattttcgatacttaatcccatacaccgaaaaagttttgattttttccctatttaagtgtcattcgaacccattagaaaatagtggtgggtataactccggctaccgatatttgtttagaaaaagttgaatgtcaacatccattaaggtataaatatagtttctattcatttttataatgtacattgttttatttttagtttttgtaaatattttttttaggattttttttcatattagtaacattgttgtgttgtatgtgcatagcgcccggatttttcgcggaatcggttgtcggattgtgcttataagataaaaatttaaacctcaatatatagtatatatatgtatttttgtattttattgaatatgtgtttatatattgtgtatatattatttatgta

SEQ ID NO: 67747 - DNA, 877 bp, Cannabis sativa
taaccaattcgaaaattctcaaagacaagatagaaagtcggcaataacactccaccttaagggggagtatcaagattaatttgttataaggtgttgtgtattgagttagttaggaagttagaagttagttttgtctgttatattcaggttgttagttgtttgttattgtgagctctatacaaagcaaccgattgtactgaactctttgatcaataaaattcatttttccatttctgtttttctctgttttacaactaaaaaaatcaaaatacaaaaatccacagaatataatattgcgggaacccctccttattatctcagctcaaggtaattcgttttttttttttcattattttaatacattagtttaaatttgataaattttgaattatcaagaaaactagcgtaaagtttaaaattgttttacacttatattgcagtataatcaaaagactatacaatgaatgagactaacatgactatgtatgtatgtaaaaaatgaatcaactactgtaatgagtatttgccagcatagtttttctatttttttttactatagcaattataatcttagttatatagatttatatttaaaactatttgtatatgtatatacttactatttattatagatgcaaataatcaatactatcaatgcgcgcagggacaaatttttattaaaaaaaattatattttctccccgtaattgacctaatattttggtggtttcaaagtgtcgagtttagtatctatctcggcagttccaggtgtcgaaattgctcaaactcatgtgaagatgatgttagacttttatttgggcttacattaaattttattggttttattaaaacttgggttgattggatagttctttgct

SEQ ID NO: 67748 - DNA, 905 bp, Cannabis sativa
attaatgttaaaatagaaagattaaatatttcatgaaaagaaaaaaaaaataattaaataacattctataaaacaaaaggattaattattattatttgctttatttattataaaaagattaattgttatttgctttaattaatactcacagattaattacaatatatatgatgcaatttaatttaattttataaatttactattactataattaatgatctagtattatcaaacaatataatatataattaaattaaaatattaataataatataaaagcatgttattattctatattaattaaatgagttaatctatttttattgttaattaagaacttctataacaactttctattgtgcaggaggcctttcatatttccttctcctaatagcattaatttaaaaattagaatgaataaagttgctatgtatacaaaagagatattttatggtaaactatattctttataataacttttgaaattccataacatatctaaataaatttaaatacttaatccataatatttaaataaatcaagagacataattgtattgtacacactaaataataatctgtcttttgaatttcctatgagaactaaaaatattggtgcaattaatagtgatgataaaaataacaaaaatattaaataaataagagaacagagaaaaaaataaaaaatgaataataattcataatcttattattaaatgaaaaaaattactattaattaatattaacaaaaaaaaagtaggcataaatgacaataaaatgaattagaagcatgtacacaaattataatagaataagttaaaaaaaaatgtaatgaataaatatgatgaaaatattaatcttatgatggagtactattattaaatgattaaaaaaactaaaaaaaa

SEQ ID NO: 67749 - DNA, 655 bp, Cannabis sativa
attaataaaaattataaaattttagatttgatcttttagtgacatttcatatttttagtgacacacattataggtgactaacactgaatgtttaaagtcagcttctgcatgtcactaaaaatcactccaaacttattagtgacgcgcgcatttatgtgtgtcactaaatagtgtcactaaaagtccaaattgtagtagtgcttaaagttaccctcctttacttataactattattttttaattttaccttaacttttgatttatgcaaaagaagatgccataattttttttatttgaataaaagcaaatttagattaaaactaaaagttagacctcatggtcattacataaaatgttatctggaatctcgataaagtcgaccatcccagttacattcctggcaaaagtccacttagccatattatgggccgtaaaattacattgtctagaaataaaaataaaattacagctaatcaagagatttgagagttgttcccatagagccacatagttatcgatgctccaatatgagtaaattcccttcagcatattgataaccttcttggagtcactctccatcatcacaaaatagtacttcttcgagacagctgattccacaactaacagaaaggccatcgcttctccaattagaggg

SEQ ID NO: 67750 - DNA, 603 bp, Cannabis sativa
ttgaaaacaacaaaatgttgttttctcttttaaaaaccaattcagttttgttcaatattgtttctaaaaaacactaactaaacatgacttgtttttaaaaaattcaaaaattatttttttgttcatttccaaaaataattttttgaaaacaaaaaacagaaaataataccaagcatgctctatattgcttgtgttattatgaggcacaattgcaaacaagaaaatagagaaaagaaagaaaagtagaaaatatatttcattgaagagattaaaaatctctgaatcagatttcgcaccaaaagaagaccatttatatatataaatatatatatattgaaatgggatcattaattaggaaagaaatggctcatcaactcgaagagtttgacgaacataattaagggggtataatcccaattcgtatagcactagctttgaataataaagcttgattgactaaaatgtgagccacaatattggcttctctaaaaaaaaaaaaacaaacccaacaccttcgaatgaagcaacagtgaacaaatttggtgtagtaaatcatcaatgtcccaacaactatcatccttttcttgaatcagctgaaccgcc

SEQ ID NO: 67751 - DNA, 1564 bp, Cannabis sativa
tacttaaataggaaaattacgagcaatggaaagaccaagagtactctacatttgatcaaattataattgtttacattgtgaaagaaaacacaagcaaaaataaatatattaagtttgaatgctaaagtacaaagcacttaagatataaaaaaagggagttaagttggttagctaactttctcttgtcggcttggggaggacctttgaacatgctctcaaaatcttcgtccattcctgtggagacaaaggtaaaagatcaatgaagaaacagtggagttcaataaaaacgttgggtttacagataaaaaaaaatgtgggttcagagcagaccaccatttacaaaaaacaatgcttactctcagaaatatcttgtaagaatcgtctataacgattggcagtttcttcctagtttgaattaatcggacaatcttcagtccttgaatcgttcatttctaatttgaactgaggtttgaagtttttgggaatatatggagaggataggcgtttggtatattccggtgctacatattttgggggataaatttttgagttatgatgggacatctccagaatgacaatccaatttttggatgaaattcaccaaaaaccatgagtttatggaatatggctaacatgaactatcattttataattagagcctagtaacggtaaggccaaaagatgtgagatctaacggctgggagtgaagaagtggaaagggcaggtcattaatgctaataatgaccctcgaaaccatgaaccgtcaaaatcaagaacatacgtgatcttgaagaagagattatgacaaatgtaccctctgagatcatttaaaaagcactttttattgaaaagaactttttaaggggcaattgttataccttcggctatcatttcaaaggagcaaatgtgacaaattaggaagaatatgactcaatgaatgtagcgtaattacatttgaaaatggaataactcatttatacggaagtaacagagtatatttacagctcgctgactataacgtcttatgcgagataaagatatacaaactgttgtctcatgcgttaacgagaaatcatatgccattaaatgtgtaaggtgaggcattaacctcattatgcatgaagaaacgtaggttagatataatggctattaagacacttagcatataatacacagtatacaaactaagtataatagtcgggcaaacccaaaacaactaaaagcgaggcgtccatctcgctataggaaggcacatttctaatactttcactaatcagcttcagacatctttcaatgagattcatagtctcgacgagtcagttctctcggatagaagctgaaattcaaatgacgttagctgttgaagtttaccttttcgtcaagaactgcgattgttagatggattgttgtgtcttcaataacataaaggacgtgatttaccatatcaacctcagaagatatgggaaactttagctcgctaccagggttattgttgctatgctcttagcgagatgtcccagaacgatacgctgtataacgtatttaatacacgtatgtattgacc

SEQ ID NO: 67752 - DNA, 818 bp, Cannabis sativa
gccaaaaaaatttagggggcacgatttactacatgtcaaagttcagggtaaaaaattactaattagcctatttaaaataaagtctcaatatccgcaaaccataatccatacattaatgctacatcaatatatcaaaaattatgtcaaattaaatattttttttatataatttttcttttaatatcaaatataaatatatattattttttatgttttacgttttttttttatattttctgtacattttttcccaccaaaatctaacttccaaaataaaattgaaagagaagggccaaattgaagtatagaaatgaaagtttaattttgttggaacaagtaaaaattctatttattttattatatttactacgtgacaatttaattgggaatggaatcttagtcactatccaacacaatttaatatcaaatataaattatcatatttgataaatacggcaataaaatgtttttgctaatttctgccattttatccattccaaagtttgagtgatcaactctcaatatgtgtttatctcaaaaaaaaaaaaaaagaaagaaaaaaaaagtcagaatatgtggacattaatatttaggacaatttttacaaatatgtggacataaattgtctttattaaatgtttttttttaaaaaaaattattacatagaaaatatatattgacactttatttataaaaatatctccataagatccggacaagtttataccttttatatgattttaattactaaaatacatcttacactatcacttacacaatcagacgatggttgcagggtggttggccgaaggttgcat

SEQ ID NO: 67753 - DNA, 568 bp, Cannabis sativa
atctttcagtattttgaaacaagacgacaagaagaaatcaaatctaaggcctaaaaattgaaaagagacgaaatagcaccctgaaggtcaacccgggcgcctagggttgtcacccagcgcccacgttgacattcaaactagggttctagatttatggtccatcttagtgcaaatggctcaaattttgtactttggcatgaataagacttgtcacaaacatgtttgaggcactaaaatcataatcgggacactttccattttgagtacctgaggtaccaggcgctgagggcacccaccaagtcccgggttgacatatcttccagccataatattgaagaagtatcctgagaattttatggtctcataaaaaacgaggaatcaagtgctttcgagaaagaaacggatcaaccttgtggccaaaatcgggacccaacacccaagttgacattttatcaacttgggccatttccaatagcagttcagaaaaggttttctgggcatattctctttcatcaacaatcaagatttgggtatactttctgaatataaacagagtcatttgggagct

SEQ ID NO: 67754 - DNA, 678 bp, Cannabis sativa
tccaaatttagatcataaaataagatgatgcaaaatttatatcacagtaaatattataattttatatttaccattatgttattagataaatattaaattttgtataagatttacaattatgtattgaagtataataataaaagttgacgcaaaattgtcacaaaaccattatttataccaaatatagattagcgtattacctattcaaaatggtaagattataaacagctgcaagtcaaatataatttacctagattatcaagttaatcatagtttttttgtttattctttaaattttaattatttgttttgcttaattatttttctctcaaatattttatttaatcaaacatgaacaaggaattgattaattgataattggtaatcaatttttttgagaacggtattctactttatcattatattatttgatttaattatatatatacatgtgtatcaattttagtaaacattaagtatgtttgtcctgaagtaattttatgatgagtgacctcttgcgatgtttctttcaatttcttttaaaaacgtacaagtaaagataaaacacattagttgtgtgggtggatgcccaataaacatttataatgggggcattacacaactgcaactccttaatgataaaaataaactgaaaaaaaatcatacttttgtaataaa

SEQ ID NO: 67755 - DNA, 1010 bp, Cannabis sativa
aaaatgtaattatgtatatatataacatataattatttatgttatagtgcgaattttttacctacaaaatcgagaccaggctcctgtaagaatgaaacgtggactcacatctctttgagaattgttaaacttccaggggaaacctctcgagtttaaacctctcttgaacaaaaatcagcgaaatgatgtgatcttgatagagtcttgcattgttatgcctcgcatgatgcaggacgaagaaggaattattcaagtctcaaatataccaggatatatgcgatgtctataaagacttctcccacgacttagtaaagatcgtttctttacattgcgagttggtccataagacttaaatatgctcgatgactcgataagaactcgcacgttctaggtcatcaacaatgaaaatgtatccacatacgtaactcgataaggacacagatacctaactacgaggctcgttagtctcgtttcaacagattgcatcctaagcatgcgagcttgtgcaagtagatgaatagaaaacttaaactatgaaggtcgcatacgttgttgtatttagtaaaacggatttaaaatgttcttcatttatttcatttacattttcctcaatttaatgttgatatttaatgtaaaacggtttaataatcaatttagttctgtgtaatcaaaggatacttgctttgtatataaaagactaatctaacatgaataaaagaggatggagaaatcgttgctatagtggactaagtagaccgtgatctgataaaaccactatacttccttgtgttcttcatttatattactatttgtttgtgtagttttatttgaatactcaccgttctaggttcagtactcgctcttttttgattagacatcaaatctttcttttatttggtcttgtataaattcctccaacaattatatgcgctgtctgtgggaacttcttatttttattttggaggaaaatcaagatggctgcaaaccagacaaatggaaatactagatct

SEQ ID NO: 67756 - DNA, 1240 bp, Cannabis sativa
ataatctggattacattgaaacagagttttagttagggcataaaacccaacaaaatccccaatgaagagaatgcaacagtatatgcacttgctcatctagcaaggagcaccattaccgacaaggaaaacttcgtgccaatacatttgttgaaagaatgcaacattgctatccttgaagaagttgacatgtgtggacgacattgctacatggattagccctattacaacttacctccaaacaagagcgttgcctgaaaataaaaatgaggcaaaaaagatgagaagaaaagctgctaggtagcttatcctagacgaagtaatgtacagatgaggcttctcaatgtcgctcctaaggtatgtcactaagacaaaagccaagcatttattgatagaagtgcatgaagacttctacggtaataatgccgtggggcgaagcctatccaaaaagatactccgacaggggtacttttggccaaccatgatagaggattcgatggactatgtcaaaaatgtgacaagtgtcaaagattctcaaagatctcaagagctccacccaacgagctcaaattgatgtagtctccttggccctttaccatatggtgaatagacgtaattggtcaactcccaaagggaaaaagaggagtgcagtatgtcgtagtcgctattgatctttaccaagtgggcagaagctgaacccctgccaacaataacttccacataattcctcaactttgttgtcgagaacatcatatgtcagtttggactgccacaaaagattgtgtcaaacaatgggaagaagtttgactgtgacatgttcactaatttctgctacaaacatgacatcatcaaaagcttctctgtcattgctcaccctcaaatgaatgagtgggtagaagctgtgaacaagacccccaaggacactttgaaaaagcatcttgaagaggcaaaaggaaatcgtctaaaattgctcccagaggtactctggtcgcataagaccactgagacgatgccaatcgggcaaactccaatcgctttagcttatggttataaagaaatgttgcccatagagctggtgccaccatctcataggaggataacctatgaccaagaagctagatgagtcctttgacgaggtagaagaaagaagagatcaagccaacctaaagcttcacgcctaccagtaaaaggtagcaaggcacttcaacaaataagtcagggaaaggaaattcttcataggaga

SEQ ID NO: 67757 - DNA, 891 bp, Cannabis sativa
tctaattatcatgacttgtcacttttatgacttgataaaaactatacatctaggcatggccggccataatggtgtgcaaggtgggctactgcacagggttcaaaaaaataaaaacccaatatattttttctttaatgcccaatagttttttttaatgaacctaacttttgaaggggctaacaatttattattagtcacttccatcccaattcccaaagcccattttcaattctattaatgcttttaagcaaaaaaataaaaatctattactgctatttattattttttaaacactttttatatttttttttatcattttttttattctattagaatcaataacaatttttataaataattgagtttttggtgttttataaaatatataattgaatgataatattcaaaaatattatttataattttttttttttttgtaggggcccaaattttaaattagaacaggtcctccaaaatatttaagatgaccctgcatttaggtacatacaaagatattttactactagtagcaattgtatgtaagatattttactattttttacttattaaagcttcaaaaacaatttctcttctttatattttttatttagttttggcttactttttttctttctttctctctatttccttttttttttttaatttctttctctttttatttattttctcaaactatttttttatctttcatccatgttagaatttttttagggaaatttgataatccatgctaaaaagttaagcatggtgtttaattataccacccctcctaagaattttttaactatgctaatcttttagtgttaacccaaaaataccccctctcctcaaatctaaatatttcaacctcatttctctctctctctctct

SEQ ID NO: 67758 - DNA, 2431 bp, Cannabis sativa
  modified_base (2133)..(2134): a, c, t, g, unknown or other
aaaggcataaaatatgccaatagtgttagatagtctcatttcgctaatatgtagaaagataatagaatatataagaggaacgtactactccttacattgcaattaattttgagatataacatcattcatattcatgttatcctaaattttaacaaatggacctaatcactcgtatgctaatatttttttctctttttctttttttatgaaaaaaaaaatatttattattattattatatatatattttttttgattaaattattattatatattacatttgtaactaaaaggaaaactttccccattaagcaaacccataatcctccattaatggctacaccatctgaaactcaaacctcttcttcttcttcttcatctctgccccttcttgaccgagttgccattgtcaccggagcctctcgaggaatcggccgaggcatagctctccatctagcctcactcggagctcgtctagtcatcaattacacttcaaactctgctcaagctcaactcctagtctccgagatcaacgccacctcatcttctacctccaccaccacaaccactcctcgagccgtcgcggtccaagctgacgtgtccgatcccgaccaagtgaaatcgctcttcgattcggctgagaagttcttcaatgtccaacctcatattctggtcaactccgccggagtactcgatccaaaataccctcacatttcaaacgcctccgttgaagatttcgatcgaactttcaggtcttcactctcaatttttttgcatatattttgttaattgcacgcaaactgtttgaataaatgtctctttgaaaatctaactaaagggatcctaaaagtgttataatttcttatgttaatgcacacaaactgtttgaataaatgtctctttgaaaatctaactaaagggatcctagaagtgttataatttcttatgttaatgctcgcaaactgtttgaataattgtcagtgtgaatacaagaggagctttcttgtgcctaagagaggcagcaaacaggttgaagcgtggtggcggaggtcggatcatatctatatcttcgtccatggtggggggattgaagccgggattcggggtgtatgcagcgtcaaaggcggccgtggagacgatgatcaagatacttgctaaggagctaaaggggacggggatcacggccaactgcgtggccccgggaccaatcgcgaccgatatgttcttttcggggaagagtgaggatgacttgaagaaagtggtggatgagtgccccatggggaggcttggagaggttaaggatgtggttccagtggtgggattcttggctggtgatgggagtgagtgggttaatgggcaggtcattcgtgcaaatggggggtatgtttaagatcaagtctcttgaaaagatgccaactttctaagattttgatcgtcattttatcataataataagcattagagttctaaactcattgaaaatgtgaaataaaatcaatggttagtgttagatgatgatgatgatgatttaagtatatatatatgtataatgggaactttgtatttttttttagtcgaaactcaaattgtagttgcatgatttttcaatgagaagtgtaagagagtgtttgtaataagcacttgtttaagctgtggatcaagcggtttttggtaacgggtgttcgcggtgctggtggtgcgagttgtagtatttttttaaaccaaattgcaaatgtaatgtgggattttaaaattgtaaaaattacactgcgaaaatgtagtgtggtgcaatttaaatggtttacactattattattattaaatattataatgaacggttttacttaacttactttatgcaatcataatagtcttacagtataaatttatagtcgttttgtgattataataatcatttatggtctcacaatataaattcattattttattaataattttcttgtaaagttattaataaaaaattaagtaatttgcgttataaatacttaagtttaactcttaattataaataaatacttaagttaattttaagttataattgaataagtgactgttaaatgttaaagtaaattattatataacaattagaagttcaagtcattaaatttttattnnttttaaaaaaattaatttaaatatactactaaaaatatgactgaataataaattaatttatttataaagagattatgtatgttgcaaattacttaagaaaaaaggggtatttaggtaattttcattttgatcgcattgtcattgttaataatattggtccaattcaatcgccaccaccaccaataatatattctccgttattagttccgatgaccacaccaactgaaaccgaaaacccttcttcactcccactcctacaccgagtcgccattgtcaccggcgcctcccgcggaatcg

SEQ ID NO: 67759 - DNA, 744 bp, Cannabis sativa
  modified_base (32)..(34): a, c, t, g, unknown or other
tttcggtgcccgacaacatggaacgcggtgtnnngctcagtagaatcacaatttagtattttagtatagtgggacactttattgtgacattgggaatgtcgggattagtcggaaatttagaatttatcaaatacccttaggactccttttatgtttttttagtgtggaggggcaaaatggtcattttaccccatttatattttgtcctttagtggtttgtattactcttgattatgtgttatatttattaaatcttggctggtggtattgtaataaaatcaattttataacttttattttacaaaattaaaaaaaaagaaacaaagtcatttttctctcaagctctctcttcctctctctcgaaaatcctaggggctgctagggttgattttgttcttcaattcaggaagttttcaacaagttttggtgtaattctagttgaggtattctttgatcaagctcctgtttgttttcttgaaactttaagatttgagaaattttgcatgctagtgaattttgtggctgtggctgttgtttgtgtttgttattgatttctgaagcttagttatgttttaaaatgatgactcaagcatgtttttatggttgttagttggatttaatctagtatggaattttagactcaaaactttggatttcaatggtaaaatggtgtttttgctgctgtgttcattgtttatgtttgaatttgatttctagattttatttatgttgttttaggttgat

SEQ ID NO: 67760 - DNA, 897 bp, Cannabis sativa
gcgcaattcacgaggagtatgatggtgctagttctagtggctcatctgggataggtgcttggagcctcgagcacatcagggctggagtagtaatccccctgagagagtactttcaggaattctataattatcttgaaatttcaccttttcagttcattccgagttcttacaaaatcatggcctgtttaaaggtcttatatcatattatgggatgggagtgtcctactccccttgagatagtgtatttttattctgtaaaagtcgtccttgcaaggaagcgaggatcgagaggtttttactacctcggtacccacacaaacgatcgcaggatcattgtgaagttacctaataaaacaaaattcaaggatgaattcttctggacaaccggtctttctcccattaacacaataacattctgcattatacgtaagtatcatcttttctcaaaagcttggttttgagtttttgatttataaattgaaggcatttatttatattacttattctgttgacaacaatcacgagaaggctaattcctactcccgagatggttgaatggcataaaactctcttaggtcttccgtttggagtgtaattagcagattttctactaatcaagaccactctgaagatcgttaatcttctcggcacagagcaatccacctgcgattataagaatccaaaattttctaagtggcaacaagtcccaattccacccaatgaggaaaatagggattatgcggcttgcatccacttcctcaataaagtaggccctcgggaagctggagaagaagcatcccgaggtattaattgtagatggtctccaactgtgcttaggactaagtatacctcgctagtcacatttaatgataactagtataatttttatacttaaga

SEQ ID NO: 67761 - DNA, 658 bp, Cannabis sativa
ctcaaacttactcaactcacaccatgactacaagactctcaatcaatacttaaacagtccaaaatcaatctataaaacaatcatttaactttccaaacacgaacagaagctatataaaataattgcatgcttgaacttgaactttaactcccaatacacaaggaaaagaagtaataggccttacctctatttgtacaaccacaatactctgaaatcaagctgaaaacttagaaatttagtgaagaaaagggctggctcttgctggttgcttagggccgaagagagagagagggagagagagagataaaggatgaggtgacttgattttcttgattttttcttagcttagtgaaataaatggataacctgtattatttttgttttattcaaatgttaaaaatcaaaaaataaacttatgaaaatttcaccatttccactaaaagccaaaactaactctcctaggtgaaatttccaattttacccttacttcatgctaaaacgacattaaggccaaagggtaaaatggtcaaatatcacaactctgcctaagtacgatattctaaatatcaaatatacttgtcaccctacatggaaggttgtaaaccatattcgtgcgactttaatggccaaaccgtcatattttccatcgtcaccgagc

SEQ ID NO: 67762 - DNA, 3191 bp, Cannabis sativa
aaaaactgatacaaaatttgttaagaaaaagaaagagttagtgttttttattttttataacataaaataatacatatttattgtaaaaaaaaaagaatttaaaagaaagatgctgcatattatttaattaaaaaaaataagaaatcaataaaatagtccaaaaaaataaacaagtaaatgagctaatatattttaattattaatgaaaaataaaaaggatataattgttactatacctaaacatactttaaaagttacacatgtcactcattttttaaagagagtgtaaaagagaatgcaatatagagtgtccttagcattcctcatattatatatgacactctataatggtattaacattaaataaaaaagtattgttattagatatataaaagttattaatatgatactcatgctaaataatatcagtacttttttaacattttgatcgaaatcaaaatatataaattctgatatttaataataccaataataataataatatgataaataatgttttctcataaatctatcttttgtaaaacaaactaacaaactaacaaataaacaaaaaaataaaaatatgtataaagagggggtgacatttaactaccaaggaagatagatgtaacaaagagtcttaactagtgcacctaactgtatacacatgtcactatatatctacttacaaaatcaatatatatatatgtatgacacacttaataaattcctttacaccttagattatattatatttatttatatatatgtaaagtcaaaatcattagacctataagatagactagaccgattatattcgatctactaacccaaaagcaaaaattattaatatttaacttttttttacatgttattaattaaaaatctctaagactacttacttgtcttctcagttgttaaaatgtccaatgtacctataattttttcaagtgtactatataaacaaattaatacacaaacaaaaatagtcaaattttctaagacaacacattaattaattaagatacttaaccctaaatgttaggtgttacattaagagtcccacctataattttgattgatattgaaaacagatttaatatgtatataactcaatatatatatatatatatttaatgcatataaaaaaaataaaaaagcgagattagctcagatggttataaagggtagtattagaatttaaaataaaataaatagaattctatcttaaaattaattggtaatagaaagagtagtttatttatcttaaaattaaagtcttaaataaaggttaaagggaaaacaaaagttttaagtttgacccatctttttgaaccagtggcattttgggttccaattacaaaaagctcttttatggcttttctttttggaccggcagacggcgacactttaagttcacaacgaattacaagcggatctgatactatgttaaaatttaggataagatgaataagacttcatttcaaaactaattagcattagaaagagtagctccattttatgtgtagtaatttatttctacacattaataatatgtgactaactttaataagtattgagagatattgtggggggacgtcataagctctaattcatggtgtgtaactttaataaagttgaattttcttttaaaataaagtaatttgcgatataaatacttaaatttaactctcagttataaataaatacttaattaattttaatttttagcgataataatatttaaattatatttctaaatttatgtaagtacctagtaatcaaatcattacccacgtatcattattttttattggcatatttaaattaatttattttttttaaaaaataataatttaataaccaatcaagtgaattataactttattattattatcgctaaaaattacttaaatatttatttgtaattaagaagtaaatttaactatttatgtaataaattatttttattttaataattaatttattttaaattaatatatatttaataaattatttaagagtaatttgtgacataaatacttaaatttaactcacaattacaaataaataagtttaattttgattcgtttgtaaatatatatgagcattaagtattaaataaattgccaaaggacaatcattaattagtgaatcattaaatttttattttacttttttttaaaaaattagtttaagtacgtatactcattaattaattaattaaaatgaaattatactcacatgaagcatatcattcaagaacaaatccggcaacatctttggccgccgatacacagcgagactaagcaaattcctcatctgtttagcggtggccggaagcataagctcctccgtcttctccactttacctctcttcaacaactcaacaccatcttctctcttcatattcaaaccagaactcgcaatcacaaccctaacaactctctctccccaccttttcgccacattatacgccacgattcctccataactcgtccccaaaatactgtacctctccactcccatcttctccattactccggccaccgccgccgcctggaattgctccgaccgatcgctcgatcgggtggtggattcgccgaagaagatcaaatcgggaatgtagagatcgaatttgggggccaagtattggacctggttctgccattgccacgtggatactgggccgaatccgtggattaaaaccagtgcgggcttttttactgttttgggctgggccgggtccggggcccataattggatctttgtttcgtcttctccgttgagattgacggtttgggaggttagacccgccgtgatgaagcggcggcggaggtattggccgtacaggtgagttgggctgaggaaggagggaagcattgtgagggttttttggttagagagagaaagaggagagagagagaggagttgggtgtggttgtatctatatgtgtatatatatataggtgttgtatgtatatgtttgggtaggaaattggagaaggaaagaaacggtttttacagttttaaaattgagttgtgtgaaattacggttatagccttagtggtaggtgtattacttgaagggataaaggatatttttggttattttaatttatatatgaatttatttaggaaaattttatttacaccccaaaattttctaaaggcacccaattttaataatt

SEQ ID NO: 67763 - DNA, 5492 bp, Cannabis sativa
ccctttatctattaggccaacctataaatacccccaaatactctcactcactcacacaaactcaactcaaacaaacttatttccaaaacaaaaactcagagacagaactcaaaacataatctcactaagacagtaaccacttcttcttcttcttcttccgaaactcaaactcgaactcaacatataatgaacacgtatcactacgtcgtagaaagcagtaactcagagggttacaagcaaccggaaaactcattatcccctctttcatcagatgaagcttctcgacgagcttctctctccgacgaggaagtgattctggcctcgagcaggcccaagaagcgagctggtagaaggattttttaagagaccaggcaccctgtttatcgaggagtgaggagaaggaacaacgacaaatgggtttgcgagcttcgcgagccaaataagaagaccagaatttggctagggacttatccaacggctgagatggcagcccgggctcatgacgtggcagccatagctttgcgtggtaagtccgcttgtcttaacttcgctgattcggcttggcggcttcccagaccggtctcgcttgatgccaaggacatacgcgccgctgcgactgagggagccgagtcgtttaggccggttgaatacggcggcgtttcgatggagatgaaacagatggaatcggttgatgagagtcatggtggtggtgaggaagaaaaaaatggtgaaagagcgttttatgtggatgaggatgccacgctggacatgccaggcttttttgctgacttggcagaaggtctgcttcttcctccgccaagcaattatttcagcgcggatgacgtggaaagattcgaggatgacgtgtcgttgtggaattattcgttctgatactcttcgagagtgtagtattagctttttccctttcttttttatttatttattattgcttgaaggactttttttttctctgtttcttccttgcttcgtcttttagcataaaacctttattcattttttcaaatctaagtctaatgagtatgacatagatttggaatgaatttaatatgtaaaaataatttttattattatatcactttgatcaatgtatatatagaaattttatattatcttccttctaataatttctgttatcttcttctactataataagttatttatgatcaataattaactattaaaaaacggaatatatatatatattatatatatatatatcttaaaatgaaattcattcacagcaaacattacaaagaattaattataagaatatatacataatgattattttgtttgcgtaaggaaatctgttaaaataaaagaaatataatttgtatatattttattattagggtgtgtttagaaataattaacggggattttttatttttacggaattttatattgaaactcttattgtaactagcgctgcaatattttagaaacctaatccataaatttaaaaatagaaaattaaaaaaacagtatatagagtaattcctatatatgtaataattattagactctaatttaaaataaaatatggatttggttatgttgtaataattatatataaatttctaatatcttgacaaataattattaatacacagcttaattaatactattaattatataaaaatgataatattatttatagtgtattttttaactataactataaaaattagaaagtataattaaaattcttcattacttctaattatatagttactatataattatttaattgaagtcaaaccctattattacttataattagactcaattttaattgaataataattttttcaaatacgaccataaaaccaatcaaaaataatatgtaaacgtttaaattacaaccaaagcaccaaagaatgtagagctcaacatagaaatattaagaaaaaagaaaagggtatgggtaccaactaccaaccaaagaccatgaataagtgatagtattatgccacactaaaaaaatattaagttgatatattttgaaaaatattatgggccttgtgactaaaaattttctgttggaaattaaatatttaagtaactttcgtacaaatttttagcattaatttgtaaattactaagattttttttttctttttttgctaaaacaaattactaagattatttgtatatgtatataaattgacaagggagattctaaatttgcacatttatcttttgtgaggagaatatatagtttacgtctataattatgacctatcacaatatttgacaatcaataattaaaaaattaaataggtaagtaactatattaattagaatatttagtcattattaaatgttaactttgatatattaaattaattaattatcattaaattgatttataatatactgtaaaatttctaacatgaccacaatatatatacataatagtcatcagtattatgatcaaattgtgttttaatgtactatatttatattataaattataatatataagtgattataagataagaagataaataatgttaaaaagtgatgataaaaataatgcatgagttcatatattatttactatctatctatatatatataaaaattaaaggacgttcgaatatgctaaaatattcaaatgatatatatactaaattactaaagtattttaattttcgtcactacaaaacactgttacttttagtgacaatcttttagtcaccataaattttttgtaactaaatgtgacttttagtcaaaacaaaaaacttacttgtaactaaaacatagtatttagttacaagttgtcactaatttagtttaagtcacaatatttctaaaaaatacatttagtcacaacaaatcgtaattttttgtgactaatattttttgccacggaccttttagtaacaacacaataatgataatttataattagccacaacttttttatctttagtcacaaattttgttgtgactaaaagtaaaatttttatagtgcttgttaggttaatcatcccatctcattaatatatctaatttcataatatttgaaacatagaaaaagtactatttgttaatcatatagatatatttctttcaaattaatagaaaatataatttaaaataagagggacaagatcatgataaaccaatattgatttacatctaaatttgtcttagacatgaaactagagaaattaattatatttggttaaataaattattctctaaattccgtaataaaatcaaattaaatcatatattttaagagaactaactgtagtaattgtattgcttttaaggaataatagttagtttttactatactaaacttattttacttttatatttgtgtaatcttttgtattttttaatataataattttatgggtatataatataagataatgcttcaaggtattaaaaataattttatgtagagtcattttttttaatatgtattattgctatatgttataatgtccatatttaatgtccatagttagttcagatggtatgatttggtacatgtcaaagttcaagggacaaaaatcctaattaacctatatattattactattaatataaaaataactcagttaaaaaaatcgatctcacagactaaatatatatatcgtaatattttatttatatataaatgataatattattagtatttaaatttatttattaattcaaaaatgatattcaaattaatataatggaaggtaataattcagttctacttttttttaaggtattaaaattatcctcaaaggtagttatattactaagggaataacatttcaagactagatcttcaaaataaataagctaatgtttcacattattcctgtagtagcattaatccattttaaataatccctcaaataatttctgagtctctgtttttcttttaaaaggaaatatcatgggcccttagttttggttacaactttgagtcttttaaagagcaacttttaagaacttttataaaaaaaataagggagaagaagaaaagagaagtgattagaagaatagttgtatttttaataagtaattatatatatatataaaaaataataacattaaatataaatataaaataaaataatgatacatattaaaaaaaaaaaactctatataaatttacgtattgttattttagatatatcattttttaattggctaattatattttttaaaaattattatattaaattatataatacaaaatattttaattaaaccaataataatattaacacaaaagactatattctttatttatttttaatagacgagaagcattatcctataatataataatttggaaggaagtggaataaaaaacaaaactttatttgtaatgtgatgatgatcaatcaaaaagaaaaacatattttgtttctgtgtctttgtctctgaaccccactgacatagtgtgagagagagtgtagtattggaagtgagatcccatctaacacgctggctggtaaagggttgtcgatttttgattggtggagtccaacggccaacacctacacctgaccctactgtatcacacgttaatagagactgacacgtataatgactagttctatacaaaatacttattggaggccctgtttttgttttgggctttaaattccccacttgagggggcccattaaagacaacttgtgatctcaaatcatattcgcaggacaggactcctttattatgtggttgagcttttacagtatctctatctctattgattttgtagtgtaattctactatacgtctactctagtctactgtactcgatattaattaattaattatgggtttaagatttccacccaccatgggttttgcttttgtcaacgtgaaaaggaggaatattgagtatctacgtatattgcttcaattaatatattgaatcttttacaagattgtatgcttttgttttgttactaaagtttgggttttttttttgtaataagtttgacatatcatgaagactttataataaatatacaaccaattctgatgtcactactaacactgaccatacaaatgtatggaaaaaattatataattggccaatttttttttgaaaaaaaattaaaaaaaaaattagtagggattttttttttcatttctaagttttgaacatttttattcataaatatattttttcagtaaaaataagaagatcttagactctacaccgtttttatattgtactcttttatttttatcctcttttttaaagtttattacttttacttttttttttaaacattctaccaattttacccctttcacttcaagatactctccatgtaactccctaatgtcagggcattttgggtacaatacatataaaaagaggtatgtttagtaatttcccctccctgaactttgacatgtactaaatcgtgcccctaaacattttttaccgttaaaaattcccatcgaactattgagattgttaaatt

SEQ ID NO: 67764 - DNA, 828 bp, Cannabis sativa
aatatgtgaaataaaaataaaattataaatttacaagaataaaaataaaaatatatgacggtaaaaattaaaaaaaaaatatattttgtaggagcaaatataaaaatatataaaagaagttatgaaaaaaataatttattaaaagttgggtgcgtgggtcatgtgccccacatgaccccataattcccctccgcttcttcgatctttaccttctagcatgtcgctcgccacatgataagaccctacgcgagattcaaataattagagaagagggctaggctcttactgatagaaatttatatgaataatataaagcatatgaacgattgtatgaaatacgaaaaaaaatcgaacatatacatgatataattataagatcgaaatacctccaactattgattctttgagcttcagtctcacacgataatctccaaaagaaaataaaacttattgtgggtattcatgattccaagctctctctaactctcttagatagatttactgtatttcacataatgagtagtgagcttggagatcgatacgctatatttataagtgagatacttcatcagtatttgtgtcatattaattgttagaatatttttacaattaattcaaatacttaaattgaaaaactgaaatatttggtaaataaatagttaccataattagaatattcttaattaattatattttataaatcaaatcattgatctattactatatataaaatattctaacattcttctacttgtcaatatttaaattaatttaccacttaaaactcaacgattatccttagatgagtgctaattataactttctatt

SEQ ID NO: 67765 - DNA, 2003 bp, Cannabis sativa
aaaaacttcatgtatattacatttatacattattgagtaccatcaaatgagaaaattcaaccctcccgacaaaaaaattaataaaatcagaaaatttaaccccaagtttactagctaagaaatattttaaaaaaaattattgattaaatttaaataattgttacgaatgagatatctataaactaggaaaagtttatagggatgacaacatcatggaagacaaagttaaaatagttattaagattattaagagaacaaaaaggaagaaaccaaaaatggtgtcaaataatatgagaaccaaaaatctaataatagagtttgcacgtacggctgcaacaacaacaaaagagacaaagatgtacaaaccgtggtgttactctttctaagaattgcttaaggataggatacttcattacgctcaactcaattattattggtgtaattaattatccaattttttttaattatttgtagtgttatgctaccacaaacaatattaatgtctaacagcaatactcataatatatatatgtaaatgtggtgattaatacttaagataattacttcgataaaattctttaaaattaaattaatcaatcaatacttaattatatttgagaaatgctaaaaattttagtagtgaccaacaccaccataagatatcatcactattgatctaattaagtatcgagtctcacgtatacactattagagctcacttgataggtcctataaaagttatattgtattaaataacgtaacactacgcttggataaaatattgtattgtattaattattacgaccataaattttaatacaatatgaatcatattatttaatatataaaaaatgatacgtattagctcgtattataatatttataatgagtctggggttggggacccgatcccagactcgactctcgtcttgaacctcaacccagccccgaaactcggactctggccccagacttcgaacctagcctcaatcccaaactcggacccctgacccgaacttagccccaaaccctaaacctgaacctaagccccagactcaaaccccagactggaacccgaacctagccccacatcccaaacccaacccgaactctggactttggccccgaacctgaactcggacttggccccatcctcgaactccggactcaaacctaggccccggacctcgaaccttaaaccccaaacccagatccaaaccccaacccggccccgaaccccaatcccaacccaaaccttgaccttggacccgaccccgaaccttggaccctagaacctaaagtcggacccttgacctggacatgaaccccaacccgaactcggacccagatcccaacccctaaactagaccctaactcaaaccttgaaccctcgaacctaaacacagaccctagacctggactccaaaactggacctcgactcaactccaaaccttagacccaaatctcgaacctggctctaattttcgatttacacaagccattttttttaaaaaaaatttacacaaacaatcaatacaaattaataccaaatatagtataatattaaataatatttaatacaatacagtacaaaactatttaccaaaagaggccttagtgcctaataataatttgtgtaattttctattatgaaatgaaaaaaatgaaaaacgccggtgggtatgtactatgtaagcctacatttcgtttttatttaccttctagtttagattttggaataaaaagctcaacatggattataataatgggtgtaagcaataattttttcctaaccatatttattttagataaaaagaacccattatttaagaaaacaatatcacacatcactttctctaaaattttagtgcagatgcataaatcaatcactctttcaatatataaatagctcttaatttaaacttatttccttctgttggttataaaaaaagaatggacgttgtctattgtctagcttgatgtttgtggtgctgccatgtgt

SEQ ID NO: 67766 - DNA, 1433 bp, Cannabis sativa
aaaatcacgtaatacacctatgctagttagggtgttacacttctgctcgctgaatggcctcttcaagcatgatgatgccatctgaacgatcaaggaagtcactcatagaatctactagtccgtctctttcgatatccttctaaagttctctgagaacttcgatgccccccagtatcgcggtcaatttcccttcttcagtcaaccgtgcaaccttcgttagctttgtcataaatctactgatttaagctcggagaggttctcctagcctttgcttcacttcgaccaggtcttctatgtgcaacgggagttggcgagaagaagagaattgggcatgttgttcttaggagaaagccttccaagagttgaaccattaaggtcttaacttgaaataccactactaggcggcttctgtgagggtggcaggaaaaactttgcaacatacatctcctggtactccttgtaactccatttgcatttcaaaatacttaagatgtaataagggatcttccttcccagtatacatattccaggtcggcatcttgaacttgtgaggcaactctaggacattgatctctggggagaaaggggatccacgtgctcgatccagctcgaggtcattgttcttttgaccggttaggccttggaaaatattttttagttcatccaactatgcctgcacggatggattaacttgttcagcctcttggccgaccacggtcacatcagcatctctttgagcgagattctgaacacgggccccgggctgaatgactggtgtgacatattgctcgtctagccctctccttctgttcagatcatctctgagatcatgagccgttcctaatctattaattatagatacactaggttgtctcagtgactggttggtttgaccaatcagttggtcggaaccgttaacttgagcagagtcattaggtatgacctctcctgatgagttattagataaggtctgtccacctaccgcttggcccataggcagaacttgtggctcgtgattggatggctgaccgttcagggtttaagaagtgttcacggatcttcgtctaactcgcctagggggatgatggctgcagtttgttggtaggtagcctgatgggctcttcgtatcagcacagtggcttgtgttgttcagtcgtcaatggctgcttgttgagccctcaatgtttctatctctttatccctccattcagcgaacagacgcctatgctcttcaaatgcaagattcaccgcagcacggaattcttcctagtcatgatgcagggcattagtatgaccttgcatgagtccaagagcagcgcggaggctctggatctctgtgtcatctccaacggttgttcgaacatttgttgctggcgaaactccattattgggaataccctgattggctgctgaactggtatttccagtctctt

SEQ ID NO: 67767 - DNA, 1587 bp, Cannabis sativa
tagtgagtgagcatttctttccctcttttgatctctaggtgcagtaccgaaggttgagcaggggccctaatcagctctgatccgcacctcgtctgctcttgcctgtctgagctagcttctcgggaatccttggacttagtcatttttgggataggaggatctacagcagtttgctcctcggagagatcaatgactgcttcagctggtgccttctctctggaaggggttgtctcaccgcccttggacttcttaactggaggagatgagcccgagcttcctcccactctcttcttcaaagctttgagcattttctgagacatgtctatgcgaaataaaagcaacataataaaaaaaagtaaagaaatatgaaggcatgataattaagagggttaaaaacaagattgagtaccctgcactttggcaggagcattcgtcgaacaagaactgatgggatatcgtcatccgacaactcttcttgttcctccagaacttctttcccctttcttgctactaggatggatgatcaagctggtagaccggggtccctgatctgaatcgtatgttcgatgggcctgtgcctggccggaagtttcttcttccttttgagctgtctttcctgctcttcctcagcctcatcctcccgctcagaatattcttaagcatgttgtttggccccggctcctcccttcaacttagccttgcgcttaagttgaataagctccttctcctgctcagaatgctcatgagcatactgcttggctcctgcacctcccttcaacttagcctcgcacttcaattgaatgagctccttctcttgctcagctcccttagcccgaccagcactggacttcctctttttccccttcataggctgaggtacgaaatcttttggataaagcccgtactccacaaagttggcctctgaggtcaacagggtgatatttcgagcatcatccgacagctgaacaatccttagagctctgtccctaagagctagcatgaagggtggacggtaatatatagggatctactgaaaccgagtgtaagtggtgcccatgccttccactatgtaatactcgtcaacgaaattcccaatttttctcacgaccttgtctgtggtgcttgtcaaccacttgaagtctggctgagtgaagtcgaagtaccccgacctgccttgcttggggatagattttaggtaaaataacaaactgacctcgtgcggagaaggcaggccccacttttggatggcgtagaggacgaacagtgcagaccaatagttaatgcctttgggagtaaactaggtcggacagaggtggaagaaatctgccaccttcctgaggtacgggtgcaaagacagcattgtcccttgtttggaatgagcacccgaccaggcgcacatccccttcttcgggtttgtggcttggtgatttgaggcagggacatagcattaaagttcgcctagatagcgagattggtccaaatcgcttatgcgtgcctcagtgatcttggacagagggctcacccatctggcacctaaggcaccttgccttctgtgaggaactccagcagcaagctcctcagtgacgt

SEQ ID NO: 67768 - DNA, 742 bp, Cannabis sativa
gaaaaagattgaatcttgtgctttgttttgacattttgaacttcggggttcaaaaaacacgaaaaacgtaactttggatttaaaaaataggattttggatccgttagggaccctgctaggcgctttgggcctgttaaggaccctgcccgattcttgatcccatccaaagcccctacccagcacttagttttgatgggatttttgtcatatgatcatttttgttttgattgtttaatttagtgtaatctgtatattgcagttgagaggaattgttgtgttgcaactggtttatgagttgaaggattattcagagagaaaataattggctcagcagacatataatgaatctatctattgttccttcgaattgattgaacaattttttatgaatgtttgaagactttgaatgcaaaatatcactacttatctatcaaattgtttattgtaatattttaaaacaatacatataatattaaatatggattgttattttgttatctaatttttttagaattattagttattggagttatttagttaattgtataattaatgctgaaaataatatatgcaatgttatatacatagtttttttttgacattttctttataaagcatttattatttctattttaaaaaaattctatataattttatttactatatatatgggtgactattcaatggttatatttttattataaccagttacatttttttttgacttataatagcaggttac

SEQ ID NO: 67769 - DNA, 559 bp, Cannabis sativa
tgtattaatgtaagatgtccaccagaattagtaaagggaattcaaaagaataacaccacaagaatattaaatacccgttgataacaaattaattggaaccttctaagaagcagaccacacgtgaatcttcagaaaacacatgcataatgcagaccaaaaatgattgctagtttaaaatattcgccaatggtttacccaaggcataattctatttcaagtaccaatgtaaactaatgtggataatacaactttaattcaaagattttaggaataaaaatatgtttctgtttttcacaggtatttcaagttgcaaataaaaaataatgacttaatctttcaaatcctaatctttaattttttccttgctatatgcatccatgatttttagggatgttttttgtttaaaagagactagtgcactgccctgtgattttatgcatccaggatttttagagagtgttttttgtttaaaagagactagtgccctgtgatgtaattaaataccctctagtattactgaagcctttgttcatttctatgtcctttttatggtatagca

SEQ ID NO: 67770 - DNA, 806 bp, Cannabis sativa
  modified_base (755)..(777): a, c, t, g, unknown or other
ttagcattctggaggataaacttctgaaccaggttgagacatttctgcgaaaaaagaacaatcccaatttctggatgaaatttatcaaaccagaaacttaaaaaaatgcggaacctaaaaatttacactctgcctaaaccctgaagattttaaactagaaatctctaagaccaaacagaatggcaaaaatgtagactataaaaataatgatcaaaccaagaaaatacaaagaaaaatacagagcgggatgggttaattactacttgaagtcaagtggtgatgcaatgaatgatcctgcaactggggatggaacgaatgacgtgatgatcttcgcgaatccttgaggttgaatagtagatctgaataaactcgcagaaataaggtgagtgacagacaagacatgcaaagcttcgaagaatctgaatggagtttatggcagagaatctcaagaaattttaaaatggcataaatggtggaaagaagatcctttttttcattttttccattgggttcgtctctgttagattaaaagacataggatccaacagatagaaataagaaagaagtgggaaaaatggttaataaatgctcatgatgtcccgtaaaatggcaaaactcccaaaatcaaaggcatgcatttttttaaaatgaattatgacaaaaataccatctgtaataatttaaaagtacttttcattgaaaatggctttttgagggacaattgtgttatgtttgtgccctaaataaaactcatnnnnnnnnnnnnnnnnnnnnnnnttaataaagatcagaaattattttatgtt

SEQ ID NO: 67771 - DNA, 1289 bp, Cannabis sativa
gcgagcggatgaagattttacatgtcgaggtggttaggcctagagcgtacagtctttgggacaattggacatattttgtatagtcgctaggcgacaacctttgtactatacactatgaaacatttgtaaatattttgtaacggaatcccagttaaatatatatgttattattttagtatttataagtaattaaagaaagttttaattattaatgattttttataagctcgttgattagcaatgagctgcacaattaagttaaaatcatgttaacatgcctaagcatgtagggtgttgcaatttggtatcagagccgctaggttgtctttcgaagatcgtcacgacatgtacaatcattatcaatgatcagctcgactcatagtttagtaagcctttattgctttagtagtttatttgattagtatgttataagaaaagcgtgataggaagcatgttagtagcttgatagttgaataggtacatgttttaatttccaaaataagcggcaattagtaagttattcttgatcgcgatctgaccaagctagctcttcgatttgcaggctgttctaatagaatggacgccaggaaaaacactaggagctagggtgactcggtcagatctagtggaagtgtgggagctcctattcccccaaatatatgtggtcgaggcataggccctagaggtagggcacgcggttggagagatgttaactcgctgtaggctgcccagaaatgggaaaacatgtttgcagcaatgcaagccagaataaccgaacaagatgaagaaatcagacggtagaggcagcaaggtgctccaaaaatgaaaatggttccctcccctgttgtgcaggaagggcaggttgttgcagtaagccagatggagccactgtatgaaaggttccacaagcaagcacctccagtctttctgggaggtctcgatgtgatgaaattcgagcaatggctaacagttattacaagaattttgaattttatgggtgtcactgacaacgacacagtgacctgtgccacatttcaagaggatgccctagtttggtgggacatggtgtccctaactcgtgatgttactactattacctgggaagagttttaggagttgttcaatgcaaagtattacaccgaggcagtcagaagtatgaaaagaaaagaatttacccaactgacccaaaaggagaatatgagtgttactgaatacacaactcagttcgaccgattggctagggtggacttgagaattatgccaatcgatttcagcaagaaagaaaagta

SEQ ID NO: 67772 - DNA, 623 bp, Cannabis sativa
atatttttgacttttttactctgtggttaataaatatctatatttaccatttgtgttcatttcactttcttcagtcaaacactaaactccttcgtgatactattcaccttctttgtgtgtttttttttttgtttcttgagtggatttctaagctttctgttataggaaaaaaggcgtgtcgaaaggtcaaaacatcgtctcttactggtgaagcttcccatcaataatgaagactataagtcccagttcttcaccaactaggtctgactcatccccatgcacatcaaatctaggtaaggcctcttcatcttctagtttacctaggcattttacacgttctatttctattccatttgcttcagctaagataaacctcacctcgcctactgaaccatccatgaaccttactgtgtctgtctcatctcagcctcctaaccctaagtccatgaccaaaaagaaaacagtctcatctgaatcccctcactcttctgatcctaagaaagtcaaaacctctcaactagtttccccatccaaccaaacaaatcagcaacacttttttattcaaatgataaattgcttaagtttcaggataatgtctgttttcgcccattgtggcctgaata

SEQ ID NO: 67773 - DNA, 1200 bp, Cannabis sativa
  modified_base (1163)..(1171): a, c, t, g, unknown or other
tgacaccatcatcggcagagtgggacagacaaacataacactgctcaatttgttcccagaaactgctactcacattgggaaaacgtccacgccagtagccacggtggggcaatttccgcctatcatgcctgtcgtggtatccgaagttattgttcaactaaccactgttcagtacacaacgatacaggatcaaatgcgagccttgtatgccaaaattaacggacagaagaagactcaacctcctcctcgagtgcccactactcgctcggataatccacaggtaaccacttctagacgatgaactaactgtactcgcagggaatgaaggacaggtcaagaagggttcgatttgaatcagccaatgtcaagggatcagtccgcgcgaaacctcaaccgcgaggtgcaacctgaagaggatccagaacgatataatcctcgcagtagaccgcaaccgggaaacaaggagaatgacgctgactccgactcttcatcttcgcaaagtcgcaccacgagcaggtacaccaggtcaggctcggcagaaatactacgaggaagaagataccaggttcataggggcgatcttcgtgatcaccttaacgcaatttttagggcgcgttctcagacgccctggatcgatgaagagcctcgtgatccctatttaggcgatcagggcataaataatctcaccaacgcgcctaccgcaccagctgcgactactggggtggttatcccagcttatatagccgctgtagcgactgcacccgcgacgacttagggcaacgccgcccttccaagaggtatcgatcagggtattcttttgcaggctttaaagataattgagcagtagagaaagcctatatacaaattgcatgggacctctccttttaccgcagaagtgcgacaagcttggttacctaagggattccggctatctgaatcattaaagtataaaggtaccactaaccctatagattatctagaaaaatttaatacttttatggaagtggaccaggtaccccagcttacgaaatgtcgaattcttgcggcaaccctggaggataatgctcacgattagtttagccaattccctgaagcatctatatcaatgtgggaaacctttgtcgaccttttcctcacacatttccaagccacaatgacgtatnnnnnnnnntatactactctggctaacattaagcaaga

SEQ ID NO: 67774 - DNA, 1848 bp, Cannabis sativa
ttcgagtcccaaattataaaaaaaaaaaaaaattatatctaacccaccatatctcaaaagcaacaagcactgtattaggtggggtgatttatttaaatatagcatatgctgtcaacaggtttttgaatacaaataagattttttgaccaccaaattatattattatctgccgttaaggtaaatttgactaaggtataaacaacaccaataaaagatctattagaataaactaatacctaataactctaaacctattacaaataccagtaatattatctaagactaaacctaaagaagtaacgatagaagcatttgtttttaattttaaacacaacattcaatcaattagattcaataatgatgtttttatttggtgttagtcaaagttagttaagtctagctattattcagttacaactagtaaattttttaaagcttcattttcgacagttaagttagttgaagacaatactgtctttccaacactcttggacattgcctttaaatatcaacttcttctacagtcagagttattttttttaacttctatttcctcctcttctaaattctctctgtacagaaataaagctatagaaatgtatcctcttatgagttcattgttgttcgtgattatcaccattgtaacaccaagtgtgaatcaataaagattaaagccaaaggctgttctaaccgagaagtagacaattgccactgcaaagtaaaaaatctaacctttggtggaagattaagagacaatctttttcccccatccaacaaaccaccagatggagaatcacgaagcacgacctaatgttagatttagtgtgactatgtaatatgccacataagcaactgttttaattaactaatcaagttagttaaaacctatacatgtgtcggtttagttagttgtagtagttgtgtattagcttctataaatactatgtaattgtaatgagtagtctattaatctctctgcttgtaaaataatgaaagtgctattttatttctgtttaagttctttaaagtggttcattggctttgttaattggtttcggttaagtgcttgagtggagtgttcttggatgtatattgaactctctttgtgtgtgagattgaactttgaatctccaacaagtggtatcagagctggggttgatcgaagatggatcttggagcggttgaagttgaatcttgatcaatcaagaaggtgatctgctctgtcgtttcaagcttcagatttaggtgatcaatcgagcaagaagatggggaatgtcaaattcgatcttgagaagtttacagggaagaatgactttggattgtggcgagtcaagatgagggcacttctggttccacatggtctgcaggatgctctattgggggagaagaacttgcctattgatttaacaaaaaaagagaaaacagagcttctcgataaggcacacagtaccattattttaagccttggtgacaaagttctcagagaaatctcaaaagaagaatctgcagctggtgtttggaagaaattggagagcttgtatatgacaaaatcgctggtaaataagttattcctcaaatagattttgtattctctgaaaatgacaccatgaaaagaaattgaagatcatttggatgattttaataaagtgatccttgatttagagaatattggaatcaaggtggaggatgaagaccaggctatcgttgtgttgaattctcttccaaccgaaagctatgagcattttgttgacaccatgatgtatggttgagaatctttgacattagaggaagttcagagtgctctaatgtaaaaggagatgaagagaaaggcagatgaacaagaagaca

SEQ ID NO: 67775 - DNA, 725 bp, Cannabis sativa
gtgtctcgtatctgtattgggtcttcgccgcgacccacttactagctattcgaaaacatgaataacacttttatacttgtgcattatttaaaaaataaaaaataaaaattgataataaaaaatataaatataaatatttgtaacataaatattgaatgttcaaatactaatatataaggatgctagatttttttcatagagatatttatattttcgacacgtgtagaagttttaattcattttttatgcgtcactttttgaataaaatcttcagattttaataaattgaaaaatcaatcaaagcaatggcaactaacttaggagacagaaaaccctcctggatagtgcgatatgtggagaaacaagaaactcgcgccatataatgagcagctttgtttgcagattgtttaacaaaatacaaagacacaaaagacacacgattaagcatagtcttgcaatcagaaacaataaattcaaattgagaaggagcgaaaagagaactcaaaatggcttgaacaatgactaaactatctatctcaagaacaacatcatcctaagagaaactatcaatccaactaagagcctccttgatgccaataatttatgccatctcaggttgaacctgaccttcaaaagacttgttgaatgcatccaacattaattcatcatgatcacgggttgtacagccaacaccataacgcccaaactgctcaaaaattgcacca

SEQ ID NO: 67776 - DNA, 906 bp, Cannabis sativa
  modified_base (674)..(678): a, c, t, g, unknown or other
tgggtaggcggtgatttggtgctccgtagtggtgatttggtgatttggtgagggtgagacggtgagagaacaacgagagagataaaggaagagagagagttgaggtttgaaaaaatgagagggttatttttgggtttaatgtaaagtggtcatatattttaattttgaaatacataaatttaggaaaataatttcctccattaatatgtatgtatataatcaaatttcttttatgtattgagtctcctatattttttaaaataatatatatgtagagcatacttgcaccaatcaaaattaaatgatgttgtgcaccttgatttcagtataagcatgataagggctcgagatatataaagggtcatttctaaggtggttaacaaaaataatttcttaattgatctcacgtaatatatttttaattttttaagcaattagatgtttttttaattaaaaagataaattgacatcatgtcaaaaagagatttttttgaaataagttgaagaatttttttttattatttattaatcaaaaatactcttatattatatttcaaaaaaatataatcacttttgtgagtgggttgcccaatatatccttactttctacttaagtctagcacataatttacattaacttaaatgatataatatggatatcatctataaaagtnnnnntatcttaaagaatataaaaattaaggtaaaaattaaaataagtaaaataaaatagatatgcaatgtaatttttttctgtcaaaaatgatataaaatacagaaaatcacacttacgatgagattttaaaagttctttagttaaatatgacacttttaaatttgactaatttatatggtatttcttttttatttttatgtatttttatggttgttgaccgaggttttcgg

SEQ ID NO: 67777 - DNA, 687 bp, Cannabis sativa
  modified_base (43)..(73): a, c, t, g, unknown or other
ttttgaattcaaataaatcatcataaataattatttaaatatnnnnnnnnnnnnnnnnnnnnnnnnnnnnnnntatctgctaatttccaaatttaaattaagcgatctttacacctaaagtaaatgggtaacaaattattaaatgctacattattatagttggagttttattttaaaagttacattattactaaataaataaaaaaaaactaatagaaattaaataatagaaaaaatttaagaaaacaaaagaaaataagaagctcatatatcctcacaacaagattatataaatatatagtaatatagaaatatagatatatagatataggtatgaaattaaaaattgaaattatcataaattaagaaaaataagatgttaggaaaataaagtaccatcatacctctttatatattatcattatttttttactcttgacaggattccttttcttttaacaatccttttgaagagaaattattattgttttaattaatttttttacaattaaggtgaatatcgtgattacaaaatccataaaaaagtgtcaaaaatttcatttactataaatataaaattcttagtatttatttacacaaattatattttaaatacataataatatataataaaataatattttaaatgttttcgttgacgtctcctccattctttaggtattatca

SEQ ID NO: 67778 - DNA, 815 bp, Cannabis sativa
ctaataagtatcctaaaaaccaaagaaactcattcagtcatggtcattatcatgtcacgaagaggagatcaattagaactaaaaaaatatgtttttttaataaattatgtaatttaattactaagaatattgtaaaataataatatatattttccttggaaatactaccagaattaaattaaaaaaaatgaatcaaataattattgtctgattaacaaactaaaaattatcaaattaaaaatatttcaatatcacatttaactttaagaacttgtatattaagttccatttatctaccgttcaaaatatacaacagtagaaactgttgcaacagattcattcaatctcgtagcttgagcactcaactatgtgcaagatacgtactaacaacatcttcagttgcagagaacttattatttccaaccactaacagcaatttgatggcgagccatcgaataacaaagaagaactaataatgaaacaaaacaaaataaaatcatgtcacacaaataatactaaaaaatccaataccatatcacagatacaagactaatcgtagtagcaaaaatcaaatcgcaagagcaaaacacaacccctaccaagccgcacctgtgctcagggaaggccagcgggcctgtccggagaaaaatgattacctcctgtagctataaaattagaaataagaaattctaatttttttttaaaattagttcacaactctataataaccatatatacagtagaaaactagcaaaaaattctaagagttcaagaaatgcaaagaaagaaaccaagcaaaaactttgttcatacca

SEQ ID NO: 67779 - DNA, 1001 bp, Cannabis sativa
  modified_base (329)..(336): a, c, t, g, unknown or other
tatatatattaggaattatttaaaaataatacgaaaaaataacaaaaatacaattatacggaattttaaatatttttacggtttttaagattttataagacacaatttatctgataattcatttataatgcatacatatacataatatgtgtatatataaaagttaaccccccatgcatgcaataaaccctaggtagctaatatataataaaccaaagtcaaatacaatattggtcccctatatatattttctgagtgctagctatatatatatattgaaaggaacatgactgaaccacaagaggcctgcatatatatatatatatatnnnnnnnnatatatatatatataaattgagaggatgatcactataagagtagacgtgttcaaaatgaagtgatcataagaaatagagaataggtagctagctaattaagggggaccaaaacatgccataatattttgtctcaactccatcgatatattatatatatattcatacataaaataaaataaaagaaaaataaacatgtagctacaaaacaaggtataaatatatattgtaggtggtttttttattgcagttgtttttgtacggtcgagatatttttgagaagaagaaaagaaacaatagctacaaaaattattaagaaatgaatatccatgatatatattatttatatatagagagttgtgtcctgagtttgatgtgaattttggcggagagaatgtttgtccagccagacattattaacttacaaccaagtacagtatggtgtatacatatacgtacaaggaaactatatatatgatatatatctcaactcatggactatatgtagtgctctaatgaatattcttaactatgaggcccaaagtatgatgacctggcccagcccagcccagcccagcccacttcctagttcatgaagtacataatattcaataagttcaatacgtacataatattcaataagtacatatatgtaacaccctaacta

SEQ ID NO: 67780 - DNA, 811 bp, Cannabis sativa
tacttagtgaacacccctaatatagatgttcaacaaattcgatcaagtgataatcttgcagacttattcacaaagtcattaccaacatcaacttttgagaagataactcacaagattaaaatgtgtcgattaaatgatctccatgaatgccaaataaatgagggggagttatttcatactgcactcttttttccttgaccgagttttgtcccactagatttttttggcgaggtttttaatgaggcagttattatgaacatccaagggggagtgttataaacattaataattatatggatgtccaaatctttaatttattaccattaattgtaatcaatattccatttttcttagttttattttttcttagtttaatatttaactcttatatgtatataaataggagatcatctattgaaataaaacactaattaagaaaattctcatctcttctctattttctttctctaaattataatattttataatatttattttatcttatatagataataactatttcaaatttttaacaaaaattcttcatataatatttagggaaaaaaaatagaaaaatacaaaaaaggaaaaaaaaaaattacaaatatactatggaccggccctttaaacatttatgcagcccacatacaaatatttacaaaaataccacatgctctaaaccttcagctgcaaggaaggaacaatcaagaagaacaaacctcaatcgttcaaatcagcaacacaaccaaaatgaaaccaaaatgagggaaataccaccattaattctggcgaaatcaattggaaaagaaga

SEQ ID NO: 67781 - DNA, 516 bp, Cannabis sativa
gggagtgtgtgtaagtgtggggagagttgagtgtatgggagatgggtgccatgtgtaaggtgatatgggtgtattttggggagtgtgaagataaggtgagaggtgaatgcatgacgacaagaatgacattgggagaggaatcaaaggataaggcgcgcaatggaagagtctacaagtacgcgttctgaagaatgagagcaaagaggtacaagtagcggtgacaacggacttgcaaggcctaaagacccaaccaagggtacgctgcaaccactctccaacaccctatacccaaggaccaccacgcctccagctggggaccgtgcgcatgtacccggagaccatcctcctgcaacctgcaacttgggaccatgcacatgtacctggagaccatcctcctccagcctccaactggggacgatctgacaacaaacaagggtacagggtgccaggctaccttgagcacctgcatcatgcagcgggaaagcgacatcttgtccccatgggaccactttgtac

SEQ ID NO: 67782 - DNA, 615 bp, Cannabis sativa
caatcaagccaaagtttcacctgccgtagcacttcctgagaaaatctgcaggcaaaaaagaggtggtttgctgtctcttttattcgaactgcataaggagcagatttcatcatctgttattccaaatttagcaagtctatctttggttttcaatcggttttgcattgttaaccaaacaattaagctatacttgggcacattaagcctactccagctgcccttgcagcagaaatagtgctcaaaatttccttgaatcagcttatagcctgctgctattgagtactggtttgaggtgaaagtgttgatgttcattagctgcttcactttatctcttgcctcagttattttgcgccaataccagctgctattcgggggagctttatgctcccaccactcctccttcttgatgtaaacactatggatccaccttatccaaaggttatcttttttatttgcaatagaccaaacatgtttgaaaagggctgccccattccaatcttaagtgctcataaaacctaaaccacatgctgccttaggcttacacaaacacctccaagcaacactgcccgacccttcacttttaccttgcctccacaagaagttcctgcacacatt

SEQ ID NO: 67783 - DNA, 1430 bp, Cannabis sativa
tattgaaatttttccttttcttattttttcctcagctggaactatcaaatatgagacccactactactgagttcaaagctttaaaattgagcagcttcaagtttgacactgaatataattcttacaagagtattcctgttccggaacaaccttttaagattgagaatgacatttctgtcaagcttgatagttttttttgaaaagtttgaaaagtttgatggtttggagatgaagattgattttctgcatactttccaacagaagatttcatctgatttggttgagttgaaagagtttgtttatgcacagtttatttcctttgttgctcaaatggctttaatgcagacatagttttctactatttttactgattctattgctaaggtatgttagttttttaaggttgttatctaatttattttatgttgtgttcacctatttttaattatattttattacaggacaaagtgagtgactcttccaatgatgatggtgaaagtgataatgaagaagacattgatttagatgaatttgaagaagcagatgacaatgaagaagaaaatgctgcatgtgatgaagaggagggtagtgaaggagaggagaaggatggtgatgctgatgaagattctgagtccaaagaaaaagatgataagaacagtgatgatgaatgcactgatagtgagaagaaggtagataattagacaatgtaactagattttagttactttgcatgttttattttgttggaagtccatttagttaatggatttgtacttctatgttgttgttatgtctttttatattttatagtctttttttttttcttgtattaatttgctactaatattcagactctttatttgtattccttatattttttttttatggttatattatggattatggtgtttgcatttattattggtctttttatttttctttctgtttttatattattttttagtttttctgtagttgtttcttagtttttttaactcttttaaaaaaataaataactttcttttttttttttccttttttttgtttgtattttttctttatcaagaattttgttgatttcaatgacggagccactcaaatagatgttgaggcaactattcaatctagtgtgaaagtagttgacattatggtaatgttgtttgtttgatgttttttggttgtttaattggtcgtgattctggtaaccaagttccagtttctgaaaatattgagcctacggatggtcatgttgtttgtgttaatttatcgttgttttaccgtttttttagttgctcaacaatttctatgttaacactaactttatgttttcccctttttatatttattcttagatgggtacaacaagtgtctctgttgattctaatattcaacttgttgaagataatccaattctcgttgaagaaactcct

SEQ ID NO: 67784 - DNA, 661 bp, Cannabis sativa
aataaagctaattataattttttctccaattttgacataaaccaaatcatgttactcgaactttgatatgtactaaaaatcatgctccgtgaactttcatccatatcagaatttttttactaaaattgcacaaaagttcttgaattcaacaatcttaataattcaggtaatatttttaaccatcttaaaagtttagagggcataattttggtatatgtgaacattcggttgaaaaaaatccatattagccatttaataattacgaaagagttttgttgtagttggcttgttacaactacctagacgtaaacctcacaaacaatattcatatttttcttctcgtttttcacaaaattactttcatatattcgatctcatcaaagtcgaccaagtcagaaattcacacatcttcctatagttcttcttctcactctcttaattcatctccaagtaataataagcttctttatcacgctagttataattatcacacatattattatatgatgacagtgttcggaaaatccaacgccgccgcagagggcggctacatggcggtgagtgcgcaggtgtttcccgtcgtcgactacgagaacgaggcttcccaacgactaatcgatgcggcgcatgatcatgataatcatgataccaaatcaagatc

SEQ ID NO: 67785 - DNA, 1314 bp, Cannabis sativa
ttttttcatataaaaaattcaatatttctttttcatattatttttaaaaattagaagtaaattacttaaatattatattatatatttatattagttttattaaaatctttttattttagagttgtgtcgattttttaaaatttttaagggtagttagtatataaatttttttgtaaagtatatttctattttgctgtatgatatgttattattgttagaaaatattttttttttatatatatatacataataggagtatataattttgttaacataatacaaatatattaatgtatgtatataattttattggcatgctatatatatttaattattatttttatattttaattgtatgatatattatttattttaaatcatatttaattaatttctattttattatatacaatagtggtatataatttgttttccatggtatatttattttaattgtgttatgcaatttggttagtatagtatacatatatatattttttattatttttgttgttagtatatatattttagttaatggtatatgtattttttgttatacgttatattatttttatctttacatttctccccatcgttactcttttttatttatggagacaattaactttgccctagctacgcaggggatggttgtaatagcagtaggctttttaccatttctttttggagcgttacttctgatttgctatacttttaagggatagttacatctcaaaatacatggttccaaagaccaatactccaaaccttctcgttactctttgccttttttttagtcgattttggggtcatccatggacttaaatttcttgtcgtaatgcttctcctcgataactaattacccacttgggagaaccgctcaccaagtgttagcctggagatgacttcctttgcagaagggggaatatttgttcttcagacatctcataggctcctacacctttatgaagttgggttttgggagtaatgcatgcagttaccttagactttaggcattttccctggttcggtaatgaagtcgaaaccatatcgatttttatgcattcttcttactttgacccttgccagcatgaagttttaacttttttacaaaacccgacaaactaagctttaggaaatccattgtggtcgataagaagggattcaagggaatgttttttctcaagaatcttggccgaatatgcatttcatctctgaatttatcttttaattttaattttgaagaaggaattcaagcgtgttttcccttaagaaacttggttgtaaacatttcttgtttttggttacatatgc

SEQ ID NO: 67786 - DNA, 1762 bp, Cannabis sativa
aaaataaaagtatcctttaattcatgatatgaattattgaatcaaatttaaattattatcttataggattaaatataatatcaaatacatcgtcaaaaaataatatacatccgataatatattttatctgtatactcttatttttgtcaaaaaaaaaaaaaaacatgtttggtgacttttgttttcaataatgcatatctactcttattgtgaaattattttatcagttatataatagttaagtatatttgtttgcatttatagggagaggcagtgcaagactggcgtgagattgtgacctatttttctcagccaaaacggctgagggactacacacggtggccggacaagccagagggttggattgctgtaacagagaaatacagtgactcattgatggaactggcttgcaagttgttggaggtgttgtcggaagccatggggttagagaaggaggctttgactaaagcttgtgtggagatggaccagaaagtggtggtcaattactaccccaaatgtcctcagccggacctcaccctcggcctcaagcgccacacagaccccggcaccatcacccttcttctccaggaccaggttggtggcctccaggccacccgcgacggcggcaacacctggatcacagttgaacctgttgaaggagctttcgttgtcaaccttggtgatcacggtcatgtacgtactatactagatttcctatgattagttttcataagtacaaatataatacaaacaacattttaaaaaagatttaacaaattagttagtataattgatgatgatgatgatgatatatattatattcctatgaagcttttcgctatatattcatataattgatggggattttatagagatagatagagttattgttttcattgttttctatttttttgtttttaaaaaattaattttagaagtgagaacaaaaaaaatagtttttgaagcttgtagaacacaaagtcacgtttggttagtgatatttaaaaataacattttgttatttttgaaattcttgttcttcataactttgttttttgatttttttttttaaaaaaataaggcgaaacaagctttttttaaaaaaaaaaacaaaaaacagtttttttaattatcatatcaaacatgcacatggttttctaatgtaaaactaactttgttggaatttacaaaactaaccatgcccttagattatatatataatatataatggatttctagctagatgcatggaatcaaatggaaatcccttcaaagtatctcatcatttatttatttattttcaattttgctatgttattatatatgtaaataaatatcccttgtcgaaactctttctataaatcattatgtaatattaattacagaactgcaatcatcactaaaatataagtgtttgagcagtatttgagcaatggaaggttcaagaatgcggatcaccaagcggtggtgaactcaaacacgagtagattatcgatagcaacattccaaaatccagcaccagaggcggtggtgtatccattaaagatcagagaaggagagaaggctgtgatggaagagcccatcaccttcatggagatgtacaagagaaagatgagcaaggacattgagattgctaaactcaaaaagttggcaaaggaagcagacgatgacgagaagaagaagaagatgaaacaatccttgttcgacaataataataaggaatcctttgaatccaagcccatcgacaaactttttgcttaga

SEQ ID NO: 67787 - DNA, 727 bp, Cannabis sativa
cactatttatttgatagtaatttattaacatattcatatgataagatatgatattttagtagaaattttttacatattaatatatatgatacatatatgtacattatattattatatatagtgatatataatattataattgatattataacatattattatatatatatatgtatgagagatatatatcatataacatgtagaaatagtaatttttatatatatatataaataatatatatatttagatttcaaattgaaaaggttcctcagtatggaagacttaatgggaagaagttaaaaaatacctactttttttatatattaacgaaatttatctctaaataaaatttaattcaaatatatctctttcatgagtattgtacccaaattatcctcacacattcacataagtaagatataattttaaaaataatagttttgtattctttgtagatgaatttgtaggtttataggaaagttggagcaaaatttttattaaagaagaatgaaaactagcataaagtgataaggataaaattggtagaatgattgaaagaaaaaagataaacataataaattaaaaaaaaaagggtaaaaattaaaaacatcaaatcaaaaaaaatatataacgtaatttccacaacctaatgagtctctagaggttggaagaactaaaggcctctagagggtaacgatgaatagtgggaataataggcttttgcaa

SEQ ID NO: 67788 - DNA, 516 bp, Cannabis sativa
cctcactttttgtttaactctagcatataatttacataacttaaggagtctaatgggcatatcatcaataaaagtgggtatatctaaaaaaatatgaaaataaaggtaaaaattaaaataagtaaagtaaactgggtatacaatcttacttattttcatatgttgctatttttttttttttttgcttcttattattattgttagaatttatatcttaggattaaaaattgattttttttctttattttcaattaattaacttgtagcggagaatgttttttaaaaaaattaatattactaatttttatatatttttttatgaataatataagaagttaggtgtagaaacatgtagcttgacatatataattacaattttttttttttttttataatagaaagctgacatgatatattacacttttttgtatatctcgattatttaaaattattctcatcattgtatatcacgtgttgtcattatcgtatctgattaagtcgctatcattttagctt

SEQ ID NO: 67789 - DNA, 3394 bp, Cannabis sativa
cgctcttccgatctcaataaggctaattaacatatatataaaaattatgatattagtaagacgcgtataatttattattgacaaaaaaatatgtatttttaaaaattattaattaaattaaaaattaataattaaaaaaattacgtaaaattaaattaaaaaattaaattattttttttcaaattcattatagaagtggcattgatatagtattaatatgacaactgattaaatagacatattatcattttttttatcatgtgtgacataaaaagtttaggggcataataatacttggaaacgaaaatcctaaataatcaaaaaaaattaaatatataaaaaaattataattttttttgaataaattatgtaattttattaataacaattaactaaaataatagtctacaatccaatcggaatatcttccttggagacacaactaggattataataaaaaaaactagtcaaaataatctgccacctaatttccaaatcatttgacaaaaaaaactaaaaataaaattaaattaaaaagattacagcatttaagaacacctgtattcactttcatctaccgcttagagatagaaattgttgcagcaaattcatttaacctcgtaaattaagtattcaactattgtacaacgtacgtaactacactattaaaactcgctttgctacataaaagtaactattaaagaaacatttaaattataaatatataatatcaaaaaaccgtcaacaaaataacaagaatataatataaaaataatatgaaaacatcaaaagattatattttctataaataaaattttaaaaactgtaagaaaatttaaaatttcataaaatcgtatatttataatttttattatttttgtgtatttgtaaaatatttcatcatttttttatatatttaaatttttaatatatacttttttttaatggaaaatacatctttattaaccattaaaatccgctactaaagaaggtagcaagtcgaatgaaacagactccatatcgaagatacaaccagaaaaaaatatagaagctctagcacagttatgagctaccatatttgctgatcgtttaacaaataacacagaaatagttttcaattctaacaacagttttttacactcttggataacttggccaaacattgaaatcatattcacctcgcttcttatcgcttggaccactgttaaacaatctgtttcgagtgtaacatgttgccaattatgactcttaatccaacttaacgcttcacgaatgccaatagattcagctacctcgggtgcaaccgaaccagaaaagagcgccatcttcccctctattagcataccgtgatggtctcttgtcactaacccgcatccatatatgttaccaccatcaaagagagcagcgtcaacatttaccttgatataattaacatttggcacagtccaatgctcagcacccaattatggaatttttgtcccaccctatttgaagaataggaggaataggcagactgaatttaatgctcttataaatatatttaattagaattacaagtatataaatacatacaagagagtcatggtggtcatataataacaaaattaagatcgagagagagagagagaatggatgaagaccaattacagaaacacaaagaaaaagagcaacaaaaagaagaagctgtgaccatgttgaagaggcctagacccaataataagccaccaccaccaaacaaaagtatgcattcatatacaaatctttattaattaattatacatgtttcaacaaaattattattaatttcttgtaattaatttattgtcatgactactatagaacaagcaagaagacctactcctaatgtcacacctcatgagataaatgtagatgtgggtcaggtaataattaattaattaattaattaattaattaattacataataattaaataataatcaagtttcttgtttctaattaattaatattaattaattttaggatgttgtgagcaaagtaagagaatgggttaaaagttcaggatcattggatattctttctattgcaggcacagtatcatttgcatcatttgatgatccttctatggttttccaagaggtaataaataaatatatttagatatttagttctttaatttcttttttttctttataacttttcttgttttgattttgaatttggttaaataatttttgcagagtttttatcatattgaaacaataaaacgttgtgaaaggaaatttgatcatgatgaagaagatgtaaaattcgaagttaatttgtttgaacaaattacctacattaatgtttatcatggtgttgtacgagaattactagcttctactcctgttaaggtcatcatcacattattcttatttaaatttaaattaattttcttcttttcttttgttcatcataattattaattaataatgatttttttttttttttaatttttgatgtattagataacggtagcaaattacaattcaccaacagcaacatcatcatcatccacaacatcagtaccaagatcccatcattaattcacatgaaacatttatttcctagtttcttggaattatttattattttattgtttttgaacaaagttagttattatagttgtgaactgagagtaattagttgaattgtttggcagtttagtataatgccattttttgtaatcaatttttgagtctacagcttttgtttattgattcaatccaagaattctttgtcaaaatatttgtaggaatgaaatgaatctatatatcttcgagtaatttgacaaagattgaataagaacacaaccttgtattgttatatctcaattaatgtatatttctttttgtcaaaaatcagaaaaatattatttgacctcccaaaaaaatacggtacaaaaataactataatcataataattaaaattaataatttacttgctattttggtattgtacattttttatttttactaaaaaaaaaaatattctatatctttgtaaaatatatatcaattattatgtagattttagatatttaagtaaacacattaaattatcactataatactatatgaaataatttcacttattttgaaataatgtaagaatttctttttaatgatatagggaacaccttatttaatttgtatgttttaggaaatatatatgtcactataaataaccttacatttaatataaaaaaaataaagaaattgtgactagaagtacattattaaattatcactatatcgtgatgaaattacaaattttattattttttgtactatctctgcaaaagaattatttaattaaaaaattaaagaaaaaattagaaaaatatgagaaaaaaaaatagataaaattaat

SEQ ID NO: 67790 - DNA, 645 bp, Cannabis sativa
tgttgatgaagctattagttgttgttttgttgtcgatttaactttttttcctccatatcttcggaataaatgatttttttctgggttgatcatctggttctatttcgtcgttttgaaaggtggaggcgtatatacactttttgttcgtacaatataaaagtaataaaaattggccatggcagtatttctgtaaattctacgttctagtataattataatatttccctcaaatacagtatatatgtaaaaaccccatttaaatatcatattctgatgggataagttgaggaatacctcttttttatattcattaatcaaaagtaccatcatattatatttcattaaaaagtacccatttttgtgagtgggtttcccaatataccctcaccttctttttaagtctaccacataatttacataaatttaagggttataataggaacattatctataaaagttggtatatacattaaagaatatgaaaataaatgtaaaaattaaaataagtaaagtatagtgggtatacaaggtaattttttctatcatgatacgctatgagtgctacaaatggtctgatgagaggagtggatgtgattgagacatgagctcctttaagtgtttcagtcggcggagcgacactaggac

SEQ ID NO: 67791 - DNA, 542 bp, Cannabis sativa
tatgttaaaaaagagacaagagcgaaataacaaaataagatggttttttcattaaaaaaataataaacaaaagaaaaaaaaatagttttcttttctacaccatctttcgagaaagcattatacctttgtagaaactgtttcctctcatcctaattcattcaatgaatcaaacaaaaagcatgtctctattttcttttgtgtatccaataatcacggcatttcacacattttagtattacatattttttttttaaaaaaaattctttgaaaaatatttttaattaattttttaatttcttattatgagtttactctaatatatactatagtactcctaatgaaaaaaaataatactatataatcctactccgaccaaaattttggggttgaattattattatgaggagtgctactgtcaatcttctgttataacttcttagtcaatctctacgtccgaaaacacatgtcggaatatttttctttaaatttttttcacgggggtgttcgttatgcttacaatccctgtaaatttttgaaaaatt

SEQ ID NO: 67792 - DNA, 621 bp, Cannabis sativa
  modified_base (268)..(270): a, c, t, g, unknown or other
tagttgttccctcctagaatggagtcccgaatagactctaactgtgcttttcctatctgggaagtcccttcaacatgtgttttggtcttcagtgtacaaatgtgcactcatcacaaggttataaagaattgcacaaacatggtataattgaaaatatgaattattgggacctaccattttttgaagcttgtgttttaaggaaacaacataagcggaagttcactccagcaagacatacaactaagaagatactcaaatatgtgcatgnnnatctttgggggccatacaaagtgcatactcactctggtaagaaatattttctttctataattgatgattataataggtgtgtttggacgtatttgctagaaactaagaatgaatgcctagaacagtttagagtttagaaaactcaggtggaaaataaaaccgatctaaaagttaagaaccttaggacagacaatgggttagagtttattaactctgaatttgacatgttgtgtctagagtatgggatcaatagttatagaatcatagtgaagatcccagagcaaaatggtgttgctgaaaggatgaacagaaccttattgaataaagttagatgtttgttgttcaattctg

SEQ ID NO: 67793 - DNA, 2222 bp, Cannabis sativa
ttagccatacctgaagcatattccatctctcatcgcttctatcaatcccctctctcgtctcttcaacttctaatttgagccaagaaagcgcatacacacacatgcagattcgtcaatggcataggtaagcatctcctctatcaaattccttcttttatatttttttgggttttgtacatttgttttgatttttcttttgttgttatgtttcatcgagaaaaattggtttctttaggttcatttagccaatgggttcttctaactttgggaggagaagaaagtttcttaccggagcacctcgtcaatctcaatgaaaaacccaatggtatatcgaaacttcatagttagtagttacaaaatacgagggggaaagtaattttgggctatagaaaatgagaatttttgagacatgggtttttatttttctctgatgatctgtaggtttttgcaagtgaaccccaaagggaagtgtggtgatgtttgatggcaaatgggtatcttattgtgatgttatagttggtattcttgaggaaaaatactctcaattttctttcactgctaaacatatatcatatataaatcctttgcatttgatatttgtgtttgtcttgtgaatgtgtaactaacttatattgaaatggaatcaaggtccaaagcatcagagaagataatgaaaacatagatcactatctaatagtttgaactttggctagtgattgtattaattatttttgatctaattgctttttgtttgaatttttttttttatgtttttgtcttattttgaattttagtagcttgtatgcttgaaatctaaatttttattggtaaaaacaagggttttaacccgacccaacccaaaccaacccatgatatgttgggttgggttatgcaaaaagtttaatgtgaatgggttataatttaataggaagatctcattgggttggcccactaaaatagcttcaacccggtcaacccaacccatgcacacccctaggtaagctcttatctaattgcctccaatctagccattttgcaatctctaagaaacactgcactgtccagcagcagccaaagaaaaggtgatcctttgtctcctcttgattgcttcagaatatacaatcagaattatctacaatgtcaaatctgtacaatttgtacaatctatttttagcctaggatccgggtcaatttcatagtcgttttctctgttaattttaccatttggaatggtttgacgcttgattttcctttcaggtctccgaggcattagagttcaaattgtatcaattgttgaaaagacatggcattctagagaaaaatctgttgaaactgtcaaaaacgcttcagtagtcgcgaccaccataacccatggtcgcgacctaggtcgcgtacgcggcaggtagagagcttgttttttttttctcactttgcctatggtcgcgactaggctttatgtagtcgcgactatgggcaaaacacaagaagactggccagttttgaattttcaccattcagaggtagcaaccctaacttctatttaagggactcacgttttagaacgaaaatcatcaaagattagccccaaaaagtgaaagaaggaggagaggaagctattgtgatgatccaaagcgcaatcaccaactagttctttaaactcttgatttccatgttaatttttgttttagattttattatgaatgttattatggattttataaactaaagggagatgatgaatgttgattgacgttatccttagttaatgttaattgttattccttctttcttgtttgtgaaattattcatatttgtgtgtatttacatgtttaagattgatcaccttccacatgttctatgatctcaattaaaaatctgaaaagtgagaatgctaaaattggataatttaggtttttatgtgaaacgaaagtatttgcataacctgtgtgacatttagattatcgctttatgctgattacatgttaatctaattcaaggatgattagataacatgtgatttagggcctaaaagatttaaaaagagttaggttaatttgtataatctgtcatttacattaagaaagagaattgtaattagcattaataattaggtaattaaatcaacatgattctctttcctaatttaccatcttgattaaatcttattattgctaattttattttcttgttaatctttatttttttacttcaatcataaaatt

SEQ ID NO: 67794 - DNA, 728 bp, Cannabis sativa
caccatgcccatatgtccccagcgccatggtcaacacgtctctctcccttccacatgcacatcttcctctttcacttgcttacgaaagtcgtcctacaaacataacaaatagaattagaaatggtaaaaataaaaaataataatataaataaaattatattttaaacttacaattcatttaatgatttctacagctgggccctccacctcgccttttgtgttcatgtgaagtctttttcatacttcacatctatcaaaatcgatgatttggtggcatgcctttttctctatttattcttgaaccatccttacaccacctcgcctagtgtgatggtggtaaatattttttttccctgctttgttgggcctttattctcctatcgccaaattctagactcagtcttatagccacaaacactctccattgttccaaatcaattatgttttcttacagttttggtggcttatcgagaagttagtgagtcgcatctttgaatttaaaaatatcatctattaggatattttttcaatccttccacctctctccaccttttgaaatggttggtctcttgttgttctccggtatatcgaacatagactaaaaaaatgaaaattatagttataagtacaatcaatagtaaaaaaacatgaataataaaattaatattactcttatgtcatcacataattagtttttaatgttttgactcattttaggccacgatata

SEQ ID NO: 67795 - DNA, 1023 bp, Cannabis sativa
  modified_base (189)..(201): a, c, t, g, unknown or other
  modified_base (481)..(481): a, c, t, g, unknown or other
tgtgttctacttgtaacaaactcaccccttactactttgtatatcccagactttgtagtattttataaacactatccctaactaaatgtgatattgatgagaaaggaatgtgttagaacttgggaataagatgagtgaggttccatcaaaatcaattggcaatggaaggagtagcccattcatcttatnnnnnnnnnnnnntttccacacattagcaatatgggactaactcttaatagaatacaacaggaaataagatagaggagatttgtttcttttgattaatttagtaatgtatttttttaggaatattttcatttttacactttaaaatcgttttttttttctttttgtatttttacagaattctacataaaaactctcatagcaattaacagagcaacttaaatcacaactaaaatttacatagcaactcatgcacatgaaaactaccgaagcaactcaaaccgtaaatttgaanaaaaaaaaaaaagattaaaaaatagtatataagataattttctttttattattgataaattacagaattagggaatgctctgagcctctaagcacgtatctagctcccgtgcacccaaaaatagtgaactatttaaaatggctaggacatgagctattttgagtgtatattttatgtaatgatatacacatatgtacaattcctcctccttgtaatataaacaaaaccaaccaaagccaataaaaaatagaaaatacgatccaaagaaacaataatgcaagttctactaagtattaatctgaattatttatttatatttttttctgagtacaaacatttggtatgtaattaacaagtattatttggtagatcacaccacgtggcctacgcaaccatgcatgcctttaaaatcttctttctctttataattcattccttcattcatctataaatatacttgttatataaacccacttcaactccttcctttccaactttctttgactctctttcaaatctctcaagtttcaactgaaaaacaa

SEQ ID NO: 67796 - DNA, 895 bp, Cannabis sativa
ttattgatgcgtgtctgttatttcatatacatatggtaagcaatagttaaaactttattttcgacattgtaaaatatttagatttttttttgaaaacgtacgtttttataaaaaaaaataaactaaaaacttttttatttaagtgaaacaaataagatgtgtaccaaaagaatcttttaagagggtgcaatataaattttttagaaacttttatgattggccccctagtatttaagtcctcgtccttgattgatgtaatatttctttttacaataaaaaattaaaggttcaatatatatataatagtttaataaaaaaaaaagatttatatatataataatgtgtgatatcgtaattatagcatttttaaaagatgttatattattagagtgtttttaaaaatagaggtgtcaaaaataacgtggaagaaagatcagataaaatattatatttttgaatgatgtgaagatctataacacctttaaagaatgctaccattatagttgctcttagtaattatattaaaaaatggaaaacttacaaaaatactaaaattttggttaacttttacaaaaatattgttacatggaattttttttaaaaataccgtgctttataaaacaacagtggaacactaaacaaaacaaaaaacaataatagaacaacaaaaaaataatagtgggtcgggttgagcgggtctgggtgggttggtcgagtatgggtcaaattccgatcaaaatattcagtcctactaaaaataacagtggaataataaaaaaacaaccgtaaaacaacagtaaaaatttaacacagtatacaatataacccacgataaaaaaatttaaaaataatcctaaaatattggtggtgccacatccattttatatttatttat

SEQ ID NO: 67797 - DNA, 675 bp, Cannabis sativa
atgcctttgcacataattactcacagacctcgtccctgagtaaatttcagattgatgactacaaaagttacttatactttcttggtctgtaaaataacgtcgtgatctgctcccatctcgcgtttgtctatttattcctgttgacctactatgcccataggatcgcgattctcctatacttgaacttgcttcacgcgtctcatcttgcattggtcttcttcttcaaaagagattagacacacgtcccctactcaggtaagtatgcatattttctctattcgtgctagaaggcctctatgaatgcctagggggacgaccaccagacctaggttggtttccaagatttcttccatcattacgagggatttcttggtttcatggttacggttgtctcgcctctgcattcatgcgagatgattctagtatgtcactctattcattcccttagttcgtaaatccatgggaagttcttggaacatcgcgtcgatgttcttgatttcttgtattacttgggttgggttgattttctctatccattgggacatccctcgcattcccaggttgttcttcctgagcatttgtgggattcccttagttattttcctacctcctggttttgtagcctagagttcttcctcgtggtcttcttacagttggatcaggttggttttgagg

SEQ ID NO: 67798 - DNA, 735 bp, Cannabis sativa
atgaaatagaatacataaaaactgggggaaaataaatcatattaaaaccataaaacaatgtcaaagaatacccatctaaaccctaatcaagtgtttagctactcatgtttatgaaagaaaaatcacacatattaatttaagaaaagagaagaaaagaatgttgaaaactctttgaagaatgcctccagtattgcagttgatctctaaaattcgtactccgtattctgctgtttatttccttttgaattgcttccccaactcaactaaagttcaccctttatataggcattgagggactaaaaagatagaaaaacgcacatgctgaaatcttattcagcattgaattaggaaaccacactcagcccacgtgagagaattaaaaatgatatttgtgctgctgaaaaggggtgggccgcgacgcccactttgctgggccacggcccgtgtgtggtcttcacccaagagaggctgctatcaagaggcgggccgcggcatgcctattcctgggccgcggcccatgtgtccttttctccacgtgtgcaacgcgtaatatctttttttcttctggttaggattccgatttttcacactgatatttttctgtgatcttttatctttttttattgatgttttttaaatcttcttctattttaaatccataaaaataaaagataacaagcataaaattgctccaaacacgagtaaaattaaataaaaaaatatactaaaattaat

SEQ ID NO: 67799 - DNA, 647 bp, Cannabis sativa
gctaagaaatgggcagattttgttgtagcacgaagagagtggaaacaactagagtaattctacagcagcccgtaatcgacaacatcatccaacaaggcactccactctgatttgcaagaagacgggtggcgaaggtagttgataaccataaggcaattggatgtcaaagtgaaattatggagccccacctgctaaactaaatgcagccccggtatgatggcttttctttcatccatggtaactgaacaagaaccaggtctagaggaagcagccgcccccaaaactttgacaaaacaatcacggagaatggctcccgatccatagtacgggaggccatcagagacagcagcatcacaacaaaggagtggaagattcgtcatattaatagagcaacagttgctgccatcagtagcggagaagcgaggaggaggcgtaaggactggggtggtaagatgctagtcaatttgatcaagagcccaaggacaccaaagagccgaagaaagattcaatctttttttattacgtcgggaccacaccagccaagaaaaaactagaaacatttcaaaatcaagatgaggttttgtgatcctttatgaacatcaaaaagtcccaaggattctgcaggtagctggaaaaatactgatgcc

SEQ ID NO: 67800 - DNA, 769 bp, Cannabis sativa
aaaataccaaaatatcatcaacatctacacaaatcaccaagacatgcatccaaaactaatatgaactccataaacaatacttaaagcttcactcaaaatcagaataatcataactaaaagagaggaagagtaataccacaatttcctcaaacttttagcaatgactcataccaaaattccctccaatctcaaagcttccttctaaatccaaagagtttagcaaaatgaagaggttaatgggaaagagggggttcgaccaagagaggatacaccagaaatggatttctaattttctcaaattttgtttttattgaataatacctaagtggtcaaaatgaccaaaataccccataatcaaaataagcatttcaatacactcaagagcaatttaaacattccaatcatatatatatatatcacaatatttttagatttttatactcatcaaataatgccaaaattaaattccaaaaacgtattttgggtctcgaacccggttcggcccaaaatacccgattgtgactataccgcactgacttgtcagaaagcacatgcaaatagatagaatacacatactatataataatacagtccacaaacatgatatatcataaaattacaagtttacccatctcgggtcaaaattacaaaaatgccctggtacaccaacggggtcttaaaatacaatttatcagtatagtttcacatattaaattatataataatataattccagattaatacacatttaaactacctctcaacacca

SEQ ID NO: 67801 - DNA, 1121 bp, Cannabis sativa
  modified_base (140)..(145): a, c, t, g, unknown or other
atatttttcaataacatattctaaatggcttttagtaacacttattaattagttttctatttttaaaattaaaaaaataaaaatatttttcaataacatattctataaaattgaattatttttaattttttaattgagannnnnnattttaaaaataaaaaaaaattacttttaatattttttttaaattattttttttaattaatattttaaactccaaccagatccgaactcaaattactcaataccctggtactaaacctgaattttgacccaaaccttaattcgacctcgaatttagatcagacttaaataaaataaaaaaataaaaataaaaataaactttaccggaggtattttttttttttaaattaaaaaacaaaatgaatacaaaacacatttttattttgcaattaaaaaattaaaaaataaaattgttacaccttaatttattaaaaaatatgttcttacaattttcaatcatctctttcttctctaaaatcaaggtcctaagcagaaaagagtggatttttgttgcccatccattcgtttcccgaaatcctaatccgattccttctgtctatgattttttttttttccattctttaatggtattttcaacattaaatttttattttgaattaatttcataaatcttgatctaatctttgcttgatcataattgaaaattcttgtttttgcagacgtgagaggagctactttgatctcttgctcttgatgacgacaatggaagaagtaacttttcacttttaggtctgagatttctcagaatcagtagccatggcactcaactaatcaccattcaactctttggatttggactgttttccctcattttacagtaatgtagctgttaatatataatctccattgtcaaagtttcgagaagggatttagctttgattctgaagaagatacggcgatgattgatgagaatggcgttcttcaactgaacactggttcttctggggagcgaagtcatggagattttgcatgccgtaaacccaagtggtggtgatgaatgatgatggctagctatgttggagaagacgataaagggattaaacccagagaaagtggtgatgaagaattagacaagg

SEQ ID NO: 67802 - DNA, 811 bp, Cannabis sativa
  modified_base (761)..(761): a, c, t, g, unknown or other
aaacggtccagcaacaataatagacaagggaatgggaaaaggggaaaattcactggcaagaccaaacaagctccccgggagaatcctgccaagcatactgcatttaccatcctgatggaggacatagaaagtgtttatatggccactcagtcactagccccgtacaagaagcctgcacacacccatgaaaaaagatgtcagcaagagagacatgaccaagttttgtcgatttcatggagactacgaccacgacacctatgaatgcaacaatctgaagcgggaaactgaattcatgataaggaaaaataacccgcacgtacagaagtatgtcaaggctgatcaaaatcagaggggcgataacagccaagacttgctaccaccaccagtagataaacatctacaagtcattattggaggcccgcatatagctagagattcaggaaaagccttggagagatatgcccgaacagtacagcacgagcaagaagaagtaatcctggctgtagtagagaggaagccaaaaatcccacgggcaggacagcccaccataacatttaatgatgaagatgctgtcaaaattagatttccgcacaacaatccgtttgtcatggaagtccagatagccaacaagatggtggccaaaactatgatagataatggagcctcttccaacatcttattcaagaccacatatgaaaagatggggctccaactgaaagatctaaccccctatcttctgcccgtatatggtttctccggcnaaggagtcgcacctctagggcaaattcgcctacccctcactgttgggcaa

SEQ ID NO: 67803 - DNA, 1321 bp, Cannabis sativa
atgactagtggccttcgattgtctgctcaccaaggggaccctatgccagatgttcaattgtataggtcgactgttggggcactgcagtaccttacaattacaggacttgagttgtcttttagtgtcaacaaggtctgtcaattcatgcagaatcctttgttgacacattggcaagctgttaaaataattcttagatacattagtggcactactgactttggtcttcacctaaccaagcctcagtcatttgacttaacagccttctgtgatactgattgggcatcggatccagatgatagtaagtccacctctggctttgctatctttttttggctctaatctaattgcttggaaaagctagaaacagcagtctatttctcgttccagcactgaagccgagtacaggagtgttgctaatgtaacaactgagcttatgaattacctgttttctgagttgaacattcgaatgccacaaccacctacagtctggtgtgataatctcagtacaatcatgcttacacagaaccctgttctacatgccagaacaaagcacattgaactcgatttgtactttgtaagagagaaagtctggaacaaaaccatagagatcaaacatgtttcagcacatgatcaacttgcaaatggactaactaaagctatatcaagtcaaaggttccttgatttcagaaccaaacttaaaattgaagaccattcaattatgagtttgaaggggggtgttagaacagaaaattagttagtgatgtaactgatttctgttatttctgttttcggttgttattgttagctgttagttagttctttccctctctgtttgttgcttagatcatttgtatataaactctattagttctgtaataatgattgagattctcttttcttctccattactcttttcttcctttcttctctttctttctcttttgtttagcttttgttctcatcaatggctaatcgatttaacattactcgtatttgtttttgaaagcatcttactcatattttaacaatattaattttaatattcaagcaaacaataactcgtcataattcttatttgatatttcatatcactatgttctcatcatccgaataaatgtttatcaactctagagtgctgacatgcaatttcgtttcttataggggctataaagccagatgaagaaaatactcatatcatgactaacaaagtaaagattttgtcacatatttgaattgagttagtgatttgtacgtttgcaacatatatgcctctaatccgggtaatccctttgtagcctccttcttctcaagtttctataaa

SEQ ID NO: 67804 - DNA, 1707 bp, Cannabis sativa
aaagtggaatctacaaaccaaaggcctacttatctacaagacatccattggttgaatctctcattcctactgaaccaaggacagttcagcaagctctcaaagacccaaagtagtttcagtcaatgcaaaaagaaaatacagccctaattcgatccaatactcggactcttgttccatatcaacttcacatgcatgtcattgacaataaatgggtatatcggattaaactcaatgttgatggctctctaaacacatataaattcaggttagttgctaaaggatatttacaaacacctggtattgattatgaagagacttttagtcctgtagtgaaaccagttattgttagaactgttctaacattagttgtcacttcagcatggccggttaggcaattggacgttagcaatgcttttctcaatggtgatttgcaagaaactgtgtacatgagacagccaagaggttttgaggatcctaccaaaccaactcatgtctgtaaactacataaagctctctatggtttgaagcaagctcctagagcttggaatgaaaaattaaggcacacattactgcagtgggggtttcaagcttccgaatctgatacttctctctttgtctatggctccaattcaaatctcatcatcctccttgtgtatgttgatgacatattggttactggaccagattcgagtctcatttccaaactcattgctgatttgaatttgtcatttgccttaaaggatttgggacctattcattactttcttggcatatatagggatgctgcagggatgtatctctctcaaagtaaatatgtgactgatttactttgtcggctacagctagatggtgtcaaaagttgtccaaatccaacaagtttaacacaaaaattatctttgaaagatggggaaccgtttcaggacattactttgtataggagcacacttagggctctccaatatcttaccttaacacggtctgatattgccttaataattaataaactaagtcagtttattcatgctcctactgttaatcattgggaagcatgcaagagacttcttagatatctaaaaggcactatctcccacgacttacttctcagaccagcaactaccatggatgtttgtgcttattcggatgtcgattgggccagttgtgttgatgatagaagatcaaccggggttatgtggtttttcttacaggcaacttggtttcatggtctgcaaagaagcagaatgttgttgcacgatcgagtactgaagtgagtttagaagcttagccaacacatctgcagaaatcaaatggctgctcaatttactgtctgaattacacatcaaaccagccaatactccaatcatttgggttgataaccaaggagtagctgctcttgcagccaatccggtctttcatgccagaagtaagcacatcgaaatcgatctccacttcattagagatcaaatcctggccaaagaacttggtgtcagatatgttccagcaatcgatcaagtggcagattcccttactaaaccactttcgacagaaagatttttgtatcttagaggcaaactcaatatggctgccacccctttttcgtttgaggggggatattaactaactgttttgttttagtttactatttttctatttcagttagttagtttcttgtcagttagtttcttaactaactctcttgtatcttgtatt

SEQ ID NO: 67805 - DNA, 1215 bp, Cannabis sativa
tttaatgaagaacacttatattttaaaaaagtcacctgttagttcaattttagactttcgttttgcttctgaaagtaacctaatgcttgcacttgtgaataaggcatggtgtgttgagctttgaatgcatttttagataaagaaccctaatattttattaaagtctcctggtagtgaaattatagacttttatttttcttttgaaagtaatatggtatataccattataaatatggttgagagtgttgagtttgagtgtattttttaacaaaaaaccctgatattttttaaaagtcatctggtagtcttattttaaaatttatggaagtaacttggtacttacacttatgaatatggtcgagtgtgttaagctttaagtgtatttttgaacaaagaatcctcatattttttaaaaaaccccctagtagttaaattttagaattttattttgcttctaaaagtaaccgcgtacatgcaatcatgaataagtagagtttgttgagctatgggtgaatttttgaaaaaattcttgttgtttttgaaaagtcacctagtaattcaattttaggcttttactttacttttgaaagtagcatggtgcctctacttatgaatattggtgagagtgttgagttttaagtgcatttttgaataaagaaccctaatatttaaaaacaaaaaacaaaatcctagtagtggtattttagacttttatttttcttctaaaaataacctaataccaacacttatgagtaaggtagattgtgttgagttgttagtgcatttttgaacaaaaaaccttgttattttagaaaaattacctagtagtcgaatttttcgttttaattttacttttaaaaataacttgatgccttcacttatgaatacagttgatataatgagttgtgagtgcattttttaacaaagaacctatgcatttttaaagattcacttggtagtaatttctgacgtaaaaattaactaaaataactaaaacaagagacaattgagggtggactttagcatgataagttgaatacttcttttttgtatctatatatacttatttttttgagtgtgttgtctaatatattctcacactccacttaagtctagccctaatttacattatttaattgagatgggaacatcatctataaaagtggataaattttaaaaaatatgaaaataaagataaaaattaaaacaaataaa

SEQ ID NO: 67806 - DNA, 1387 bp, Cannabis sativa
taaaattaatatatttttaatattttacaaaagatacaattcagaaaaaaaaaattacaacaaattcaaaataaataattattaaatatgaacattataactaagtgaaattgaataaaaaacttaaagtcaatttgtagcgccgacgatggccttcaagccaaaaacgagcctccccttgacggcgatggcctttcttcggtcgtctaagccaaaaacgagcctcccctctttctcgttcgttcccctccagatctctctctcctttgttctatgcacgacgacgacctctagttctctctagccaaacgaagcccaaaaaccttaaccccaaccttctaaataatgtagtcgaaaaagatagcttaagattccaataagctcagcaaaaaatacttcaggaagaaaaaattacagagatctaattgggttgggggttagactcgtgctcgggatccatctctcctttttcctcacattgatctccaaacaaattctgcatcatctcgtgcctcttctgatcccccatctccctattcttgagtaatcgatggctttcttgtaatcggccgaagagtctcggttgttcggagtagtggtgcggatctgattggagctccactcactcaaaaattctccttggcgataggttatttagggttagaaaatatatgagaaatgatgaaaagaatgataaatcaaaagagagagggaggcggcaggtaatttagggttagaaaatgaaatgtgaataagatggagagagaaagaaatttgtagggttttttattttatataataataaaataataaaatatataagtaagagagaatataataataatgatgatgataataataataataactctttacattttaaaaaaaaatctttcccaacatttaataactgttgggattcattctttttttacaaaaaaaaattatttagtattgtccacggttctccaccgttggcattgatttttcccaacggtttttttgcttcagttctaaatcgttggaaaaaatttctacttactttttccaacagttttcataattgaccctcttattaaccgttgggaaaagctcattttgtagtagtgacgcctttgctattggttgtcatgacggggcaactttcgactttatcgtcatttccattaaggtgtgattcttcacttccttctcctgagatcttgttggaccttatcagggtttctagttataattccttttctgcccatacacatggactcttccatccttttggtattgggtaacatgcccttgagaccccccggcatggcaaagagtttcatcttcatctcttccttctgtcctaggtcggaagttaacctggtcatctttttcgaggtactga

SEQ ID NO: 67807 - DNA, 1417 bp, Cannabis sativa
ggttgaggctgcctttgttctttactttctctgctttgattactctatgttgtgtttttatttgctcaattaattttcagatttgtgtttttccagattttttttttgttggatttcggtatagatctaaaaaattatcgaacatatttgtacattttagacctgtaatttctttgtaaaatattttatattgacttatacttaataattttatttaattttaccaatgtatagattaacttgtaaaaataaaatataatatttgtaaaatataaaatattgttttggtttagaataaataaaaaaatctaaaaatatgatattgcttttctaattaaaaaaattattaattttctaaaaataaaatgataaaaattattttgagaaaattatattttttttttttaaaaaaaaatatttaatatagtggcactttttgtgtgtcactatacctctacaaataataataaagaataaaaaaagaaaaaaaaaagatatagtgacactttttgtgtgtagctgttactttattaaaggcctatagcccattgagtgactataaaagggttgagtgacacatgtgaagtgtcactaaaaatagtctttccagtcaccctgattagtgactcgcggtgaagtgtcactaaagaattttaaagtcactccatgtgtatcactaaaagccatttttctagtagtctcgcctaactttttggtgaaagggaaaccttttagctacgcaaattcgccccagttaaagtataaccgaaacattgtcactacaagaaattcaccgacataaaggggctcaacgaaagcccaatgctttaagtgaacactttttttgccacactattgtgccgacaaaagtgcctgaattacgctgaaaagagtcttgaaataaattgctttatggtgcgaaccatttctaatagttcattgatatttgccagcacaattacgtgccggcaaaaagctcttaaaaaatggaggaatttttccacgtgaaaaaattagttgggggaaaaacttttgtcgatgcatatttgcgccgacaaaaggttaccgaaaagcaatttttaattattagcaagaaaattacacttttgccaatgcacatatgcgttagctaaagttttcaaaaaattagtgggaaaattcttgcgtaaaaatgtagttggtggaaagacttttgttgggaaaaatgtgcaccggcaaaattatttcataaaagtttcgtttcaatataggataagttttgagactttttccaacacaatatagattgttatcggcataacaaaatgagttagtaaaagtctcttaatataacatggtcgaagccattccccttgccattttcttcttcttcctcttcaacccaccaccaccaccttcccttctctctctctctctc

SEQ ID NO: 67808 - DNA, 1069 bp, Cannabis sativa
  modified_base (1011)..(1023): a, c, t, g, unknown or other
aaatactacgccagacgaaactcggattagaaccaatctccgctgtaagaaaagagccagtaagaaaataccgagccttcaggagtcgtgtagcaaagaagatattaagtataaaactttaatcagattttttgattaagctttattcagattaagttgtattaatgagttggctccctttcctatttttttttctttttttaattcttgggagcagtttctaattaatgagttcacttcacacttaattaacaggataattaggtcaagtaagcttttcaattaggtctcccaatgaattaaacacaataatattattataattctcattccagcaaacaacccttagtcagtagggttgattgtgacataaatatctaaaattttgagcttattactaatataaatcttataatttttttagtattattagtacttaatattcataaaattctatttttcttttaatttcgtgagagataatttattaaaaaaaatgtataaataactgatattacatattttatcgaggtacaattatttaaaatttaggtcttatatatgtctaaggatgataatgggcaagatattagtagggtatatttatttcatgaccttacctttaaaaaaaattcttctcataccctatctcattacccctattattttttacgagtagggtacctacgagtaaatcctaccctaataaattttaagaaataaaaaaaaaaataatgatgatgacattaaaaaacacttatatatataagtatttattctatataaaattagtcaaaaaagtataattactaaattaaaataataataaagtattatataatcatgcttttaaatatttttcatactatttatatatatatggacgaagttagaacaccataacatttttactcagtaccggcggaagtaataccggcggagccaaaccgacagtcttaaaggggttattaccggcagaaaaggcattccgccggtattaattttgaatannnnnnnnnnnnntaaatatttatttaaatttagtattcccggcggaactttagtatta

SEQ ID NO: 67809 - DNA, 1323 bp, Cannabis sativa
acctttaaaatacatagtattgtcgtttttgagagcgatcataatcagactcggtcctagacacaaatggattaggtccgtgcctaaggcctccacttaatgatgccctaattttttttaaaaaaacaaaagaaaactaattaaattttatatataaaaataaaagaataacaaattttgaattgaatctcattcatggccttgaggtccatgatcattattgtgtcaccttaagttaggttgtcaacgaaatacccactttagtgttttgggagacaaaagacattttaggtcaagtgggcctagtgtgtttttggtggcccaatatccaaactagcccaaaggctacaaaccaagcccaagttatcaaagcaaatcgcaaaatgggccattgctttcacaaaaacacacgactgaacaacaaaattattgaaatttgacatgtgccatgtgagttcatggcattaaatatttatatgttattaaaaataaatatcgaattttgaagaaaaaaaataacgttttgaaattgaaaattagattgtactttcctttatattgtgatatcacatgtataataaatataaaatggggtttttacataaaaatactggattttggaccaaaaaatttcaattttactgtcacacgaattttttttataaaaatattgtctttttataaaacaaccgtaaaataacaaaataagataattaaaataacagtgaaacaactaaaaaataaccgtgaaaacttaacacagtatacaatataaaacttactcaatatttttgaaagaaatttgcctcacaataaaaaaagtaaaaaagttaaaaatttcaatatgtagtgtaaaaattcctataaaatacaacaaacatgtccaaaactaaatagaatctatgggcagggccagtcctattgtatttgggattaagacaaaattaaaattttaggcccctaagcagcccaagatgcacgctatgttcgcctcacctaagggtcgaccctgcctacgagactcaagtcacatttttttaacttctcaaaatttactttctacttaagtaatatttttaaaactataatctacttttgtattgaaatagtaattcaatatttttctatttattccttagttctaaaaatttaatagcaacaaataatcctaagcccggtcctaggctagacttgtgcttagagccacctaaactagaactatattttttatgtgcaccattggaatatacaaaaaaaaaaaaatggtaatcttataaaattttaggaaacttgcccactaatagagaaaattacactacatac

SEQ ID NO: 67810 - DNA, 715 bp, Cannabis sativa
aatattgcaaaatgggcattgatgcatcaaaaaactgggacaattgaaatcgaagatatccatgaaagggtgttggatgacttcaatgattgggacccgggacctgcaatctctttgtaattttctgctgcttattgttctgctgttttaactctgtttttggttggttagggacttatcctagctggtactgttctgtttttttttcggttgtatctttactgttgttgattttgatcttggcaattttctgccttttaatgaatgggtgtcctgaacaccccccacttcatcaaaaaaaaaaaaaaagagattgtgctcacctaacataagatttgaattaatcgagtgtattgataaagtaatgttgttaaaaagattataagaaaataatattatttaaaaaaaaaaatagagaattgttaaaaaatattattggtggttaacatccttcttaatgtggtgtaattaaatagtggattccatatagtttaataaaataagttttagcgaatatcgttaaccaatcataccatgatacctatgaaaagtgttgggcatcactgatacccaataacaatgcccaaaaaaaacatcctttcaccctgaatataataacagatgtattggaaagacaaataagaaaaatactattttttttttggtaaatactattttggatcctgtgttttgcaaaagttacagattggaccct

SEQ ID NO: 67811 - DNA, 740 bp, Cannabis sativa
gggtagtggtttggctactgtgatcagagattctcgggggtgtttggttgctgcagagactatataccatcacggctgtgtgtcagttttaatggctgagagcatggctattagattgggtctgaagttgggtcaaagactgaacaccaaactgttttttgtcaactcagataaccaaactgctataaaccagttactgtcaaggaaagctcctcgggcagattgggggatgccattggtggatattttctcttctaatatgctagatggttgtgtggatattcaatttgttagcagagattgcaataatattgctcactccttagctaagtgggcctttaatctcaaatgtaattctttttggtcagaggtgttaccctcttgtgctgctgctattttagatgcagagaagcctgaccttgtgtagtttttgtttttttgaataaagtactttcctttcaaaaaaaaaaacaaatattatttgaatttaactttattatgtttaaaattcaattaatttaatttatcacatacaaattaacatttagaataatatttaatgaaatatatatttactaaaagttataatttatttaaaaaaattatggtaatagtgtctagtttttttacgtgacgtataacatagttatagattaacaaatgagagtgcaccatatttatttaccgaaagaagaagaatacaattaataccctatttaaactaatttctcagaaaaaaa

SEQ ID NO: 67812 - DNA, 1197 bp, Cannabis sativa
gttcattgccttaaaaataagaaaagaggaagacaaagttatgctgctctcaagcttgatatgagcaaggcttttgatcgggtggaatggatttttttgcaagaagtgatgctcaaaatgggttttgataacaattgggtggaacttattatgcggtgtgtatcatcatcttcactttctttcaacatcaatggggctgtgcaaggctcggttagtcctcagagaggcctacgccaaggtgatccattatcgccttaccttctcttgatttgttctgagggactttcggctttattgcaaatggaggagcgcttaggcaatctgaaaggtttatccatatcacgtggtgccccatcggttactcatctcttgtttgccaatgatagcttattattttgtcaagctaatgattcctcttgtcaagctatcagccgtgttttagatgtgtatcaccgtgcttctggtcagcttctcaacactgacaaaacagttatgtcattttctccaaatgctagtgcggatttgaaggcaagatttaataatgtgttgggtatgccgctttgtgatcttcatgaaaagtacctaggcctaccctcttatgctggtagagggaaatctgaactttttagtaatatcaaagaccgaatctggaagcttttgaactcttggcatgcaaagcttttctccataggtggtcgggaagttctactcaaagcagtggtgcaatctattcccacatatgcaatgagttgtttcagcttacccaagaaattctgcaaacaacttgaagctatgatggcaaacttttggtggggttctagcacaaacaaatccaaaattcattggaagaaatggagcatgttatgtcaatctaaagaagaaggtggcatgggttttcgatctttcctccacttcaatcaagctctccttgctaaacaggcttggagaattttagaggatccccactctcttttggcccgagttctaaaagctcgctatttcaaaaatggcaatttccttaacgcttcaaagggcactcttccgtctcttacatggcagagtatatgtgatggccgaaaccttcttgtaaaaggacttcgttggaagattagtattggaaataaggttaaatgcgctacggatccttggttaccgggtaacactactttcctcccatatacctatcaagctgatcct

SEQ ID NO: 67813 - DNA, 1047 bp, Cannabis sativa
tttatattatttattaaattataactcaataatagaatgcactcaaaaattattttcaatacaagatttaaaatttgtactaaattttacataaaaaataattttgtgtcaaatttaacttattatttataattgtattttaatgcacaagatgtacaaaataagtaaaatcataataattattattattgataattatttaatattttattgagaatacaataataaaatggtaaataaaaaagataaaattattaaaaataaatgaatcatataattaattacattataataaataaaaaaattatcattttagagcatcactaaagtagtagtttatcttaaatgtttctcttgacatttctcttaatacaactattattgaaagttgaaaaagtaccgaaagttttgttattttattgtccataacactttcttctttatgtcacattttggatactctatttaaaatgagattgtttaaacaagtgatataatatagttttgatatcccctctaaaaacctaaaaaaacctgttttcttaaaaatgtaatagctcaaggatatttctagatttaggttaataccaccaaaatttattaaaatttaacaagaattattggataattggtcaaggtgttatatagtttatctagtgtttcatcctttctttgactctgtttttagtcaaacatgcttttggttacataccgttattatggttagttgttaggatcttgttctttaccacagttaggttactatttagttgagtctgctaagttataggttcggtcaagttaactcgattactccctctttgtatatatatacaactcttattgctctaagtgtaacttaaatattcatttatgaaattcttctaaaataaaagttttttttctctttctttttcgcaatatgggatttgagcaaggaaaatagagctttcccttgatcttgtttctgtcgcttccgttgtcgcgcttcttctccgatgaccttcccttgagttcttccaattctggcgattcactgttctctgc

SEQ ID NO: 67814 - DNA, 954 bp, Cannabis sativa
aaaacaatcatttttccccaagcaaaaatgaccaatctagccttaccctaaaactaaactaaatacaccttaggggcaatttggtaattttagctaaatgccaaaccgacaatctaaaaattcaaacctaaactagaatacttccaaaatatttcctcttttaatgtcgtgacatttctgaccacccgtcaagttccacagttgttaagctggaaaatattttattcaaattatagtatctgcgattcccgcatagtccaatataatctccgtagttaataaattacgctttatttattcttatttccctaatcaactcgtatgtagtttaagtaggattataatcctactctaatgtccacttaatcacatatttaataaaatatgtctaattaaaatatcacatcactatattttctgggatattacaactattccctccttatagaaatttcgtcctcgaaatttatttaacaactcgggatacagctaccgcaactgggactttaacctttaaattgcctttcaatcttattgttctttcacaacactataactagcgacatagtctttgctccacaactctctctcttttctgttcaaaatttgtaccgattgttcccctcatgacaagtctgtttgaaattcgatatcattgtaactctgtatatggatcgtttttacctcatacttctaaaacattgaagtacacattgtaagttccaaataaaacagggagtatggctagctaataagctacccaacctaccctttccagaaactcaaacggatcgattatcctgggacttaactcccttttctaaccaatttatgaattttcctttcatcagaatcacctgaagaacgataaaattccctacatcgaatttaatatctctatacttggatcagcatagctcttccatctattacacttgcttgttacaggctcat

SEQ ID NO: 67815 - DNA, 941 bp, Cannabis sativa
aaaagtatttaatttttttacttaacaattttttttgggctgtttttaattgtacacgggtccctgtaatattattcaaatatacggtgtacaaaaatttattctatttatacggttaaatgacatcttatttataaatattggacacttttttaaaaaaacatgctattccgaaaaaacctactattctaaaaaacctgctattccaaaaaacttgctattctaaagcttcacagctcacacgacatgatccctttggctccggcaagatttcaacatccattgccggagctactgaatttaaagtaggctatctctctctcccaaaaaatccaaagaatcacatgttcaaccttctaattttttcttcaattacattaaagttggcaagaatttcaacaatttggggaaaacttagatttattggaaaaaagctttctatcccttcaaataatatcagcagaggtcattaattcaagttgaaggattattacaccaatactaaattctaattgaggtaattgaaagctcaaaattctcttttattaatattatgggtaaatatgaatttgggtgttaaattttgtttatttttcatcttgttcttaactttgagtatggttcacacggttgaatttgattgtttcactaatgaattgtttttgttatattttgtgcatatgagttgatgttaattttgcagacatatagttgctatagtgtttccgcacatgttgctagaaagtttgttgttatcaattattagaaagttgctataagtaaaactgcaagagtttctaaattgattcttgtattttattattatttctatatacatagggttgttggaagtgtttctgtaggtgttgcaaaaatagttgtcgtattcaatcctttgttttttttttaaaaatactgttgttggaagtattggtatcaag

SEQ ID NO: 67816 - DNA, 958 bp, Cannabis sativa
tcatacatggagagtttgaattgagttttccacaaggtccatgaatcataaatttgttaacggcattataaccatcaggatcaatatttgagtctgggattttcgcacttattattttgtctatatgttctatcgaaggatttttcaatgtcgaatggaagaaaagtagtatgcgtgcatgaggcaatcctcttttttggaactcaattgtgtataaacctgcaataacattgagaaaatgttaaattttacatttagaattgttagaaaaattgtgaaatattttcattaaatatcattttaaaataatttaattttgttatgaattcaataatataagaacttacatgcgatatttttccaaatagttgttcttttttcagatcatgcattagttggttcaactttatttcaaaaactctacatatgatatcaaccttattctcatcgtctttttgatcaattaaattaatcatgtcatttatttctgggcacttcgggttgcaagtgtaagtaagaaataaatcaggatatccagcccatttacaaatggccatagtatcttaataattttgtactctatatcggggtcccccggtgtaacgccctaacatttaggcacgctacccaagatgattaagaagccctaatcccctaaaatgggaatactaataaaataagcgcagaaattaaactttaaacgaaaacggaatgaaaataaacctgtaataattttaaccttacaaataaaagttacatgtttcaagatcccaaaaatcattttacaaaatattacaagtcttttccccttagccgacctaagcggcaaaacagagttacaaaagtttcaacactagtagaccccaacccattcggtctagcgtggcccgaacatgtacatacatcgcccaactcccatactcatggctgattagagacagatttaccctttcctgca

SEQ ID NO: 67817 - DNA, 974 bp, Cannabis sativa
ttgctatccattttagtatcatgttgagctgcagctattggtttatattgctaattgggtattgcaactaattggctgacatgtctttctttactttttgtgtgcaacaagggttgtagtactactagagtactagattatcatgtgattttgtcctctttctcttgagttattgtttctttccaaaatttcaatgcaatttgttttgtaggctctctgtccagacaatacctatggtgttgatagtggaggcgatccaaaagttattcctaacctcacatttgaagaatttaaggtttgatttggtcattaaaatgaagaattcttgttctaatgcattattagcataggctttcaaattcaagctatagttgcacagatgctgcaactgtagttatgcttctttttcttcttaatttattattgttaatggtagatttgcatctctaactgctaagttgtgcaggattttcatcgtaaatattaccatcccagcaatgccagaatatggttttatggagatgatgatgtcagtgagcgtctacgcattttgagtggtactgcatgaatctgcttatttatattatatcataaatgtttgtacatttgagtgtgctaataagtacatgcgagctgtgagttggtgctggatttgttagggattgtagaaaaaaaagtgtttctttcaattaaaatgaagtctaggctatagttgcacagcactgtgactgaatatgtccatctttccatttaaattagagcaattaaaccataagcgatttgcaaactaaacaaatacaattattgggggtgaaatgcaaataagaagcaagtgaattaaatcctcttagatgagttcatgttattgtttcatgttaatgatttttatgagtaaaaattttagaacttaggaatatgaataaattgtggtatggtatcttattcacctgtctcactctctgcagaatatttaa

SEQ ID NO: 67818 - DNA, 2083 bp, Cannabis sativa
  modified_base (892)..(893): a, c, t, g, unknown or other
ttgcttgaatatatatgtaattattatattaatttaattatgtatgtgtttatatatcttaattagctggcttcaattagatttattatatcattatatatttatatagtaagataggcaatacagacatctcatctatttgtttttcaaaatatgatatatatatatatgttttaatataattttccagtacgattaattaaattagactgtacaaattagtttgggttgagtattctctaaaagtaataattatgtataagaatatggatattaatttggtgttttattttcatatatcttcatattatcaattagagcaaaaatggtcaagatgtacaatgagttgattttcaatctggatagttacctcgttatgtatattactttgttttcccaaactaattaaggttgatataataaaatagttgacgagataggtagggtcatgagtcctcagtatacgaggcttatgataaaattaaattttagaatttttatatatagtttaattattatgaaaatgtatttctaatgttttagtgtaatggtatacttttaaaatctctttaagagttccaaaattcaatccttcatatctacacattaaatagttttttaaaacatagaaaaatggaggttgtggattgatccttaccttggcttaaaataagaccttttattgctacaccaaacaatatttattattatttttttttatttaatattttatctatatattaataatatttttttcacaattttaaggcattattaaaaattttattttcagtcacaacaaaataacttgtgactaaaagtgaaaaaattgtgattaattataaattatcattcccacgttgtgattaaaaagtccgtggctaaaagtatnngtcacaaaaattacaatttgttgcaactaaatgtgcttttagtaacaatacttgtcgtgactaaaattaaattagtgacaatttgtatctaaataatatgattagtcacaagtaacttttttattgtgactaaaaatcacatttaacggcaaaatttctttgttgtgactaaaaaattatcactaaaagtggcatatttttatagtgagaccctgaacgcttggagcccgagacgcacgcctagctcgcctacactcagggtcggtaatggagatatgcatggtttgcaatatagaatgagtttattattatatatcatattacttaattatggagaaaaatgtgttaattaaatattaattaatcaactatatggaaaatattaggggtgtttttatttttacactttaaaattatttttacacattctatatagatagttcccaatgcttggagatatgtggaaataaacttttgaataaatgtgtaataagtaataacttgttcaagtatattgatccccactaatttacacttaaaattaagagtgagtgtttctatacatattcttcttattctacatttcttatatgtatagaaatatacatataattacgcatatacatatagtgtgtagtatatgttattataacatttatttaatcttttcgttggtcattgtattataatgcactagaattataatgtcttaatattttcttttattgtaataaaatctttaatccgaacataaatatggccatagacacaaactcgaacccgaaattaagactcagatccagacacggacccaagacctgaactcggacaccgaaccgagacctggaccggacacacaaggtccattagttatctatatatgctaacatgacttaaaaccaataaatttatgtaatatttgatagaaagtggaatcgtgttttccacttatttatttataataataatattcaataattaattgatgatgatcatatataagaatttgattagtccttcataccataacatataacatcacactaatttgataggagctatctatctttcataacatgtaccaatcagcctcaacaaataaagcacttatcacacgtacagtactgaactattatatatatctgtttctttctttttcattaaaaatgacataatagccaaacaaaaaa

SEQ ID NO: 67819 - DNA, 957 bp, Cannabis sativa
tctttcatttacggggctaaggagatatgatttcaaactcaaggtcacctggttcaaaagtaatagtgacgttgggtaaaaccattggtcttgcgagtggaatagaagataaactcatgggtttaggcgaggccgtgtctcgcaaaaagcgatgcttgccctcaaaaatttcttacaagaatcgcctataacgactggcactctcttcttggttcaacttaatcaaatggtctctaatcctggcattgtttatttttaatttggactgaggttcaaaatttatgggtttatgtgggcaagcaatatgtttaggatattccagtgcgtgaaccagattgggacatctctacaaaagaaagacaatccaatttctggatgaaatttatcaaatgagaggcttaaggaatataacaaacctaaactatgtctaaccctaaaaatcgcccaggagatactaaccttattttttaaacaaaatgaagtaatggaatgtaagacaagtcataactcaaataaaagaaaagggagaacaatatttactatttgaagtcgaaaagctggattctagagacttctgcgaatggagacgtgacgaccgaagggataagttttttgagcaccgagagtcgaaaaagcaagtccgagtaaatttgcaggaagaatgtcaaagatagggatggcatgcacaaatttagaaagctcgagtggaagtttcagaaagcttaaactttttggagaagatgaaaatggtagaaagtttgattcttactgttttatactttatatttttcaaccatcagatcataatagcctattaatgctattgatgtgtattggaaccataaaactgccaaaattagagaacatgcgtttttcaaaagggattatgacaaatataccctctgtaatcactaaaaagcactttttctcaaaaagaactttttaaggggcaattgt

SEQ ID NO: 67820 - DNA, 808 bp, Cannabis sativa
  modified_base (171)..(179): a, c, t, g, unknown or other
tatttttgtaaaatgcccaaaaaatttatatacacttaaaaatttataaagacacctattttaatgatttttaatttttattttatataaaatttatattttaaattgtattaagttttttataatttttttcttctaattcatagtcttaaaaaatatacctatcaaatnnnnnnnnnttatattttaaatattatgataaataaataaaataaaaaattatataaaattttcttagaaaaaataaaaaatatatatataatgaagaatttttttttaaaaaaaaaatattaagagatttttaaaaattatttaagtttatacttttttaataataaagtatatttattattttatgaggtataaatataacttctctttttatttttaacaaggattttttttttttttgatttatttaacaaggatttttaagttatactaaaagttaacacttaaatatataaatatttatttttctaccgtttctctgatatttattgaattgtcggtacctcatccaatgaaaataaagaaagtgaaacctcatatcgaaaagcctttttctctatattatattcatgttctttgcccttttaagtagccacgactaaaatgacaagtcccaatatccctcacatacttttagtttaattattccctacaatctataatttatcctcttactaatttttgtgaaatttataataatttcttgtgtccaatttcggctttaaaataacctttttattataaaataacacaatttataatagggaaatttgattttctatacttagaaaatcaa

SEQ ID NO: 67821 - DNA, 1197 bp, Cannabis sativa
tgaagataattgagcagcagagaaagcccatttataaactccatgggacctcgcctttcactgaagaagtgcgacaagctcaacttcctaagggattcggattatctgaatcgctgaaatacaaaggtactacaaatcccatatattatttagataagttaaatacaattatggaagtagaccacgcaccacaactagcgaattgtcgcatccttgtggcaaccttggaggataatgctcatgattggttcagccagttacccaaagtgtccatatcgacttgggagacttttgtagacctattcttgacgcacttccaagccacgatgatgtacaaatcgccttatacaactctggctaatattaaacaggaagtcggtgattccttacaagattattttaaacattttaacgcaaaagtaaccaaagttgagaaggcccccgagtctttattggtatgtatgttaattacaggtgtcttgccaagatctgacttttggaaggagttgcaagctcgaaggccaaaatcatttgtggaattctttgccatggctgagccacacaaaagaattgaaaactctttggctgagctaaaaaaggtgaaggaaatgcacgagtcatctgtaccacgatcgtgctctcgaagccccagaggaaagaattccagaggtcgaagtcccagaatatgtagtcgcagagacaacgaagtttaaagcttgccaagtccccttccaagaaggaacgtctccaaaaagaaaaggaggcccgcgttttgtcaattatactaaactggcagtcccttgcgatcatatctatgcgatcgaagagaaaaacatagtcttcagaaagccttcgctaattagaggaaatcgtgacaagtgagatccaaaatttttttgcaaatatcataaggacattggccatacgactctgaaatgctggttcctacaggacgtcgtcgaggaactgattagacgaggagaatttggtaagtacaagaagaacggagaaaaccatccccaggcgaatgagaatgacgacacaaacaatgcgagtggttatgaactccctgtactatcttaactattatcggaggaccaaatattggtggagattccaagaattcacaagagcgatatgccaaggaggcaagagagaaaccgctcaccagtgtaaataatcttagtgagcgacctg

SEQ ID NO: 67822 - DNA, 557 bp, Cannabis sativa
tagatatatatatatatattattatatgtttagtattattttttttaagaataaggttttttttttaagaatgaagtgttttctatttaaagattaaataataagaaaatcttgcataaattatcgacattttgtacctgagatatggataaggattaattcttcgcacttttataaagtgatacacaaaacacaacatgataaatattatattatatatctatatatataattagccattatcatatggtgctaatacactttaatggtaactacagtgttaattaaaatttaaatttaatgttaaattaatattgaaaaatataattttaatattaaattttttaattaattttatatcagcttaaattaaataatttttattattgaaatatatagattaaaattaatgattaattaaaaatactttattttaaataataagctttacttaaaaagacattcaatatccattgttagttctgtatagttctcattttagtgagattcatccctaatagatattcgttcattaataatttaacgtcgtagaatct

SEQ ID NO: 67823 - DNA, 500 bp, Cannabis sativa
catttcaattttaacgtgtccaacaacaatctattattaattatagagcattgttattggacactaatggtgcctagcacccttaaaacatgtcgttttacgattcgctagcgatactccctaataattattatattaaactatatgagacccaatactaaattagaccaatagcgatattgatatatagtacttggcaccactagttccttttaacatttctcttaattatattactcaaaaatatatattaaaaaaacaaagaagaaaaaaggtgaggcacatggcacaccaaaaatacttatgagttcatcaatcaaaccttagtggggtcccactcctttttaataggggcaaaagaaaagaagtttataaagttggtaatttaatactatttttttgttttcaaaatcttgggcagaatcccattattgtcttctcttattataattattatcatttatacataattaattatttatgtatgtaaggagaagaga

SEQ ID NO: 67824 - DNA, 1173 bp, Cannabis sativa
ggacctaggacccagacctggaagggtgacctagacccggaaccagggcccggaccaagatctggaatcgaacttggaactcaaacccagatcttgaccctgaccgggatttgaaacccgaacccgaactcggactaggacttgaagctcgaccgggtcctagacttggatcgggacctaggacccagacctggatgggggacctcgacccgggacccgggcttcgaaattggcactgagacccaagacctgaccacggacccagaccctaaacatggacccagaccaggtcttgggacccgaagtggaactagactaggactcgagaccgtgatcctgatctggacccggggcttggacctgaccgatagtcaatgtttggatctgggacccatacccagattcaaacccaaacccgaactcggaccaaaacccagaaccagactcggacatgtacaccgtgacccaaaattggaagcggaactggaagcggaccgagacttgggaacaagaccaagggactaggacccagacccacacctggaccaggatgcagactcgaattaaaaataggatcgggactcgagacacgaacccaaacccagacatggacttggatcctgacccgcacgcagaacccgaaacgggattggagactcagacctggattggggacccaaacctaaaactagaaccagaattgggacccaagatttagaatgtgacccaagacccgaccctggtcttggtcccaaacccaaacccaggcacggacttggacacggactgggacccaggatctgaatcggaacgagaccgagacccaagattgggaaccggatcttgacccatgacccggggcttggacccaacatgtagtgggtgtgtggatcttggaatcttaccaagacccaaacttggaactgttggaaattattttaccaggatcggaatcggaacatgggactcggacccgcatctagacccagacccaggaccctaacccaaactcagaccctgatctcgacctagacctaaatccgagcgtgaacccaaactcgtaccaggacacgaacaccgaccccaactcgaacccaaactcgaacttggaatcacaactggacctagaaccagacttggactaggacaaggacaaggacctaaactcgaacc

SEQ ID NO: 67825 - DNA, 755 bp, Cannabis sativa
gatatattatttacatcaaaagcaactaaaatgttactttttttaaaacttacaaaacacaaaaatttctgaaagcgagatttttcaagttttttcactttcggtgattattttaaatttcggtatttgtgctgacgtggcacaccgatatttgtgcaaattattttcttaaaggtatttttataaataagatcaattttaagtataatattgaacagaatcctattttttatgtacatgtattttttttttttttcaaatatgctaaaatatgaagaagaaaagaatgaaaaattttaaataataaaaatattattttttataactaccgaaataaattatatttttaacttatgttccaagggaacccataaaattttatcaacattgatgaaaattttaaataattaataaatttatataaaactaaaaaaatattaaaattatgatactaaacatattcataaatgaataaaaaataaggggggatttacaaaaaatactcaatttttttgtcatttttattttcactctttttttttttacatttttactgtaccaagttttcaaaaataccgtgttaaacttttaaaattataaaaatactgtgattcagcaaaataaaaaaaaataacttaaaagcaacttaaaaagaactctaaaacaacttaacaaataacataaaaacaactataaaataataaaaaaataactacaaagcaacgaaaaataacaaaacaataacattattgcaa

SEQ ID NO: 67826 - DNA, 577 bp, Cannabis sativa
gagattctctaaaatatttaaagagtttatcaaaaaacacgttacatcatatgctctaaatttcttctctattttaaagcttctttaaaattcattattcatgctctacttttatagaatactattcattgctctaaacatattttatcaattgtttcagttttgaatttttctttttatatagaaatatgtgtaaatattaatattaaatgtttgaaataaataatatatatatttttaaggtaaaccaatacatgttaaaattaaatatattaaaatttgaaaaaatagagttttagtgatgtattttaaaaaagttgatgtttggtgtaatgtgtttgaggtaaaataaagaaagtaagattttagtgatgtgttttaaaggatagagtagaggacattgaattaaagaagacctaccaaaattatagctttgatatttggtcgttcaatacgatactcagactcttcagatcccataattctcaacatgacattgacaaaatctttggcttcatgatcatctttagccttggattgaatatgctcatctatgatcccctcaaagaattcatca

SEQ ID NO: 67827 - DNA, 868 bp, Cannabis sativa
ttttcaaagtgcttttgtctcgggccgagttatttttgacaacattcttattgctcaagaattaattcatgccattagtttaaggaaaaaggggaagctaggttgggctgctctcaaattagacatggctaaggcatttgatagggttaattggcattatttagagagtcttatgtttcactttaactttccttctcgatttgtttctttaattatgaaatgtatttcaactacctctctttcttttctggtcaatggttctgttcagggcttagttcatccatctaggggtcttagacaaggtgatcctctttccccctatctgtttattctctgtgctgaaggcttctctgctcttcttagggcaagccaagctgctggcttacttaagggtatcgctatttctaggaatgctccctccttatcgcatttgttttttgctgatgatagtcttctcttctgtactgctagtcgttcttcttgtgctgctctccaaaatgtctttgatatctattctagggcttcgggtcaggtcattaatttttctaagtcttctattcttttttcccctaatacccagcctgatattcgtgctgctttcttctcctctttcaatcttgaagatagaccttttatctgtaaatatttgggtcttcctcagtgcttaactcgttctaagtatcactcttttgccttcttaaaagatagagttaattctgttcttaggagttggtcttctaagtgtttttctcgggcaggtaaggaggttttgctaaaggcagttattcaggctattccggcctatgctatgtcttgctttcgcttgcctgtcaaactctgtaaaggcatcgaagctgtgatggccaga

SEQ ID NO: 67828 - DNA, 592 bp, Cannabis sativa
caagattcgaaattgacaaattcactggagtgaatgactttgcctcttgcgcattaaaatgaaagcacttcttgtgcagcagggcattgttaatgcaattttagaacctgtgtccaaagaaggagaagatgtaaagaaagtctcccaagaaatcgaaatgaaggctcacagtgctatcttgctaagcttgggtgatgaggttcttcgagaagttgcagaggaagagactgcccttggtttatggaataaacttggttcaatttacatgaagaagtctctagctaacaaattgtacctgaagaaaaggttgtacaccatgaagatggaagatactaaagaactgaggaggcatcttgatgatttcaacaaactgatcttggacttgaataatattggagtcaagattgatgaagaagatcaagcaattctcttactgagttccttaccaaagaattgtgaacactttgtggatacaatcctttatggcaaagacacattaaccatgtccgaagttaaagctacactcaactccaaggaaattcagagaaaggttgatgacaagttagacactggtggggaaggactgtttgct

SEQ ID NO: 67829 - DNA, 552 bp, Cannabis sativa
ctatagatattataagaatatgatagtgatttggaaactaaaggtggtgtaaggtaatatatggttgcgtgaaagatgacaagaagaaaataatgaaatgtcaatgttggctcggttctttaatgaatatgaataacagaaatggatatggtgactttggctagagcattaagggtgagagactgagagagatagtgtggttgacagctatactttggccttttgagcgtgtgtgcagaaataaataccttaggctctatttataggcttgatttaatcataccttatttacttaacctacccatgacaccccttctaactaaaggcaaattttaaaatttgaattaaataactgaatggaagaataatacttgggactccttcaccttgatatcatgactacggttaagaaagattctgaagctattaactctctcattttgttttcacgtatctagactaaatttacttatgtaaacatttcaacttcctccactaaatcctctatggcaaccgaaaatgccagattagattattttaaatattcaagct

SEQ ID NO: 67830 - DNA, 842 bp, Cannabis sativa
  modified_base (226)..(237): a, c, t, g, unknown or other
tttaagtgtataaaattaaaaaaatatagtatttatgccgcaaatttctcttaaaataattttttttttttttgcatggaactctaaaattatagtagtgtaaccttagattagccttgcatcatgaaaatatttgtaaaaatgaacaaaatacaactagagagtaaatttgcacttattttcatagttagtggaaatttttttacaaaaaataataataataatnnnnnnnnnnnnaataataataataataactaagggagcaaaaccttaacaaaataacctaataatatcataatacgaagcaaaagtaaaaattgtgaggaatgcaccccccacctatcaattatttgatttttgtgtgagagacatttcaattttgagccattactttataatattactatttggtggtttgtccacattgaaaaactttggctaaatgacaacacaatataattagaaggaaaaaatccaatgtttattctttttataaaattataaaataaaaataccacatgtttcacgggaattatatatgaaaactttggatataataaatcatgtgtccaattaatatatattttttctttttgctaattactgtccaattaataatttggtatggtggggtccattttttcttttaataaatggtatgttggggtcctcgtttagtagaatgctcatgtagttttgtgtgtaaagcatttaaaaacagaaaagaacaataagaaggatgaagtgaagatacatccattcaataataaacaattttaatactataggacaaatccaatccaatcaataagccaatcctctcaacaaaaaaaaaaaaaaaa

SEQ ID NO: 67831 - DNA, 818 bp, Cannabis sativa
aaaaaaaccccaaccggtaaactggttttcaacaggaagtccagttcctagaactaaccggtcgaccggttgcaacaggcccccaggaaccgaaattccggttctgagctgggaacccaaaaattcttccccttaattcaattcaatcccaaatctttctaaaacttccagatacctgtatgcattatgctaaaccaatcccaagcaatagaactcaacaaatcacacaaaatctcaatccaccattagagagctaggtttgagttcttaagctcaaactttgctcaaacctcaattcaacccataatttcagttcaaactaacttaaccaataacaatctccaaattaccaaatcaaacctccttagaacatacaacaacttaaacatcaaaattcatgctatatacaacctaaacttaactaaaacacaaataaaatacctaggggttcataccttgacggaagtatcaaattcttgctagaactctgagaattacagcaatgaaatccctcttttccttgctatgcttggtggttcgaaagagaaggagagaaagacttaggaaaagtctaggcttctctcaattttctatttaagtaattaggttccttctttctttttctttttaaaattgttaaacttatattcaacatatatcaccataaaagacaaaacaatgcttaactcaaaaagaccactatacccctctagctatttaccaattagctactaacccacaagggtaattaagtcattttcaaacccccagaaattccaacgcctctaatatctaacaatgataccccgataatattc

SEQ ID NO: 67832 - DNA, 931 bp, Cannabis sativa
cgcaccttcacttccccatttccgtgcttgggtcaattggtgagaaattcacatgccatggtgacattggctcggcccctagcatccacaaaactgccccacttcattctttcaattggggcacgaattgtttcaagcgttggttgacgcctcaaaggattctcagagaattcaatacaccgatcatcgatgtatggcctaaccttaagctttatgaaccagattcgtgccgcctcacttagaaaccgggttcaatcaaaacccgtaggtggcgggtttgatgatgttcccccttcttcaatgtgccttgttctcttaggccccataatatcacaatgacaaagttttttccaaaaataattctagacaaaattaggcagcacttccccttgaaattcttactttcctaaatttttaaaatcaccagaacagtatagatagtaccaataacaattcaaatcctcaatataaacccaacaattccactatcaacaaaaatttccaaaataatcactatgttcaccaaaaatccctaaatactcaatcaatttctcaaatatgctagagagtgatacttacaaacccaaaaaagccactactccacctccattgttgaatattcttgaaagcttgaggttgaagatgaagaacaattaatttttggattgggagtgaaattgatgatttttggtgtgatttttgatgaaaagtgaagattgatgagtgaaattaagttttggtatggattgggattgagaaattggcaagaagatgaaaagaattgaagaatggtgacttttggtggtttttggctgaggaaaaaggtggaaacgactgagaaaaattagtttaggtttaggtttaatggggtgaaaattggggtttttttatagaaattcgtcagctggtctcgactagcccatgggtttgt

SEQ ID NO: 67833 - DNA, 882 bp, Cannabis sativa
gccgaccacctcatcagcaggatcatcggacctccacgaatcggaccatcggacccatgcaacttgaccatcggacccaatccgtcggacccatcagatctatcggacccatgcatcgggaccatcggacccaacccgtcggaccatcggaccccatgcaacgtgaccatcggacccaacccgtcggaccccatcggaccctcttcttccccaatggtttttcggatccaatcttcttcatcatcatatttgatctgcaaaagtatatctatatatatatatgaataattatatacatatataacgtacaaaagtatatctatatatatatttacctggacatattaataaaaaaaaataaaaacttgaataaacaattcaagttattaatggaatgacaataactgagtaattttggagagagagaaagaaagaatcatatttagaaattgggttggggttgggatcgggtgggttgagcaaaaatgagttgagagagaggaagagagaggctgatgagattagggattttaaatgtgaggggtatttttgagaaattagtaatgtggtcatatatgaccaattttaataactatgcatttaggcattaaattttaaggtattgtaaatatagaaattcaaatttcccatacaatttccagccaacctatataatatatggttgttatattatatattaaataatataatattttagattaaaattataaaataatatatattattattatgagtataatatacaatatgattaggagttacatacatataataattattatataatgtgattaatagttacatatatataatattcatacaagttttaacataagagatagagttactcatattttgtaa

SEQ ID NO: 67834 - DNA, 760 bp, Cannabis sativa
atacaaaatctaaaattatatttactccaaataaaatattgtcaatttctcgcaagagctagaatataggtctcatgcgattaattaattattgtataattattaatgacactatttagtaactccgtgtatatattaagtaaatacgtagttatataattaataaataataacttgacttattctaacttacatataattcaccatatatgtacgatcatatatatatatacaaaaataataatataataagatctttgaatccaaaaatatagctttgaagtctttatttagaaaaggttgattcattgtatattctagattttcaagatcaaacaatctattatctaaccagtctttaattaattaggtgtacgtatatacatactataatatatataagaaaataatatttttctaaacacgcagtacgtgttatttttataaccacatatgtatagtaatttgtttctctctataaatatttagaatttgtgataattatttttatttattatatatatatatctttatatataaatgagtaggagaaaaagtcaaataaaaaataaataaataaaaacaagtttaactgagtttaatgtaaatccatcataaaaatgaaagttttaaatgaagagcgatggaattttctttttaatagaaaggatggtcattcattcggaaaaattcagctattacaatgttcgttaaagcagaatgagcattcaacgcactaaaattataatctcacataaaa

SEQ ID NO: 67835 - DNA, 1155 bp, Cannabis sativa
  modified_base (108)..(108): a, c, t, g, unknown or other
gtatttttgttgtatgatatttctctaacgagtattgctattaaatactagtggtgtctgacaccttcttgtattgtgattgtctagtaatatttcttaaaaattatnatattaaattatatggaacccgatatttagtaggattaatagcgatattaacacatagaaatatgttaggtgccactaatttcctttagcatttctctttctcttatttgtgtgaattgaatcaattacgacacatacattcatttattgatcctcatattaaatacccagtctattgcaaaattttatatatccccatatgttttttggtccaagaatatgtttcttttctttttttttttttttgaggaaaagaagtagaatatatttcttttgaagactgagtctcaggattaaacgatagactgagtcagcagacaaagtgtgtccaataatcattattgaatcatagcaagagaatagagaggggcattttcgtaatttcacttgccctgttttaaacttcccctgttttataaacactacctgttttccaaccaaacaaaaattctcaaaactaaacaaaaataattcttcatgactccattacgatcagtattggaaggaatcataactcggcggataatccttctttacgcaacaacgtggacgattatgttaacggtaacggtggcggtggcctcatttgcaccggagtttgcattcgttatggccatatcaccatcgtcgtcgttttccaagtcttgtaattcaaagggattggtaagaataccatttagcgatccattaacggaggtcatatgcttcccatcccatatggtaaagagatccaaaatagatctcattgtccctacagtctttgccgctctagttgtcaccgcttctgcttgctttgttcgatctttcgccttatatggtagttaaagattgatattatgatatgttttcaaggagaaattgaattgaagtttttcaatacttgttatatccagttttattagttttagctttatagatagaaaacgaggttacttaattgagtgatgtaagcattattgtcttttgatgagtatttggtcattttttcaaaatgaaaatgctattaaaatgatcactgtagtcaataatcttgaataaaaatgtatg

SEQ ID NO: 67836 - DNA, 1034 bp, Cannabis sativa
aatttctagttgctgaaacagtaaaagatatatcaatgcatcattttttaagaggtgtattgtcgaattatcctataatttatatacatatttaaaatatatacacatactttaaattatgtttctctcatggaattaagtttttttttttttaaaaaaaaataatttaatagaaattaaaaagaaaaattaaggtcttcaagactgacaacttagttttattttatgtattctttacgatatttttatttgtattgaatttttaagatttttgtaagagaattttacaagtttacttactaatttttctaaggcgtcctaattcatattcttaattataaattatcagtgcatacacttaagtttgatagtgaactagtttaaatgatttctccatcatttttttatgacatattactctcatattatttttcaataaaatatatgttcattattctaaaaaaaaacatagcctttgttcttggcaactcaaatctcttggtgaggatccattgacaaccatggataccaattccaaaggagatgatgtgagaaggagatagagatgaatgaaatatagtgtttttttaatgaagttttattttattatttgttgtcatagttttttaatcaattaattaattaattgtattttgtttaaaatataataaattaattgatataaattgaattgagtgtagttttgatgagaaaattatattgtatatccactttactttatttgttttaatatttacctccattttcatatttttttagatatacccacttttatagatgatgtactcattaaatctcttaggttaatataaattatatactagacttaagacttatgtacagagcatggtatattgggtaactcacttataaaagtgggtatattataatcaaatataatatgaaagtatttttgattaatagatataaaaaaaaatatatttttcaatttattcttatagtatttgaaagagatattgaattcatacatacctaattttatgtatgtattg

SEQ ID NO: 67837 - DNA, 813 bp, Cannabis sativa
tgcatgtacttccttccttctacctcctcaccacgagaacttgctttctcttctctggatcttggagcagaagtctcaaactagggtttattctttaactcttctcactttttctactctatgtgtatttttgcctttgatttattgtttatatattatgttgaagtcagttgatcaaagatttgggagttagttacaaagaacagttgtaactaacttctggttcttggtctagtagaggcaaagccacctaggattgaatctttttgtttttctgttgtaaatgtgttgatatatgttgatgtggatattgtaactaagggactggttataagtagaatttacttaacagtagctatgtcgttatggacctcactgcgagaagattgtctctttttatttcttgtagaaagagaagattggccctttacaaagcttgaatcttactggcttttagcctttttgctaaccttgcagaaaagcacaacattgattaacattgattaccttattcaagatatgagggttcttagataccacttctattctttaggtggtgtgcgtgagcattgctattaggtactaatggtgtctagcatcttttaaacatgtcattttgcgatgggctaacaatactccctaaaaattattacacataagaaggtactaatcactactggtgccttgcatttctcggtgtgtgtgttggacaatatatttataatttgtttattatttatagttggttaggtaatttttgcaataaagctaagaccgtttaagcgtgcatgtctaaatgtaaatgtaaataat

SEQ ID NO: 67838 - DNA, 899 bp, Cannabis sativa
  modified_base (212)..(216): a, c, t, g, unknown or other
ataagggagtcgttctacccaaactggttagcgaatcccgtactcgtgcccaaacctaatggctcatggcgcacatgcgttgatttcactgatttgaataacgtttgtcctaaagacagcttgccacttgctagcattgaccaacttatcgatgccactgcaggtcatgagcttctcagcttcatggatgcatactcgggatataatcaaannnnnatgtatgaaccagatcaggaacatacatcgttcattacagatcgaggtttgtattgttataaggtaatgccctttggtttgataaacgcaggtgcaacatatcaaaggctagtcaacatgatgttcgcagatttgattggagatattatggaagtgtatgttgactatatgctcgtaaaatctcaacatgcaaaagaccatatcaaccatttacaagcaatgttcgaaattctgcgacgatataaaatgcggctgaatcctcttaagtgtgtctttggagtcggttcagggaaattcctcgggtttatggttaatcagcgaggaatagaggcaaacctcgcgaagatcaaagcattagtagaaatgcgatccccgactaagccacaagaagtccaaagtctcacaggtaaagttgccgctttaagtcgttttatatcacgatcttctaataagtgcaaagagttttttcagatcttaaaaggaaacaagaagttccaatggactgaaaaatgtgaagaagcttttcaagcactaaaaacgcatttggggcagcccccaatattgtccaaacccatgtttggagaagtcttatccatttacttggctgtgtcagaatatgcgattagctcggtactaatccgcgaagaccaaggtcgacaatacccggtgtactatgtcaataa

SEQ ID NO: 67839 - DNA, 812 bp, Cannabis sativa
tatatatatttatttcatcaaataaaaatagtacaagaaaaaacattaaaaaaatgcataatacacaaaacatcacaaataatgtaataaattgaagataaaggcataatatatcaaatatagtagttaatgctagattatacttaattttctctggtatcacagtcattagactcattattatcattgaaattttctacgaagttggaagcatctagatgagttgaatcattcataggatcatattgttcaattaagttcacttcattttccttttcaattaagtaactacttggatggcatgttcaatgtgtccttggacatagagatatacattctaggggtggttatgagtaactcatcaaattcttagacgattactatagatatttaacttatgccagaaatttgaaatatttgaaaattttcatgaatttctagcaaagacaattaagaaagtcattaaaagatcttgcgaactgataggggtgaaaaatatttgatatgcagttcaaatatcatgtaaatgaacttcaaattgtaatcaaacttacctccttaaagttttggagtcgcatattgataaaatgattgggtctatgattagttactagaagctaagaaagtcttttaaggttatgtccataagaaatagctagaacttttgactaaggtttgcatgcttggtggctattctaaagtgactaggggtggactacactatggtcatcaagactagtaagtgtttgtttacacaaatactaattttctagacgttaaatacataaatgttttggaaattattttaccag

SEQ ID NO: 67840 - DNA, 589 bp, Cannabis sativa
aatgttgatgtaataatctttttaaagaaagacacctctctctagaaattttgagaactgcttgtctagattggtcttctagagtctttgcggatacggtatcttcacatgatgatctatactgattggtggagactcttgttgtggtgcaagactattagtagtattcttctctgttgatgttggagttggtgccggttgatctttaatttcttcttccactggttgtaccatatcaggcccatcatatctcttttcacttcgcagggtaattgccttgcagttttctttaggattaacttcggttgtactaggcaaatttccttaaggacgggttgctatctgagtggccagttgccccatttgagtctgtaagtccttaatggaagatctagtctctgtcataaattgcaataataaatcagtctgaagaccagaattcccaccagagctttgttgttgagtctgttgttggttctgtttctggttttgattttgttgttgatagaacccactattccttcgattccctccttggttgaacccaaagttgttgttttgagagtaatttccaatggcttttgcttca

SEQ ID NO: 67841 - DNA, 720 bp, Cannabis sativa
ccatttatctctttaaaataaccacttatcttatacgagttttatcaaaacttctaattttttttcttaatttttttcataaaataaatttttttttagaaaaaaaaaatatattttaaacacgcatagtataaaaattcataaaatatgtaatttttatttttttctcataacaggacttaacaaaggtcgtattttgattggtttcatcatattttaaaactttattaattaccacaaaaaataatatctatttaaaattaaaatatacgagtctcttattaaagtgtatcaatattaatgtaatgtgatctcattgcttatgctactcaacaattattattattttttaacaagacaagagaagtttttcttcttctccatagttattatccaaaatatatataatcaacatatatcaaaaaaatcataattttgttcccctaaatgatataaaacaatagataatttcataatataccttgaaaaaggtcgtgtaagagagttttttattaattatgttttttttatatattatttattttagtaaatgattttttatatttactattggcatcttaaggtgctcagtaccatatgaatttggtacccaataattgaataataatttatttttttctattttgtgtttttatttttttataaataacctttgtactatttttttaaaataatttttgtgttattattattattatt

SEQ ID NO: 67842 - DNA, 795 bp, Cannabis sativa
  modified_base (93)..(94): a, c, t, g, unknown or other
  modified_base (762)..(764): a, c, t, g, unknown or other
acgaatattgtgacttagggctctataaattgtcgagcagcagttcaactcaggttgattggcacacctgaattcgaaatcaaggtaagattnntataatgatatgcatatatgattacatgtttatcgtgcatgtttatgatcgcctgttaggttacatgaaatagcggtatcagtatacatagagttgtattagataccgatgaatgtatgtttggcataagtactgattgactctatcacattcgtacgactagagtaccgagtttaggctgaaattatggtcaatagtattatcctataaacgttctacactcaatatcgcgtgggtaacagggatagggttatgattgggtgtataggtacctaattgtaatccaatttatatttatgttttgattatgcttttcttactgattttgtcaactcacaaatattgtttacatgtgtaggtaagggcaaagctaaggttgaacaatagtgagtgcaaacgaaagaagattgtacatgtcgaggctattagacctggagcgtatgatcttgtggacagtaggttgtattttgtatagtcactaggtgacaacttttgcaacaaatatctttatcacaattgtaaatattttaaatatgagatccgagctatataacatatatttatttttgattaaagagtaattaagcaaagttttaattaatcacaattttaaacaaacccgctaattagcaacagattgtatagttaatataaaatcacgataacannnctaaactagtagggtgttacaattcggtatc

SEQ ID NO: 67843 - DNA, 836 bp, Cannabis sativa
ccggttttggtgcggctgctgttgtagggctcggcgccttatctattgttcgattgatttgtaagggaactcagaagttggaaactctttagtgtatgtttgttagtgtgttatgagtgatacataacacaagagagtatgtaatgtttgttaagtgtttatgttagggttataataaagagaatgtttcacgaatacacaaaactaataaaaaaaatgtaaatttatggatgtaaggaattttaaatatgttcatgattttatttactaaaaatatagtcttttgatgtatttttaagttgtattcttgtatgatattttttattattgtttgtattttatatagttttcttgttgtttttataggataccgtaaaaatattaaaaaaaaatctttaaacgtaaaaaagtaatttatttttataaaaaatagtgttttatataattatctcaataatgaataattttgggaattttactattttgtatttgttgttatttaaatgttgtttagatcttatatttttgttattcttatatacttatcttgttgttttagttttatttttatagaatatagtaaaaatatatatatattaaaaaaaaaaaaacttgaaaaaggtaaattttttataaaaaaaaatattttatataattattccaataataaatgagtttggaaattttattattttgtatttgttgaagggaaggcttagagattaacgagttggacccttaattgcgagcctttatttattaaagggctattttcaaaaatatggaaaaaattattaaggttataataaatatggcataaaaagtaaataccacta

SEQ ID NO: 67844 - DNA, 721 bp, Cannabis sativa
tttaatttaagttttttttttctaaaaagaaataaataacatagtccagtctattcttaaaccaaacacaggattactttcagcataatccaatcaagtccaatctttttcagtccaattcagtccaatcctacgtaccaaacaagcctttagagtttaataaaatttcaagaattgaaaaactataactctaatgcctatttctaaaaatagagccccacgacaatataaaatcatatataagcataaaacactaataattaatgctaattgctttttctaatccataatctaatatgcagtcattacagagagagacacagcgaacggggaagttgaaatgaaatatgagattcctaagaaagtctcattcaactcgatcaaaggctttagccatgtcaagctttaaagcagcccaccctctcttaccaactttcctattagtaatggcatgaacaagcttgttagcaatgataatattatcataaatgacacgacccgagacaaacacactctaaaagggagagataatcttatcaagaatcaatttgagtctattagcaagggtctttgagatgactttgtaaaacgtagtacaaaggctgataggtcgaaaatccttcagtatattagcatgctgttttttggggattaaaatgattagggtagaattaacatcagtgaaatcaactccctgattgagacaatctaaaactgcatt

SEQ ID NO: 67845 - DNA, 1805 bp, Cannabis sativa
aaaaaacattctatcacttccgatcgaaaatatttgccacaaggaggataagattattagagctctacgagaggtcatcgcaattaatgaaaaaataaaaagagtagtagaggtgaggggagccttaatcaaatcaagagaaaagtttctagtgttaaaggatgtactgtcacatgtccttgaacttctcttctatattgatgacgtctggcaccgtgtctcaaaccttggcaacacaattagatacgcaacattcatatgtcaactaacgcttgacttccacaacttcatttttgaaaggacttatattatggaaacaaaaggcacagaagaagaacacgtcaagaacatacaatacaaattaagtgacggtagtatggaggacattaatgaatctgtgaacataacaagatttggaagaatcagaaattccagactattttgaggtgacagtagaaatgctagaacttgaactaaaaagcccaccttaaatataagcagaggaaatagtagaaataatagagattccttcagatgaagacgaagatgaggaaatgtcaaaagagtccaattagccagattactctccagtaccaaagagcaaggacttagatccatccacaacacccaatatcgatgaactagaagacgacatacctgattatcattttgaagtagaaattgatgagtcagactctgaatctgagaacacaacaccaccaattccagcatatgtagaaatggaaatagactcgaggaacacccaaaagaagaccctgaagaatccgaagccgagccatgcgttgaggacgaatagtagtctcttataacttgtcaaattttatccaaagaaaatatttttgttcctattcaaataatctagtgactatgtaactagagatctagtatgcttttaaataaataaatatctttcttcaatcaaattcttctcttatgaccgaagtaactccctacgaataaaaaaagtatgagaaagacaattcgcctctacttaggaatctacttttcactaaagtaatgttaattcataaactggaaataaatacttaaactagacaccaagaacgagaagtacaaaagaatgtgacatctaaagcagcacttaaaacaccagggtcactaagaatttggtgataccttcttaagttattcaatgcccagaggatggtgtgattgttcaaaaattaggtgaaggaattcattgtcaaactgtttatattttttcgtactccaactagtggaaggaagttaagacgtcctaaatatgacactaaactgagactcgattgaacctcaagattcggagatcaaaactattggttcaaagagctggctttcgaaaaatgcctatttcttaatacaaaacttgtgtttgatcctacaatcatgatagtattcaagagttattggcgcataaagacttaagagagactgaaagctttcatggcctaatatgtagtagcctacaccttgacaaacctcaaggagagtatgaaacaaaagatataaccaaaatttgtaaccaagaaagcaactatgttagtgttgctgcttggaggcaaggagaaaatgtactgcaatggaaacctaagatcaatagaatgacggaagcacaaactacaccacactagatgcatctcgagtcacttgtaaaatggtacaatgattaggtaagggatggataagtatgcagaaggtggcaattggattcatgattagacgtcctacatgccagcatgtaagagcatatcattaaaaactaataaacatgacacgacccttgt

SEQ ID NO: 67846 - DNA, 1163 bp, Cannabis sativa
agtatattaacaagtgcaattaatgatatttacactaaattaaaatttgtgtataaataagaaaaaatataaatctgaaaaaatgtgaatccgagatgtatagataatgacattaaagaaaaactcaaaagtagatttaatctttttttttttttgaaaattcaaaaaagtttattgagctcaacaacaacacttacaagaagttgtctatcataaatagaattgttcttaaaaatgtaaaagagttgtaaaattttcttttaaagaaaaatcccttatggatataattgtcttgattatattaatagaaatatctttcttgataaaacaaataataatgaaacatttacaataaaaatattactacataattttataaaatattaaagcaaaataatttaaaagataattatggaagaactatatttgttaataaattaatggtaaaagtacttaagtaatcaattttgttatagttaactaatagtataaaaaaattgatagtaaatttcgtaagtaaaattattttttgaaaaaatacttacaattcaaattaactttttaaaaataataattcaataataaaatttttaattattaatatcattttattttttaaaaaaataaatatattattaaatattattataatatgtataaatttttaattgtatacaagcagtcttatcgtaagagtatacaccttacttcatagtaaccatatgatctaaaattaatggtaaaaaatattcctacgataaggaacttttgttaagtcctaccataatcttgccatatatatatgaaaaattattagatagtgattatatttgctatttatatttatatgtagttttagtatttttgttattaatttgtaattttattatttgttatccataataaaaaaaaagtattttcatatcctagcaaaaaaaaaaaaaaattatattgtgatgtaaatttttttaaaattattatacatacagcacaaattaataccaaattccttcttcttcttcatggtttgaaagaaagaggagctcgtccaaatttgggcgtcaatggcgacctacaaaattctcaaccgcgtccgccgttctgttccagcaacctatctctctactctctctcatgcatatgaatatcccattctcaccaat

SEQ ID NO: 67847 - DNA, 634 bp, Cannabis sativa
ccgccacccttgtttaccaagaaaagagagattatagtctcgaagatccctgaagcccattcctccatcagtcttatgcttactcaatcgtttccagcttatccaattcacacctttcgaacccgaacgcgattgagatttccaccagaactttgccatcatgccttcgagattagaacagatctcctttgttaataaaaatacgctcatggcatagcaaggcaacgcttgagcaactgacttcaataaaacctccttccccgcttttgacaagaatcgactctcctaagtaaaaatcttctttttcatcttttcttgaagaaaaccgagaatagctttcttattgcgccccaaaatacaaggtaaaccaaggtaaaagctattatctccagcctccaccatccccatataatcacacagtctagcccgaatatccacagaacagatcttactgaaaaaaactgaggactttgagtaatttacctgttggcccgatgcttgttcataaacatggagaagatgcatcacatgtgtagctttcattagctttgtaatacacatagctatcatcaacaaatagcatgtgcgaaacacgaggcgcactcctggccactttacacccagtcaaccatct

SEQ ID NO: 67848 - DNA, 635 bp, Cannabis sativa
acttcagagctgtctttgcgtttaaatgggtgatacatgccagccgcgtctgttcacgactcgatgtgaggctaactgggcgtcccttcggttttcggctaataaatgctctgacgcaattaatattttgaaatctaattttctctcaccacggttgacgactgcacttgattgcttttgatttcacatattttcttttagggggaaccgaggcgtttaaggttcttttgaaatgattaccccttttcgttgtttgcctataaataccattgcgcatctgttcacaaactcattttcaccaaacttgtctgctaagtaagttcagagcgaaaagagaggtttttaacttcgagtttgctgaagtgttttctcaaaaactactcgttgagcctggcgtaacctgaatccaaacgtttgattcttgagtaagttctcgatttctcttatgtttacttcgcacatttatcttctgaatacacttttaatttcactgtagaagatatgtaggaaaccctaagttttgaaactctgtaattttcctctgtaacgatctgtgctacttcatcattcataatgcttgttttttgaactacataattcctgcttttcattttgcttattctaagcttcatgaa

SEQ ID NO: 67849 - DNA, 1883 bp, Cannabis sativa
cgtagtcatcaccttccaccaggacgtcgctaacctcaaacattggttccccggcctcattgtagcctccgaagcacaaaggccgagcaaccccttcctcctcagccttagaaggactatcaagacggacttcgccctgatcttctatttcctggactttaacgtcccctcatagtcatcctcctcagcagcggaccgagcctgttcagcattcgacattgtggcatgtcgtgccacgtgagggtcagtcgcagcaatctttcgcatggtttgttttgtgcgggccatcatcctttccctaggtggaagttggttggtatgccgtgcaacaatcacgatagaaagtggcaatgggaatgccaaaagcacaagaacttggacggtccacatgaatggtatcagctacgtctggctggacgatatatgtctagttggacagcaagtaacgtctccaccccttcctgagttcccagatgaaatgcccgtaaccttcgcctgcaatctgctcgggataaaagtggtgctgcacttcgggttttggggaaggtgtaccctcactgctcacttcccagtcctcaaaactcgaattagaaagtccgtcactcaaggaggatggactagcacgaagacgaggttgatcctcatacaaaagttggagaagatcctgatcgatatggtgttctcctccccaaaactcaccagagttcatctacaaagataagacacaagatgagtatttggccgggataacgaacaaaaaacaagcaaaacataccgaccaggtccaatcaaaagattaaagagaggaaaatttcgtgtgatttaggttcataacccaaaatttcaaacctcgaattaagggttaatcttcactaaacctcgaatgggcaaagtgagacccgaatatcgtgaagtttaaattagaaagccacaacagtcaagttatatgattcattacagtcgaagtatcgtatttctaaacattgattctctacagttttcttagaacaaagtcaagactattgaattttctataatggaaacccaaaaaattaaagattcaagcattaaaggagaaaaagataagaaacttactcactgtttgaagctttgaggttgctcggatgacactaatcaactctttttattataaattccacgaaggattcgagagagaaaggtgtttttgctctgaactcattaaacaaggagaatgctacaaatagtttattaggacattttgccctatttataagcagattagtgaaaaggggcaatcatatcgaatttcaaatgcctcgattttcccccaaaagtaaatattgggaaatcaaaagcaattaagtacttggagaagggtaactgtcaaaagcatacgaatagttggcgtgtctcgaggtacgatttaattagagcattaattagtcaaaaattgaagggactcttggttagaattacatcggatcaccaacaggcatatcgaacacgtgcctcccgttcagatacggaattgagatgagtaaagtctacacgcgactttggaattcccgtgtagacttgggggcaaatgtttcccattttttgcactatgacgtggcaacacatactggtgacacgtggctcctattttctacatatggatgaagagatattccgaacagagctcagtatacatctgcacaaatagagtctgcctggacgagcagggcaagggtagacaatcctaacaatgtatcaagacttagtagttttaagacttacatcatgaagcaaaaaatcaatcctataatctagggatcgtatcaaagggttatgacaagctgtccgaatccctcaatctatgtattctaaatatgtaatactaattatagatattgtaagca

SEQ ID NO: 67850 - DNA, 2260 bp, Cannabis sativa
  modified_base (2073)..(2092): a, c, t, g, unknown or other
aaaataatagagtgccacaccacagctagctcggacgcacatgtgtgtggacaaaactgagtacccaaatgtcaaaatttcactctatatatccttataaataaaagttcatgtttaatgtgggactctttccacttcacacacaacacccactacaacactcttatattttgttaaacgattcatcaaagttccaacactacctgtggctctagcctccgcagcttgaatggccgccgcgtcaatcttatccaccgccttatgcccaagggtctttgccgtcgcttctagagcttctcctatattgttattgcacacgactcactaagatcatcatcagcaactgatgagaccgtccgctgctgttgatgaccatactcactaacaacctaattaataatataaaaagattaaaataaatcaattaataatttcaaactaaacatctatataattaaaatggatcgcacctgcccaccgactgatttgttgtcagtgacgtcagtggtgctctccataatctcgacaccttcccctctagccaagttggagacgtctaaaccgttccactgggcctggctctgtatggtcgattgtatcttcatggaagtttccatggaaatgtcgtcgtatttgacctgttcttggtcgccttgagacctacgtggctgttcttggctcattttcttctttcttttaatttgggttaattcagtttataagttgtggcttttgtgaaaatactacgaggcagcgatatatatagcttgttagtttttctttttcccctgaattgttaaatttatatgaacaagataagtgtgatattaacttaatttaatattaagttttatatattttattttaataaataatataaaaattcgttaatcaattataataattcaccgagatctgatatttactaataacaatattctaccggtctcttttaaatatttttcgctcgttattattgcatagtttttcttttttttttttgtccttgattgagtttataaatacgtgtgatgaggctagggctaacacctgggaagtgaagaactgagatgcagtttggttttacacgttagattatttgtaaaggacacttgcatgcacttacacatgtgctctgtccgcatttatccaaaactaaaggataatgacattaagatcaggatagttatcttcgtttttagaagtatcaaaagcttccaaaagtactctgatttgtgttctcaacaagttttatttttagccgatgtttagagaatgagcttcataaggaactaagaaatagtagtcaaacgaaactctcatgtataaaagttaagattgtttcccctatgccattttgtctctaacaaataggacaaaaaaatatcattggaatcttacagatgatttattccatcccagccattcttaggtgatcaacactgataaataaatggttgatttaatatagtgttgatatatgatattttaattaagaggtaggcatttaacatttcagatagtatataagcgcagtcttaccaatatatctctttaatactaaaattcaaattaatgaataatgtataccatatattgagctaattaataattctattggatagaacactacacatatggattaaaagtgataacttccgggtaagtaatataatgccatctgtaagtgcaagcgtcgcccatgaagttggtgtgcaagtgtcctccatggagttgagagttatcaccaaattatagaaaaatgttaaatgtatttgtagcattaaatattattacaaagtatcataatattaatatatagtattaaattttaggaaatttatatagtatactgatttttgttatttttttacaaaaatattattaggcggtattttttatttttttgctgtgtattttttataagtttcatactgcaatatactgtgttaagttttcactattgttatactggtgttttgtagttgttctattgttgttttgagttgttctgttttgtgttctactggtgttttataaaaacacagtattttaaaaaaatttccgtgtgannnnnnnnnnnnnnnnnnnnaacccaaattccagtattttttttaagttttcctgaaatttttaagggtaaatatatactattttggaccttgtgttttgcaaaaattattaattagactttttgtttagttaaatgataaaatagatcttatattttttaaaaatagtaaaagtaggacactgagtt

SEQ ID NO: 67851 - DNA, 1327 bp, Cannabis sativa
  modified_base (368)..(371): a, c, t, g, unknown or other
actttttgggggataagtttcctattctccttactcttgtttattttatggcaggataagccacaggtcgggcattaatctatgtgtgcatattccttacaatataaaatacagtcgttcagacatgcatggatcttttcatacttcaatcctatagaatttaaagtctttttcacttcatatgtagattccgagaagaaattgtcaaatggaaagatatctttaaaagcggctaaaaattgagtaaaacatttattgctcactctattttctgctttcatatgtaaaactttaacattgttggtaatcttagttttttacaaccatcaaacaggtgtttatctgcatcacttagaaaattatcgaannnntctggatcattaagaaattcctcctatgcttcgtcaagcaaatccaatggatgatcatcaaaatcattaccctcaatgtcatctacccccgcttccctaatgaatatgtatcagcagctaaatattcgccatgccaatatttatcagtataacttctattgaaaccttgtaaatacacatgatccttaatcatcataatatttcctttcgaactattacaataatctacacatggacaatgaatacgttcaaaatttctaaaattctttagggaaaactctataaatgcattgaactctacttgaaatcgtagtgtgtctctctcctcgagaatccataatttctccataacaaaaatcctaacgaaaaaatatcagtatttagtaactaattataactagttactacttacataatgtaacaaactatgtttctcacaattattttctattaatttatatattactataattcttgttttagtttagttcatgttattaaattactcatctcaaatattggcatgataactagtaactaattgttaatagttactagttatataagttgtaattaactaactagtttcttacaactagctagtaattaactaattatttatgtcatgcgtaacactttttctttaatatttatgtatttttagtaaaattaatcataattctaccaaaattttgatagtataacaactataattggttgttcgcaaaatttttaaacatgcctaaaataacaaacaaaataaataacacaatacaaaaaaaattaaaataatattaacaatacaaaaattattcatccatccgaccccagtatatgtattcacataacctaattcactatagttgaatatttaagacattcaaattcaactagcatgcatattattttactcacccgaccgcagtacactatattgcaaaacctacttcactatg

SEQ ID NO: 67852 - DNA, 781 bp, Cannabis sativa
gcacagattcaataaatggccacttaactctataatacgccttactcatatcaagtttgagcgccataaaaccatcctttcccaatcttttcctttttaagtaatgcattatctcaaaagacaccatgatattgtccggaatcaatcaacctggcaaaaaagcactttgagtctctgagataacatcaggcaaaactactttcaatcgattagctagaaccttggatattactttgtacaggacattacatagtgatataggcctaagatcagtcataaactccgcgttcttctttttaagaataagaacaatattagtttcattcaaagaaggaggaaaataccctgagtcaaagaacgaccgcaccaacaaccttacatcgtctcctacaaccggccacaatttttgaaaaaatcccggtgtcataccatccggtcccggggacttatcaggatgcatctgaaacaacgctctccttatctcctcatcagaaatcggctcaagcaacatagtgttctgagcttgcgacacaacacctgacaccgtacccacaacctcttgaacttccaccaaacccggagtaaaaagctgcccaaaataagtagtcatcaagtttggaagaccatcctcccaagttacccaaccaccatcaacgttccgaagcttatcaataagattatttcttctacgagaagaagccatagcatggaagtattttgaattctgatcaccttctctcaaccaaagttgtttacttctttgcttccaaaaaacctcctt

SEQ ID NO: 67853 - DNA, 1364 bp, Cannabis sativa
ctccttctcatgagtacaacccttctgttccccattcacattaatgacactactattctaatcaccttcaaaggtttcactaatactaggttgtgatattaagttgccaccattggtgtcactagcatctacacttgccccttgaactacaacctgtttttcaccatcttgactacacgtccctttgtccgtgttcaagtcaattttctcaacctttttcctccccttatcaccctctgattgcttatcttttttcctacaatctgccaatatgtataccccaaacaatgcttacatgtaaccagcaaccattcataatcaatttcctgctttacaagttgtccatgttcattcaaataccaaaaagagtgttctggattattagttatatccatttcaacaagcactctagcaaattcaaataccaaaaagagtatacatattatcagttttccatgttggaaatgagaaatgtgaaattgtcaatttgacttttctgacttcatggatcttaattattgtgaaaaactagacggatggtcaaaatggaattagaatcggataaacagaactcagcaactaggccatttgtcaacctaggtcctaggtacttcctttttgagctcttagattgtcattttgataattacaaggttcttcaacttgaggacgacgtctcccaccccattttggagcattccaaattcaatggtccaatcagattcgacatttgaatgattgaaaccaatgcaccaggttgattgtcaaccggggcactaggcccaacactaggtcagcctgcgcactgacccctatttccaaggtatcgagattgtagttttctccttaattttcttgaatattctttatttttgatgataaaaaaaaatgcttggaacacttttttaagaacttgattggaaacagcctaggctgacaatatgtcaacctgggccatgggcgctacgtcccagttttagcagttctgtttggtctctaaaaatagttaaatctaatcttttctaaaaacagagatgattctcagaagagttcttagaaaatatcatcaaaattggcccatattgaaaaaatgtcatcctacgcgttgggccagccccaaaagtgttgtctctagcacttaggaagtgttgtctcttccctaaaagtacctatttgacttcttttgatgaagatgatgcaaaatttggatcgtcgatctgatacttggaaggcgcatagattaacaaatttttgaaaaatgaacttgctccgaatctgattctgatgcctcaaatacattcgtggtatgtctagttcatgtcccaatgcaaagtttgatatattttcactaagacggtcctaga

SEQ ID NO: 67854 - DNA, 1059 bp, Cannabis sativa
  modified_base (1008)..(1019): a, c, t, g, unknown or other
tcagatttcttgatgtctctaactgaatgtacaatgtttaatattgatatcaattgaaacaacaattgtaatatttcccataaaattctaatttgagtcgaccgaaggactgatacccgagtccccttgagtcataaccagcacttgggcaagacccgtacacttttctcccataacatcagtctttcttaactacgggtaggttcttttcagatgacctactaccccacaataaaacaagatctggctctacattggttcaaatgacgcctttttgtatctaaacactcaggataaggtcaccatttcttattctcaccttgaccgctatcctgaccaccctagaacctttttgtcccgtcccataattggcggttcatttaatttttgtttcatgatctactaataaattggcttcatatattccaccacatctagtggtacaataggaagtgtcggtagtacaagaacagacacaagatgagcctattgttctttcagatgtcggatatgttttcccttgttgtctaatcatatcttgcatattagcatttacatgttcccagcattatgggaataaggaattctcttccttaccgtttgccctgagcctagatagctcgctaatcaaactattcgattgcccttactgcataacttatcacacatttagtctaaatcttctgaccgtttaaaactcagacggatatcaatatcaatatgaatataccatacacctattcttatcaaaattatcactatgctatttttccaacatactttataatagcctaggcaggtaatctaatagcatataatataaacacttactataccatgagtcgacctgtgctcgcaacaaatgtacatattcgaccattcttcaagacctttaaaaccacgactgctctgataccaagttgtaatggcctattttacagggacgccacgtgtgtaattataaactagttcaatactaatagaataattaattattaaaaaccgtgnnnnnnnnnnnnacttgactaaaataaaatactaaaaatggacattctaacg

SEQ ID NO: 67855 - DNA, 525 bp, Cannabis sativa
tctcacctataccatcaaatggctgaataattatcatcatttcattatacattcaaagctgggtctaacaacatataatatgactatatttaaaatttagagtttcaaaacctcacctaagcagtgcatattaactaccggtaacggtagaaattagtgtatcgaaaatgtcattaaaaatcgacatagtatatatcaaaacaaccacatcaacaagtagatcacacccatgccaaccatttgtcaaaacagtacacgatattaccgaaaagtcactagaaaggggcggagctacaaaaatgtcaccgaaaaaaggagcgggctgggaaaaatggcttagtgtagattgttctcctcgacgagctgaggctagtggtgaagaagactcatcaaacagacaccagaggtggccagaaaatacattcaaagtttgaacctccaaactttgacttgtgatcccgggctaacgccggttagggttgaggttgccagcacttgtggattcgaatgttctagagcgtgggg

SEQ ID NO: 67856 - DNA, 797 bp, Cannabis sativa
tgcactgccacgatatgtataatcactgccaagctccaactcactgctcatccagcttagctttccccttaccaacacgaggtaacaaactgataagtggacagactcaataagatatgcttaaatatatgaaagcaatgtattccgactttatgcttaagtcgtcccaagcccaaacaccgagctcaccaattagttaagaacgttcttaatggaagttcgaccctataccatatgccctaaagtaccaactccatactcgtattggtagggtctttattgtacttccgggagttacgaagtgttgtaccacatgcacgacgtaccccctggtactcgtgttggtaacactgtaactaccctaaaatcctacactgtactaacacccttaaaatcacaattctgttagtgttagtagtgtaaaccattagtaacaagcatacattcacacatatattatttatgttatcttacctcgcttccttgctcaactgtgccagtcagcctgagtgaaattacagcttgacgtataacatttgtaatttcaatgagagagacgctaaaacacttcccggggactttaaatctaaaaataaccctatcgacaattagaatggtaatatcccaaataacacaaaaacggggaaaactagtgttctgaaaaatggcccaaccggtagaccggttcccaaccggaagtccggttcctggggaccaactggtcgatcggttgttacaggctcccctgaatcgatcgagcggttcagtgctgggaacctcaaaaatgttccccacaa

SEQ ID NO: 67857 - DNA, 1397 bp, Cannabis sativa
ctacctttgatggaagaagcaaaatttgactccagtaagtatgtatggtcataagaacagagctaatcaacacacttctccctgcgaaggacaaggtccgagagctccatgttttaattcttccagtcatcttttcaacaagaatcttgcactctgttgctgaaattttattggcacatatagggatgccaagatacttgaaaagtacctcttgcttagtgaaacccgagacactaactactctttgaatctctttctcctccatgtcactacaatagattgtcgatttactattatttggaagcaaaccagatgtctgagaaaacagtttcaaaccctgtagcatgagatgaatactgctgaaatcacccttacaaaataataatacgtcatctgcaaaaattaaatgtgttagcttcatggttctgcatctatcatgataactaaattccttcttctttcccactactcccattattctgctcaaatactccattccaagtacaaataggagaggagacatggggtcttcatgccttagccccctcttagcttcaaaaaaaccatgaagagagccattgaaaagaagggagaacctcggagtagacacacattgcatgatcaactgtatcaacttcttaggaaactgcatagcaattagcatctcctcaagaaatccccactctagtgtatcatatgctttttgaaggtctaatttaatcatacagtagggccttgaatgcttccttccataatgccttagcaaatcttggcatatcatgatattatgggcgatatatcttccttgaacaaatcctccttggttatgagcaaccaagtcaggcaatatatgcttgagcctactacaaattagcttggtaataactttatacaagacattacaacaagcattgggtcagaattcactcactttgttagggcatttggtcttcggtatgagggtgagcactgttgagttcacttctttaagtatttgtcccgaatgtaaggccgatagaattgcttctgttaccaaatcccaattatccagaaaaaaggagctgctaaacccatccggtctaggggctttgatccctgggatactgaaaatcgcttgcttaacctcctcttttgaaaatatttcatcaagatatttggcctgctgactagaacaacaaggcccaaagccaccaacttcttcttgacctccttctatcttgtaatcgggttcccaggagatttttgtaaaaaacagtaaaagctttagtaatctcagcagggtgttcaaccctttctcctgccatatgttgaattgaaatgatattattttgggtccttctttctctgatgtatgcatgaaacattggagaattactgtctccatcttttaaccatga

SEQ ID NO: 67858 - DNA, 688 bp, Cannabis sativa
ttaggatgttaatgaaacatatatggtagtaaatctagatcgtagtaaaatatttccaacaaataattcattcaatatgttatatgaccggttctattttagttataaccggtttgaattattttgtattatttatttttattcattgtaacactgttatagaacttgttctattttaagtataactggtttgagttattttgtgttatgttacagaaccgattatattttaattataactagtttgagttattttgtgttatttattttattcattatattatataacatgttctatttttatttatatttgagacatctacttcttgtgacttttccagtgactttttcagtaatgaagaccttttcggtaacttttttgggaactgttctaataatagtggctttttttggcaacttttctggtgacaataacttttctggcaccgatgactttccggcacctgcaaattctctggcaaaacttattattgttttgacaaatatgagatttctatttttttttacaaaaatatagtacaaaaaaacccatataaatgtaaaaaattaaaaaaatccataacctcatgatattatttccatatattgtctaatttcacttataattttgaaaactcgccccttggaaaggcatatatgataagaccataatagaagcccaaacatt

SEQ ID NO: 67859 - DNA, 1202 bp, Cannabis sativa
gaataccttaaattaagcattgtcaatagttcgaggggaatttttaacgtcaaaaatagttcagggggcacgatttagcaagtgtcatagttcagggagaaaaattacaaattagcctaatttttttaaaagaaattatgcaatggactaatacttgagtaacacatggcatagaaatattctcagttatatttaagagaaaagtaataacgagagtgagtaaaactaaactttgggttaattttataaaaatactgtcacacgaaaatatttttaaaaatactgtgtctttataaaataagaacacaaaacagaacaattaaaaataacagtaaaacaattaaaaaattaacagtttaacaacaatgtaattgtcccatttaatatttatggcccaaatattccaaaataataaggacaaatggatttgacagttttttctacccacctaattttttcaaattatattgttttcaaattgagttatcttgtcgagtaccgtgccacattgtcaccttaccaattaatctaacttccctaaaatacaattagaaaaatcaaacactaatagcaccaaataacatcactttcatatcttagttattgttcttatacatatgtacgtattttgttagataatcatgctattggaaaatgtgacccactaatagattgagtgtttgaacaattcttcattttaacttaacctaattaaattaaactaaataaaattgcatgatttatttaaaaaaaaaaactaagtaaataaattaattgaatatgtcaatattttctatcttctccttgccgccccagttatcaatgttattatactatgaaaaagtaacatttattccttaaagtttgaccgttggttctcatataatatttgtcaatgttattttaccacaatctaaatagtatattgaagagaaatgttaaaagacaccagtagtgttaaatacttttttacgtgtaaaaattactattggtctaactaagtatcgagtcatatataatttaatataatagcttttaatgagtatcgctagccaatcgcaaggcgacacgtcttgaaggtgctagacaccactggtacccaataacaatgctctatatttaattctcaaacatttcacagaaataaacttcaatttttctttaaaagcaaaaattataattttgtttagtaagatcagtct

SEQ ID NO: 67860 - DNA, 595 bp, Cannabis sativa
ctagtggcaagtgttgtattttgtgtgtggggtttctttagaatttttgttttcattgtgcattgcataggtcccataaagatcaatgtgtttagggtggtttgaaccaaaactaattttcgttatcctaccttcaccctagcctatcattacaagcttggcaaagtcctattgaaccttggagtggtatgtgtctacattagtggataggaagttgttaggtaacctatggaggcatcatttgaacttgaggaccaatgtttagtttaaatgttagttgatcgaaattttttaggaaaagctatgcttacataaaagggaggaacacttgatacctattttgggcagcaacatttagacttaaagattctggtttaaagcttgagtaagatcctcattcagtttatcttttgcaaaatattattcctgagagctatttcgcctaggcgtgtgcattgacaagataaattgcatcctgttttcattgagtatttttgttcagttcatttcttttgtttttgatttctattaggctgtatgtttgtctagtttttgtggtcttgttctcatcactcgaggacgagcaatgtcataa

SEQ ID NO: 67861 - DNA, 2335 bp, Cannabis sativa
aaatattaactaggacataatatcgggctttgcgcgatttttataacaattgataattatatatacttaaaattattttatatattttttaagatttttctattttttaaaaataaatatatattttatacttaaggttacaatttctattattattatttaaagtgaatatctatataaaggagagatatgagacggtgacgtgtcactctaaaatctctttaattagcattaattgttctctccttaattctctcatattttttaaattttttattagctttataaatattaactaggacataatatctggctttgtgcgatttttataacaattgattattatatatatttaaaattattttatatattttttaagaatttttctatttttttaaaataaatatatattttatacttaaggttacaatttctattactattatttacaatttctattattattatttaaagtgattttactactatttaacttcatgtttatggaacaacttaaattattataatattaatctatatattgttatttttttttcttggaccattgtccaataaaatcatgtttatgaactattaccgatattaaataattgtgcccattgtaatatttaacagataaaatagcttaattacatatcatagttccgaaaaaaataaattagatgtttaataataataataataaaatgtctaaatacaatacagtttttttttaaaagaattgacatcgtatatattattttgcccaaagccaattacctgaggatgatatcattgactctgttttatctggcatcaatgagcgcctaactgaggatgaagttggactccttcaggccactttttctgcccatgaaattaagaaagttgcattccaacttgcaaatgacaaagcaccagcagggttagatggattcaatagttgtttttttttttcaaaagaattgcatttgttgggggtgaatgtcattaatgctgcccaaagcttcttgaatggagatgcggacattgccgcgatcaacaatacgctcattgttcttatccctataaaaagccaaatcctgagcagattacggactaccgtcctattagcctttgctccacgatttacaaaatcatatctcgggtcctggtcagccgtctcaaacccattctaagtcgcataatctccccctctcaaagtactttccttccaaaccgattaatctcagataacattatcattggcgaagaggttatgcattccttttctcaccgcaaaatgggccgccttggatggatggcactaaagcttgatatggccaaggcttttgatcgtgttgaatgggttttcgtccgtcgagtaatcgagaaattttcttttcctcactgattcattcaccttgtcatggcttgtgtctctactgcaactttctctttctccattaaccagcaggttcttgggcatgttaagccttctaaaggaattccccaaggggatccgctatccccatacttatttcttttatgctctgaaagtctgtcctctctaatttgtctcaaagctcaacaggcccaaccccgcaaacattcacttggaataaaaattgccaggcgtgctccgactatctctcatcttttcttcgttgatgatagtcttctttttagttctgcttctcctaatgctgcggctgtcaacaagcaaatcctacaagactatagtctggcatcccgtcaattggtaaattttgccaagtcgaccatgtttttttctccaaataccagcactgagatcaaaaccagtatcaccaccatccttggcatccctgttagagacactattgataaatacttgggccttcctcaatcttttgggagaacaaaaaagaatgccttcaactacattaaagattgggtttggtctcatctaaacaaatggaattctaagctttttttccaaaggaggtaaagaagttctcttgaaattagtagtccaggctataccctcctatgctatggcttgtttcaagctccctgcctcttttcactctaagctcgaatccatgatgcctcggttttggtggggaggaacggagcacaaccgtaaatccattggaaaaattggtcttccctttgtttttcaaaatttcatgggggtctcgattttcgctcaatgaaagctttcaatcaggcgttgttggccaaacaagcttggcggcttcttcagtctcctcactcacttgttgccaccttactcaaatctcgttactttccaaatacaaattttcttgattcgggaaagggccatcgaccttctcttgtttggactagtatc

SEQ ID NO: 67862 - DNA, 630 bp, Cannabis sativa
cctattccaacattaagaacacaaactcacttgcattagtataaaaccgatgcaaagtaagatttttttttcttgtttttaaatcgttttttgattgttctttcggtgttctattggctttttttaaacagttgttttaatgtgattgttcagttgttttagtgttgtttaattttattttatagttaacactttttctaataatttcatgttttatagattgttgtttatatgttttttttcagttgttcaacttttatgctgtttctgtctgggtgtttataaaatgttgttttgtggtggtttttggttttttcaggaagatcagataatgttgctattttcatattttttttaaaattatacatttagttgtttgaattttttgcttttgattttttttgttatacctattttcaggttcctcttaagagttcggacaagtttgaagacttcgatattcccaaaaaagtcctcctaaggtgtgtacttttgtttctgtttttttttttctagtacatttctatttttgttacttttgtagtatattgtattttagctttatagtttttttttattgtttttgtgatatttttgttagaactgttgtaggaatgggattacatatat

SEQ ID NO: 67863 - DNA, 821 bp, Cannabis sativa
ttttattatgtgagggaagagagggtgataaacataataagtttagaattttgatatttttggcatattagttaataatttcttttgatattttatattagttaatattaactatatctctctctgaaaaaaaaaaaattatatgtaaattaatattttcaatacatatatatttattagctattatatacaaatatatagttaattttttttttaatttttaattgaatagtgatctctaattaaataaagcagaataaaaaaatagaaaaatgagagaactaaggagagaatttaaagtagaacaaaaaaattagaaaaatgagagaattaaggagagaatagacaattagaaattttacttttttaataattaattaattatcataaatttaaacataattattaattataaaataaatagttaatttttttcttaaattatttattaggggtttttttttatttttacacttcaaaataattttttttatatttttacgaaacttcacacagaaatccctatagcaactaacggagcaacctatatcgcaactaaaatccacatagcaacccacacggaaaccaccgcagcaaccccaaacgcaaatttaacaaaaatattaaaaaaatatatatatgaggtaattcccctatttattattaaggtattatatatattttaaaaatgtaaaacttagaaaatatatacctatgtaaatctaaaaaaaaaaattgttgtgtcttatgttgataaataatttcttttagttagatatatttgtttttattattattattagtttaattggagttttttt

SEQ ID NO: 67864 - DNA, 1511 bp, Cannabis sativa
  modified_base (1476)..(1476): a, c, t, g, unknown or other
tgacttccttaatttcacatgcatagatactaattaattaattaatcttattattaatctaattgataatatataaggaaatttcttatttgtaattatttaattagttccttcgttcacatataattaatatattattattattatgacaaataataattaatcatcctagctatatattaattaattagctaagttgattatccaaaactagacgtctataaataccatttatatacaaagatgtttaattattattagagagaagagatcgatcataatatttgaattattatcagaaataaagagagagagagagagagagagagagagatggcaatacagatgaacagcttcgttggaatactcacaatatcatcttgtaagtactctcatctctatttttttctacatatatatacataattaattatatatatatgttaaacatttttatgaaagatcattatgattgatgagccttcaaataatgtaataatttctcttattattagacacttatttgctcatgattttgctttccaaagtttctgtggatcaagttttgaagaattaatatatgtaaatatatatactcacagctataggattacaaatattcatatatttatatagctaatttttaataataaatttataaattaatttaaattacagccaaaattagagatctggctctggtataagtgggctagaacttatttagtataaggttcaaattttttttttcttcttcttcttttgaaaataatattatattatttttttttttttctaaataagagtttgaaaataatttttttcatatgacccactaaaattcaggttcagccctgctaatcactccgagaaatggtactaatttctacggaaagaagcttcaaacaactcatgattttcacaaaggaagtcatctccaacattacatgaggtattatatgattataattatttacatacaaatttaattaatatatatatatgtataaaagtatagctttaatttcgatacatactaaaactatatttagtttatattaattatgtttgtggtggcagaagtgagaagatgattgctataacggcaagaagcaggaatatttccccttactttacatttccaaaatttagtaatggttcgtacaatattaaacctattccaaattattaattaatatatttccatattattataaaataatatctataaattagttatatatatatatagttgttcatatattaattttgtaattttgtttttattcgcatgccattaaaaaatatatatttttactattaattagaaataaaattagtttgagaattatattaagttaaattttttgttatttaaatttttgtttttcgaattttgatatacaatagatcatcttattctaattttgaggtcattgaaattctctccgaattactaaggtggcgtttggttgnaggtaatgaaatggaatggaatgaaaaggaaacaa

SEQ ID NO: 67865 - DNA, 553 bp, Cannabis sativa
  modified_base (425)..(437): a, c, t, g, unknown or other
ttatatggattaccattgatccaaattaagccagtaagccacaatcataaatattgtagttcgagaggattgattattggccgacaactgtgtggcatataccatgcaatcgtaaatatagttatatatgtataagtagtgcttatataaatatggttataatcaatcaattaaaaaaatgtacgtcttgcatgttatgatctgccgcattaattctgtagataatttatcttacagcaatttgcaaatatataagtatacataacaaaacattctcctacgcgatggaagatgttcactacaaaaatttttatttttaatcacaataaaatttgtgattgaagataaaaaaattgtagctaattagaaattattattattatgttgtgactaaaaaatctgtagctaaaagtattagtcacaannnnnnnnnnnnnttgtgactaaatgtatttttagtctcgatattttttgtgattaaaactaaattagtaacaacttgtaactaaatactatattttagtcacacataacattttattgtgactaaaag

SEQ ID NO: 67866 - DNA, 3678 bp, Cannabis sativa
agattctaatttctccaattttttagtttgaattacacaaaatatagcagttatttatttatcaaaactctattatggagtttgatctatccatctttaaattattaaataattaaaaacaaataaagaaaagaagctgacttataaactcgagattagtttaatatacaaagagtattttaatttttagtttgtccaaaattgctactaaactttggagactttgattacattatttgttcaaataatgcaatatatcatatcctggaatttcaaaataggctgcggagcgattgaaaatgatagtttacttctgtcacatgtaagagatttcatttggtcaaacgattttgtttctcaactcagtatacaaattaaacaataatgtaaacagatatatcgatcaaatatttatatacaagaacaatattctacacgcctatatatcttgctgttaaacaattcttaaatttaaagatcatggagtcatacacgttctcattactgtttctaggcttgtgtttcttcctccctaattgtgtgaagccacaatgccatgaagatgagagaaacgccttgttgcaattcaaagagagtgttatcataaataagtcagtttctgaggatcctttggcctatccaaaactttcatcatggaagcaagaaaccgattgttgctcttggcaaggagtagagtgtaatgaaaacacaggtaatgtcatagtattgaatctcaatagtagtttcctttatggctctatcaactcaaccagcactcttttccatttcccatatcttgagaagcttaacttggctgataatcacttcaattactctccaattccatctgggttgggtcgtttcccaaagttgacacatctcaatctctcttcctcctttttcactggacaaatcccatcagaaatgtccaaactcaccaatttgtcatctcttgatcttagttttctgaatttgtcctctacagtacctagttttcttgccaacttctcatctctaagttatcttcacttaagaaattgtggagtctatggagaattcccagaaaaaatcttccatcttccgaaactcgagtttcttgcacctctccacaatcaaaatctcagtggtaaattccctgagtttcgatcaggtagtcctcttaaaacaatatggtttagtcgtactagtttctctggtactataccttattcaataggtaaccttgtttcattagaatttcttagcgttacaaaaaccaagtttactggtactcttcctacttcaatctctaaactaaaaaatcttacctatttagatttttcctacaaccaatttagcggtgaattccctacgtttctccaaaatctaaccaagttgacaatattatggttgggagggaaccagctaacaggtcaaatcccatcttggattggaaatcttacaagcttaaatgttttaagcttcgcaaaaaataagctgtccggtcctttaccgccatcactgtctagattaacaaatctccgaactctgaatcttttcgagaatgaattgaatggtactgtggatttcagcttgtttcttaacatgacttacctggtcgaactacgacttgatgataataatttgacggtgaccaccagagaaacggaggacatgaatatgactaataagtttgagatcttgggattgaacatgtgcaatttaaaccattttccaaatttcttgaggtaccaagatagactaaggtatttggatcttggaggaaacaatattcatggctcaatacccaagtggatatggaattcaagcgttgaaacgatggcgtatttggctcttaatgataacttattaacgagccttgaagtagcagacaacaacaacatgaacaacgcatcatcaccacaaagtgatgacaaggaatttcccttgttttgtaacctcaagtctcttcaacttcttgatctttcgaacaacttgttcagtgggttaacacttccaaaatgtatggagaatccaaacaacttgctggcagtactcaacatcaaaaacaaccacttccacggtactattcctcaactatgctcaaacgagggaagaaactcgttcaaaatggttgatataagctacaatcaattcgagggaccgatcccaagatcaatggccaaatgtttaagacttgaaagtcttaacatgggagacaaccaactctttgatgttttcccatcatggctagggactctaccaaacttaagactactcatactacgatccaatcgccttcatgggatcataaccaatccagtttcaagcttcgaattccaaaatcttcgcgttattgatctttctcacaacaatttcacaggccagtttccatccaagtacttggaaaactggaacgccatgaaagtaatcgagtcaagcacgtcgtacatgaaaacagaatcgagttttgaagctgttagacggacatggatgttggagtacacgtactccaccagcataacaatgaaaggtagcgaagtaccttatgggaagatccaagaagtacttgtggtgatagacttgtctagcaatagatttgaaggaaagattagtgaggcaattggaagcttacaagggcttagagttctcaacctttcaaacaacgttctctggggagaaattccttcgtctttggggaacatagcaagggtcgaatctctggatttgtcacaaaaccaactttcaggaacaatccctcagagccttgttcagctcacttttctagctttctttaatgtctctcgtaacaatcttacgggacgtataccgcgagggaatcaactcaacacgtttgagaacagttcgtacatgggaaacttgggcttgtgtggggatccattgactttgaagtgtggaactagttcaaaggataatttgagtgaaccggatttggaagaagatgattcttcttcatttattgactttagttggagaactgtggttgttgggtttgctgtaggagttattgttggagttattattgagaacaatgtgaaaaccaagaagagagaatacttatggttatggaagaagtctaattataatcagagaagactcgtcagaaaggtcgatgatgaggagactttagaacttaaatactagtgttttatgtgtatcccaagtttacacttcaattaatgaaatcgtacaacatataatatagagtgctagtttctaagttgtattagatgtattgtatttgtattttattacagtgaattagattatatattataatttttatataatattatattaaaatattatatatttagatttaatatcagatataattttcataaaaatattagaggcttttttattagtacatatatacaaagttttttattcatttttacggttctttaataaatatttcatttatatataatattgattttgtttttacaaaaatacaactcatacacaaccataaaaagaagcattacaaatattataaaattactttagtgttatatgattattatatatatagggcaagattatgataggactagtttcttactggtagagaagtttttctgaccattaattttagatcatgttgttattaagatgtaaggtgtatactcttaaattaacactgtttgtatacaattaaaactttatatatat

SEQ ID NO: 67867 - DNA, 631 bp, Cannabis sativa
aaaatttaaattataaaattatatattttatttaaattttattattatttaacttatttataattgataaatatatgtctattattttttttttaataaacatatctattattattaatagtaaattttagtgttttataatatgtcttgccatacttttcgaacttgtcttttgtcgtgtgttttggactagtctattcgtgataatgtatcgtggctttcatgttttttgtactttgttgtgtattttggactagtctattcgtgataacatgttgtgcctttcgtgtttcttgtactattgtatcgtgtcgtgtttatgtacatttttttgtgccctattatgtcaatttatagtatcggatcgtgtcatatcaaagctcttttttttttttgtatctagttgtacgtattttttgaactcataccaattttataccgtatcaaacaatccaacccgtatttacacgatacaatagaaataacatgagtgcaacttctacattaaaacaaaagatgacctggttttcaaaagaaaaaaaaaaaccaaaagatgaccaagaccacactaaaataaattaatatttaattttggccaaagaacacacaaaactaatcaataaagactagt

SEQ ID NO: 67868 - DNA, 1475 bp, Cannabis sativa
gagattgttagaaaaattaataaaattttaccagtttataatggttagtcttacattgtctgtaaatattttttcacaagttcaaaggctacacactctctaatctttcctttgtttgttctagtgcttcttttgccaatagaaacaatattccgttttgaattcatattatgaagtaaattaattagttttggtatgatcgatagtccttatattatgaggaatgaaggatgtgtctccaaaggcttttaatttgtgtaaatagagaatactatattatattactagtgagtgagtgagtgagtgagtgagtgtgagtccatcttagtcttaattaataatttgttaattaaaattttgtatgtcccaaccaactaagccacataggataagagtaagacccaccaccaaataaagacttctaaattagggtgtgtatgatgtgaccgcacccaaccagccgtgaatatatagataagataacattatggaaatttaaattaaattacaactatatattacataattcttttctttctttctttttttaaaagtaatattagaaaatatcaattcttaaactaaaggtttaatttatttttaataaataagatgtaacactaatgacattaatgtagccaaattcaaaagtctaaacaaaaactaaatcatagcatatacaataatataagtagtgtcttttagaaattttttattaaattggcattagtaccaactaatataaatttttgggagtcttgatttggatttgtagatgccaacatagcaagctgccaaaaaagaatttacattttagttcacaatatcgtgtgtatatgatttgaagaactaaaaataaaataccttaattaatttggacaaaaaaagtgcaaacaacaacaaattttgttcaatttaaacatattgtaattactagaatatatagtattaaacatattgaaaatagaagaaaaagatagaatatggtttgagaatttaagttaaaatacttaataagaatttgtgagattattgttatctggttaacagaatttgaggtttgaagtattgaagttcttatgtacaatatagtactgattggaataaaattgattatttacccaaaaaaaaaattaaatacataaattaataacattctaaattatgaaaatatgtactatttgcatttttagagtttatgtttgttttaatgttaacaaactgaattttaaacaatttaaagttgttaaataaatttttgcaatgcaactatatatacatgtagcttatagttacataaagtaaattctttttaaaaaatatagataatgtaattaaagggagatatatttgtaacgattataatctcgggaaatttttataataataaaactaataggataaaactctataagaatgataattgaattttttattttaaaataaaaaactatatatataatagtaattattaa

SEQ ID NO: 67869 - DNA, 1086 bp, Cannabis sativa
aatgttcctcatgaccaaacaattccatgcttaattttacgataggtaagaaaataagcactaattgttagaaaaataaataaattttatgctacaatacataaattaatgaccaaatatgaataaaattcatgaattagtattgtgcatacaagtaaatgatagaaaaattaaaaatggaacaaaatggtgaaaaagggcccaaaataggctgtgcacgcgcccccacacgtctgctcttttcttttttttttacctgtgttgtacgatgtgtcatttttggtaaacgacatgtcgtttggagaaaaaatgacatgccgtagggtccaaacgacccgtcgttttctcggctgggagctgaacaaaaaatgtgcgaacgacatgtcattttttgcccgacagaggcaaacagcatatcgtttggtgtcgtccctgtcaccccaaaaaacccacacgcgggtccgcgggtctgcaacccgaatcggtgcgacccgattcgtgacccggccggataaaccacctccggccatcaaatctgccgccgtttgaggggttttgttccattttcaaccctctatcacaatccaatacccatttaattcaaaaaaatacaaaataatggccaagatactatgaacccgaaatgggttttcctccattaatgaactcaacaaaaaaattgcaatctcataatacaaacatgcaataaccgtccaaaacttgaaaagaaaaaactcattctaaaatttttatctcatattagccattaataacatattaatccgaaatttgttttttttttccttctttgaataaatgggtcaagcacaaaaaaaatattaagctctaaaattaatagctttggctctagataccaattgttaaaagaatattcaagcaagagcattataatcactataatcaaatattaatccaataatgctcttataactatccaagatccaagcatttatttagagcattaatggttaagaaaacatacctcccatattgctcatcccatcatattgagccattgttgaaaatccaaggccaaaacaaactaacaatatgctagagagtgaa

SEQ ID NO: 67870 - DNA, 1501 bp, Cannabis sativa
atgagaataatctttactctttaggatatcatattaatattatgaatatataattatagagttatatgtgagttgggttgtactttgattgagaatagaataaatccatcatttatagtgaagagaaacatgagtaatgatttaaacgaaaatacatgccgaataaatacgtaccatttcaatcacaacgaatgtcgtctagagaaaacgttgatccaaggcccataatttaaaatatcagaacagaaagtaaaacaacaaaattgaaagtactaataagaatgagtaaacacaagttgattagtgatgatgataacactattaaacaattgtttaatccatgaaagcccagaagattttttattagggtagccacttataacataaaaacaatttattagtataatcaattaccaaagcaaatatgtcctataaacttttcaagtcagttaaaaattcccaaactattgagattattgaattcaaaaatttttgttcaattttactaaacaaatctaatatggataaaaattttggggcacaattttgtacttttaaaaaaacggaaacataatttagtagatatcaaaattcatatagacaatagtcatattagtaaaattgaatgaaattgaataaaatctaacaatttcaatagttcaggaaatctgaaaagttaatatgattaggtacatgtcaaagttcaattttggagagaaaaatcttaattggccattttgaaatagttaacttttttttttccttcaatccatgctatatagaaatcattcaactaaaccaacacaaaaccgacttatgccttaagatttaggactttcttgggcagattgaaatacactgatcacacattgtcatcaactatagacagattaatttctaaccataacactaatctaaataaactaaaggaaaaacataaaagggcatcaaaattggaccatagagatttagatgagaaaattactttacatgctgtagaaagataacttcatgaaaaggctaaaacgccaacaaagtaccaaaagtaaaattacaaaactagaaaagacattattataactgattggatcataagcaaacggatatacacataatcatgtaagataattatcaaaaacaagagacacaacatacccaaagaataaccaacaaaagcagaaaaatataggagaattaccccatatttttttaattttttttttaaatttactgtttgaatttctaaagtgatcgatcatcaatagttgcaatggggtttctataacattttttgttgcaaaaactgttttgaagtgtaaaaataaaaaagccccaaaaatatatgcaaacctaacattattgcagagctagagatagaaattccaatgaaatgaatcaaaaaacaaagtaattcatcacaattcatcgaaagacatttggttaatagcactaaaaaatttctagagtatggtcttaacacaaattgacactcactagtcac

SEQ ID NO: 67871 - DNA, 2732 bp, Cannabis sativa
taaaaaataaaaaattctttacaagttacaactttgtttagttagtaacaaaaggggcttccacgtttaatattttgttgtataaacaaacacccacccacccacaaagtaagatcaaattcaaataatttctctttcttcttcttttcactcaattttccaagcatgaagaaaaagacaaaactcactggtattggagttactaatggtggaataatacaagcttccgttttcactcccatgcccactatcttccatctcactctcctcaatctctgcaatccctggtttgaagatgaacaacccatgtccattcccaggactcccaaacaaccaatcatgcacatcccaaaacacctgaaccgtctgactattcccattcccacccaccaccactgtctgattccctcgaaacttccattgaaggttcttcacatggattaccacgatcccatccacgctgatccacatctccggatctttcggccccgccgttgaactctccactacgatctcgtgagccttctttctctcgtcgaatttcgctcgcgtcgagaaagttctcttcgcgaacacgttctccttcttgtagaacagaaccgcgtcgattagcgctggccgcgatttcgtccttttgtatgctttcttcttgatatcgccgattaagagcaccacctcatcgtcgcagatcaatgctacgtagaaatcggtgcagggttccggtccggcagagaatttcgctgatcggagatcccagtatacgtcgatggagttattggattcgatctcgaacgatttgaaacctttcttactccagaaatgccaaggtttgaggtcgattttgcaggtatggcaatggaaatcgccgtctatgctctggatggcgatgttgaagaaatggctcatcaggtttttgcaccaggtcaccgttaccttccgccagtagccagagatattggccatgtaaacgcaggtcaccgtgctctgtgccgttctcgaggtaatcggttcatctgtgattttctctgctaatggtggcgcctggttcaacgagtgatgacctcgtaatgaccgactaaacgacatcgttttatgttcatacagatttccttatgctatctgctctgaaatttacaacagaaaaaaaaaaaaaaaaaagaaaagaaaagaaaaactgaaaggcttgatgattttttttcttttaatatttgtattaactcctcataaaatctctttattgaagaagaacctgataagatttggaacctagaagaacaatgagagactcagaaagaagatttttgacctttgatgttgaaacatggaaaatgaaattttattttctctttttctttttcttttagtttttgtgtcataaaaatatgaagttagttatttagagggaaaattctatattgaggttgtaaataaataggactccgaaacagaagggagtagaattttatatttatattttaattaatattgatttattgtattttgtacacagctgtttgattttctactcttgaatatgaaactgttttttttgtatgccattttgggttaaatatcagtggttgccatacgtatttgaattaaataaaataactgaatacttatctcattttattcgtaattgatataaaatcaagtcattttatttagactttagaattgttttattgataatgatgattcagtggtgcaatcccaatttatcatattaaaaatatatacgttcatgagagataaaagaaggaatcaaattcgatatttgacttggttggtttattcttatccatattatctaaaactcaatttaatatcaatttatcattctcaaaagatgtaaatccaaatttaaattaaactcttgattgagataattccattttacgaaagaaaacaaaaagcagacgtaatataaactgtggaggttgtttcttgttttactgttcctgtttagacctgaagaaatagggttgttatgattagttattgttgagttggtcaagtaggtatttcagttaagattctccttggcatacgagacttgtaattgtataaaaaaatacccacgcccagagaagggagcactgcaaaaatggctgtggagagagaaaaatgctcctgttggaatcgatttctggtggttcaccaggtgttcttttatctttgttgattgttttagtttttcacaacatttcttataatttttcttcaatctctatatccccataattttcaatgtacatgtctcagaaagaaagaaagaaacaaggaaagagtggtaacatttcgagtacaaggctaaaattctgaacccaagttttcatgttcaatctcagagaccccaaactggaagtcctgttcttttcgaacaaacggcaaatggaaatggtattccttagcaacacggcaacacgaaggtcattcttcatcaaactatatctactgtgttgttcttgtactcggttgcactgttttgagtttggtctctcagaattgagctcccgtttccatttttcggttcgaagattcctcccatgtggttggctgatgcactatcttgaagtgcttccaaatataacaacttcactagattcctaaatcggcgcctgaatgtcggtatccgagaaattgacccaacaagaccctgcagtctagtaaaaaaaaaatatgcatgctttaagcttatggagaattaaggacttacaataccagcaatc

SEQ ID NO: 67872 - DNA, 937 bp, Cannabis sativa
aataaaaaaagttgtttagtagttgttgtagagttgtaaacacgttgtatgcttttatttattttaaaaatatgttgctttcgtgttgtttttatgttgaattttagttgttaaaatttcaaaatttcttaaattttaactattacataactattgtattatttttaatatatatatatataaatatatacaaacaaacattaactattacaattaaactaatacttgatacaaaaactttagtaattctttattataattgataacatctatataaaaacatgaaaacaagagtatataaaatttatagattctacaaagtttaactactgaagttcaacatataaacagcatgaaaataacgtatttaaaaaagtaatgaaatcaaacaacgtgattacagctttacaacaactataaagcaacaaacaatgttactacaaaacattagttttcgattgcatgtaaagcatgatgcttctgtcatactggatttttaatagtgagtagagctttttaacttgataatgtagttgtatgtgtgttgttgcatattaatataacgtagttgtatctgtcgtttgaattatatagttattttgttggtgtactacaattttgcgagaaaaattaattaaatatacagtaaaaatacaactagaaaacaacgctaattaaatatgtaaattatttagacatcaaaatatattggtgacaaccttaaaaaaaatttaaacacaacacaaaaacaatcataatacatgtactcatgaaaaaaactaaacacttcaaattttctactgtttgcacaactaataacaacacacaaataactgtataacgatccaacttaaaatacatgaccatgttgtaacaaaaaaaaaaattgtaatacaacacactaatatctcacaaatataataacaataataataat

SEQ ID NO: 67873 - DNA, 784 bp, Cannabis sativa
  modified_base (124)..(129): a, c, t, g, unknown or other
tgggcttctcttattgggcttctcttattggaccaattttgtgaaaataccatttaattttcttttttttgattaaatgagagattttccctattaagggggataattacaccacatactgaannnnnnaatttttttacttttatacagtgggacggaatttttttcaaaatatattgcgtactgtgttaagttttcactgttgttttttagttgttccactgttatttttagttgttctgttttgtgttccactattattttttttgtaaaagttaactaaaatttcagtacttttgtaagtttcccttttattaatcaaaacagagcaaatcagtatccccaaatcaacaacaagcagactcacttacatattactcaaagatttgttgatcttttttagatattttcctctcatcaataagaagtaatctcgctttaacaattacccttattcttttaattaatatttaacataataaaaaaaaaaaaaaattatagatagtttttgagaagaggataattaggattttttatttttcttgaatttttcaaaccgttaaaaatttactgaattattgagattgttggggactttttttgtgtctaatattccgttgttttttaattttactactaacgtggtgattatttatgtacgtggttcttgaactttgacatgtaccaaactgtacttcctaaactttgacaactaaatcatgtcctctgaagttttcaagtgtttatgtactaaatcgtggttcctgaactttgacatgtacca

SEQ ID NO: 67874 - DNA, 973 bp, Cannabis sativa
ttcttcaaattttatacattatattttcgggtattttattttttacaagtttactttcagttttttttttaacattttagactctaaggagaaaaaaaaaagaaatgtgtagttttcatttttcatatacttaagtatgagttagttgctttcgctcgccacacacgtgctgagctagaaagcatgagactcattcagcgtcggctcaagagtggtgcactaggggcccacatccaaagctccccaaacaagactaaaaaactctttaacaaaaagatcctaaatttattttgtaaaaatacaatttttttattttactattatttattaaaaatataactattttaaaataaaatgcttaattattttttaagatactatatttaatattttattaaaaaaaacccaattatatttttaaaatactaaatttaaaattttcaccattatatatatatataaaaaaaatatttatataaaaaaacccaattaaattttttggcccaaggcccccaattagcttgagactcgcaacaaacatgcatcacatatgcaacatataagcatacacaaagaagtttggacaaatatttttattattattatatggccttgatagggcaagagagtacacgcctaagttcatatcatgctggtgacaaggtgcttcataagtcaccaactcctcttaaagagcttaatggggtttcaagagatttttaggaataaatatgatattaactttgcttacatatgaaaagaaaattacaaacacagctaaatacaaaagtaccaccaccaaggtagctctcaaccctaatgaggtgcttggtgcaagatttgactaatggtcgagcaccaagaaaatgctcatgttacaaaatggccccgtgtgggtgtgccatggggcaacatgtcacattattccctacttaattattcgacgccatcgacaaacctgctacatgatctc

SEQ ID NO: 67875 - DNA, 569 bp, Cannabis sativa
  modified_base (47)..(56): a, c, t, g, unknown or other
aactataaattctaaattttaaaataaacactataaaatacaaactnnnnnnnnnnaatagtttaactattaaatgtaatttatatattatgttataaataattttagtacagaatatgtaaatcggtttattcggattatttggacgggttagaatgatattcaacatgtctaatatattcattggaccatttgaatttttcgtaaagttattcgggttgtatttttttttcgtttggtttgagcattttatttgggttagacaatttattaattttttttaaaagctaaaacaccttctccctattttaagaaatttcccttttcaatttatggcaagtcatgacaagggaattttcaatttatgggtactaagtcgtatgagggacggaagaaaagttctgagagaaacagagaaaactttataaaaaaccaaccccagttggcttacctaaagagatttgatcgaaaaagtcaaggaagcaaataataatggcatcgaccactattccaaagctggttttgggttcctccacaggcctgaggagcatccctgtaattggtcttgg

SEQ ID NO: 67876 - DNA, 791 bp, Cannabis sativa
gattataataacagtgaaactttctcaaaaaaaaaaaaaaaagaattagtcgagctttttttattttcatttattttttattttcttgataaatagaatgaaggacgttacttataaaaaaaaaaactagtcattaaaacttgtaataatctttccatatactcatcatgaccttgtcttttctataatgtgttatagtgtcaaatttcatattttttttaaaaaaaaaattatatagactacaaattttaaaaaataataaaatatattaacacgaataaatttttattagtaaactgtttgataatcttttttttttgttgttttatattttatttgtaattgtcatgagattgtttttctcattgtttttttgttgttttataatttatttatagtagtaaggttgatttctcgttatttttgtaattgttttcttactttttgctgaaaaaattgtattttgtaattttaaaactgtggaaaatatggttacaagttaccatataaaagttagttaagttagtactaagtaagacatgtgaggttaactcggttcagagttagttaaatctattagggctcgtttggtacgttgtataagggtcgtattgtattaaatagtaaataacaatatgtttggataaaataatgtattgtattaattattacgaccaaaatttaaaatacaatgtatgttgtattatttaatacataacaaatggtccgttttagctggtattataatatttacgaaggattcggggtcaacaccaatctctgacctgaac

SEQ ID NO: 67877 - DNA, 643 bp, Cannabis sativa
  modified_base (290)..(290): a, c, t, g, unknown or other
gtccatgagtccattttattaggtacattgaccgataactgtttatacaagtagagatacaatggactgaaaccccttcttctattgtgttccccttaaagaaaaggaaactcagtaagaatattttagggttttttagatgtaatcttatttagcttaatacaaatgtgcttgcgacgaacgattcttacccaaaaaaaaaagtgtgtctctctctcgagccaacctcatctttctcttgtgctttacaggggtatttatagatcaacttctcttcatgtgctggcttngattgatcatccttgggcaaaatctgaccgttggattggtaggtggtatttttcccatatggcatttaagggtgtcagatcgtacaagttggacctcatacgcgtttcatccttgggcctttcgtttttgaatttcccttagccttggtcattggatcattcagtcaggtacaatgagacacacatgctttgtacgatagcatgttgtgggagacaacctctgacatcgtacctgaaaaagcgtggtcactaggtccgtagtctgacacgtataaaaagagtctctgcgggctaaaggcatagcccagtttggcgcatctaaaaatgctaattatcaagtatctattaaatgg

SEQ ID NO: 67878 - DNA, 1060 bp, Cannabis sativa
tactggtacccaagcccaacataacatggcgagtatgtattgattttaccgatctcaacaaggcatgccccaaagattgttttccacttccaagaatatatcagctcgtggatgcaaccgccaggcacaaaatcctaagttttatggacgcctatttagtgtataatcaaatcagaatgcatccaccaaacaaagaacaacaagttttcgaacagatatgggtctgtactgttacaaggtcatgccgtttggtctaaagaatgctggagctacctaccagagattggaaaatcaaatgtttaaagactaaatcggacgaaatatggaagtatatgtggatgacatgcttgttaaatctaggaaggctggagggcatatagatgacctggatgaatgcttcaaaatcctcaaaaaatacaatatgaaactcaatccctcaaagtgctcctttggagtcacttaggtaagtttcttggttttattgttaatgcccgaggtatcgaagccaatctagagaaaattcaagccctcttggatatgaaatcgccaacaaaactaaagaattccaaagcttaactggttggatagctgcactcagtagatttgtttcaaagtcaacatacaagtgtgttcctttcttcaacatccttcgaggtaataagaaatttgaatggacggagtaatgcgagaatgcctttcaagaattaaaaagacaacttgcaaaacctcccgcactctcaaaacctctggacgaagacgagttaggaatatacttagctgttacagaatatgcagtgagtgtcgtgatgatcagagaagaaaaaaacatccagcatccagtctattatatcagcaaaagactcgttgatgctgaaggacaatacccattggtagaaaagcttacttactgccttatcttaacaacaaggaatttaaggccctacttctaggctcatcctgtttgcgtatacattgaccaaccattacgccaagtattgcaaaaacccgacgcttttggacagttactcaaatgggtagtagagttgggtcagtacgaaat

SEQ ID NO: 67879 - DNA, 1813 bp, Cannabis sativa
  modified_base (1313)..(1320): a, c, t, g, unknown or other
ttatattatcattaatgtgttatgatcgtattatttaaaatttcaaacttttgtagaataattcatttgcacttcaagcaaatattcattctcatcatctagttgatgtgcatgtaaaaaaaaaaactatatataagtcaataaaaaattttagattctctaattatttttcctactattagaggattttaactatatgaaagaacttaatataaattttatttatatatgtggtaaaatattattttgtagccaaaatattatatatatatatttttataaactaccaattaaattaaattataaaatttatttttaacttataatcagcgacgaacttatgaaatttctaacagtgttgatgcaaaatttaaataatatatatgaattaagcatatttcaaatattttagtaaaaaattaaatattatatgaatacttaaaaaaataaaatatattaatatagttattttatcaaagtattaaaattaaaaaaaattaaattatttaaatttaacacaaaaaaataaattaaagtaagtcaaatacataaaaagttaataaaatattaatatctaagagtgagaatttaatgttgctaataaaataaaaattaaagtttggagataaatttattaaaatgtatatggtttgaaaattaatttactaaaaaataaaaaataaagtttaaagaccaacttattaaaatttatataatttaagaacttgcacttcaaataagctaaataataataaaagaaaacaatattgtatattcatattgactattggtagcattgtcataaataaagggtagggtcatacgactcatactgaaaattaagggtttctattagattacatccaatggatttatatccaaccgatttaattatttattggatattaaattttatcatccgatctaatctaattgaattgattcatccgatccgatccaaaagatatattgaattggatcgattccaaccattaaattcattaactggttttctattagattggattggatctatccaatccatgttagctaccatttaagttgattttattaaaaaaatatataatttaaaacttaataattcaacatacataataaatattagtttagtccaacctaattttcatgatctcataataaaatcgccaaaaaataaaacttattcaatatacattgacaattttattagcatttaggaagatgagaattaatatttaagttctaagatttgttcttctttaatctcatgtgttaaatgtatattaaatcaattaatatatatttttaaatannnnnnnntaaatatataaaattataaatgtactttaaaaatatataaatataattagataaccattggatgataattggatcagtttggtcggttatccattagattggatgtcctatctaacaatcaattcgatccgattggatttttaaaatttacatccgatccgatctaattatgattggatatccgattctattagatcgattaggattaaattgatcgattgtaattagattagataaaactatataaacttgctatttttttagataaaaggaattgggcttgggcttcaggcacgtagcccatggatagggcccacttcacctacttataaaaacactacacttaatgggacctgccactaatgtagtagaattaggggtgtttgcggtgtaggtggtgcgatttttgacttttttcaaatcaacccgcaaagcagtttgtttaatttcccaagctgcacccgcaccgcaaaaaaaatagtacggtgcggtg

SEQ ID NO: 67880 - DNA, 819 bp, Cannabis sativa
ttttttttctatatttttcttacattttccttttctcaccaaaatccaattttaaaaatcacaatggaaattaattttgtcttcctagctttattaatgagtttatcactttatcaaaagtttggtctatcagattttcctttatgcctcggtagtgctggatacgatttggcggcccaaaacgataaagtacataataataatttgaataacatcacactttatattgattctattactcactgttatgcaaattatggctcttgtttattcccttccccgtctgttacaattatgcttgcttggtctcctccccctgaagattggatagagattaattgtgatgttaaaatagggactgagactatgtgtgtggtggctttagatagaaactttatgagaaaagttttgtggattgctacttatattttggaattcactaatccccttatcggtgaagttacaacgtgcttacttgccctgaagacgacaaacattttgaagtatcattttgtgattattgagagcgactctaagattgttattaattccctaaaggggacttcttctgactggagaattgataattacgtgcaccatttaatagactctcttctttgtttgtgggttgtaatttttctttcgttttgagactgtataattttacggcccacaatgtggctaatagggcttttgctcataacttaactagtatggtagagatatctactatttctaaagatattatttgaaataatcatgaggtctaatttttcttatcaattgacgtagtttatcaaataatagtaataataataa

SEQ ID NO: 67881 - DNA, 585 bp, Cannabis sativa
ctaccccaacacaataatttttttttttttttttgatgatttactcactgctgccctttttattcaacaccactactctgctcaatttgcaatatttccaacaatactacagagtcccaatcaaaagtgtcacactgctaccacacttaaatcacaatgacaatccttagcaccctgtagcagaatattaacagtccatgacatccaccaattgtgcaattcaacccaaaataatgttgcaaattaaatcaccaaatcaatattcaaggttatggcatccaccaatctgtccaacactacaacaaagttcacacttgcactatgtctaacacgaccactgccaatgccaccccagttcactatcactactgttctcagaattaccaatctttctcagcccaatattcaaaaatcccaccaaatttcaattcaaatcgtccaaaccaacattatcacaccactgctaccacatttaaatcatactgacaatctcaagcaccattgaatatacactagcagttcaaccacagccactaattaagcactgtaatccaaaataaatttcaaatgaaatcaccaaatcag

SEQ ID NO: 67882 - DNA, 1189 bp, Cannabis sativa
  modified_base (483)..(498): a, c, t, g, unknown or other
taataaattaataaagattaaagtatatgtacttaattttgctatttaattatttttttttatagttttacactatatcaaaaatatgtttatatttagcattacttttattcctttctctcaaactcaatttttttttatctctctcttagcctgatggaacaaccttaactatataatgcatgaaatgaagaaaatgtcatgtttaaatgatgtagagaaaaatataaagaatctaatatatggacatagattagatatatatagatatatgtcgatatatatatttatacattacttacagattttttaagaactgcagtttagaaaggaatttaggcactgatccacttaagctattatttgataaatccctgaaatatgatcatgtacataaacatttaatacatgcattgttttataatcaaatcaaatcataataattaaatatgcaaatttataaattaataataataataatannnnnnnnnnnnnnnntaataataataataataatttacagacttacagagattgtatcatagtaagatctgatatataagaggcaatctctcccgtcaatccacatgaggataagtttctaatatacaagattattaataataattattagttgcataaagtataaactatattatatttataaatatatatttatataacgaatctcaaacttacaaggatatgattctaacatcatcttcaccattaaagctgcaattaaggccgtcccagatgtaagtttttggaccacatggatctccttgccaatttttctgtactccatacttggatttaatgttcaacataacaccaactagcaaacaattgtatttaaaaaaatgaataatatatgtaattaagttaattaattaacgttcaattaaatgaaaataaaggtgaaaatattatttcatagaaaaaagcactattactagtcattctaattacaaaacgaatatgatatataagcttttataatattgtaggaattacagaactgataatatatattataaatttgaaatttatattcagatttaattgtatgtaaagtattcttttatggtggttagtttcaatgcacttcactgccataaaaagttgatctttaaacctcttctgtaagatgtgtatccttttgttgagaagtgtttaccccttactt

SEQ ID NO: 67883 - DNA, 4238 bp, Cannabis sativa
aaaattaaatctaaatatttacgtaacaatttttttttcttgacaataaaaaaatatagagaaattttacaatgtacctccttaaaatgaatacattgatacacccttatttgttttagcactcgaaataattttttagtcaatttttttctcatggttatgtacgttatagttatttaagacatctttcaaaattttaagaaatttaaaaaagtttaacacgcgaaaaactacgttcaaatagttataacatacatgaatatgaaaaaaaatattagactaaatttttttttctgaaagctgaaataagttaaaaatgtatcattaaatttatttgaagggagtatattgtagaatgacgaaatcattgtatatagtaatgaattattaataattaataagaaaatattagtagtaataataagacattgactggtgctgctattttgctctatcacgtgggccagtgtggggatgttgcatatgaatatcatatgagtctccatctcatctcccccattcaacattctctctctctctctctctctctctctaaacttaaaaataaaaataaaaaaagcttctatggtcttatgttatgacattttttgttattcataacaacaacaacaacaacaaattaagtcataacaaaatactcacacaatcaaaatccaatctttattaaaaccctcttcttctttcttcttcttctttggggtacccttgagactttatgtggtgggtatttggtggagatgtcggtcgccggcggaagaacgagggcggtggcggcgctgttctactctatactcattttacagatttgggtctgcctccaatgtaataatgaagctaatgccacaagggtatttccgggatttcacaatcaaaaaaatgatacgacgtcgtttatgatgaagagtagaagaaaaagcagtgaagtggtggaagagttgtttgaaaagtttttgaatggtacaaaaacagatattcataattattcaaacgacaataatggtaagagttttgatgatagtaaacgacgtgttccaagctgtccagatcctcttcacaactagttcaaattaattttaatttatttttctttttttttttatgaaattattattattattattattatagccaaaatacccacgtttttcttatcaaattagaggtagttgttaagtgtgtttttgtaatttaggtgggaaaaccgggggtattttggtaaattatcaaatgattattaattttccttttttttttctattattattattatgatgatgaacccagaaaatcaaacaccatgatattgatcatcatgtgtatatatagtctctgtatatgtattacaatcaattaagatttgtttttttttaatgtgtgaaaaaatgaagaaattaattaattataggtatagtagtggcaaaaatgtaatttacaacaaagaaagattcttggttattacattgtaacaatgctaagattattattattattattattttagaaagtttgctgaaaatatgaattaattgtatttattaattcttactgtgacaatgatgaaatgatttctattttagtgaaaataatttctgtagcttctgtaggttatgatgatcactactactgttttttatgtccttatttgataattatatatataaatattgcactgtaatttctttttctatacagtacttttcgtctataataatatatatacattatttaataagaaaatattcctttcattgaattaattcttctttcttaataatgctattatgactactaattaattaacttaaatatatatatgatcaaataattaattattaatttattaggtgtctcatgatcttgagatcatgaagttgttcaaatatgtcaggccatcaactcttgttaatttctttccaaccactcagaaaatgacttcatttttattttattatatttattatgtatgtatcaaatagaagcaattaaaattttaattaaagatatttgtttcattatattagtaaatgctattcaatatatatgatctaatttagtatatttgcatgtgttaggttgatagttctaaacttttgtgtactatatataatatacccttaaagagcatacagtaaaacttaattgttattttatcttaaattacttctgttttttaaaaattttaaataatttataatgctgataataaaatttagatattttattgcatataagtttatttttttgatatgcttaataagtaattgtttaaacttaatttttgtcacttaaaattatttagaattttgaaaaaaatatataaataattttaaatgactataaatgtatgccaatatgaaaaaaaaaattaattaatataaataaatgagttataaaggggtaattacgtaatccacgtacattggtttaataatagagatttttttaattttatactttaaagtggtttgtttttatttttacaaaaattcacatatcaactaaagtctacatagcaacccacgtaaaaattaacggttgaacttaaattgtaactatagtctacatagcaagccacataaaaactatcaaagcaattcaaattgtaaatttaaaagaaaaaaaattaagaaaatagtatataaaataatttttctaaataatatatggaacatgaatgaattaaattatggttttagattacttgttaattaatgccacttgggcaagtagatatatgaacttatttaatatttaatatttaattaatgaagaaaaagttaataaaccaagaaaagagaataaagtcaagtattcttctcttcttttaattttatatatttaattagtgctaattaggttaataattagtaagtaagttaagcaattcagtaagatacttttttgaaacaaaagtggatttttagtaatagagtcaaataaattgaaaagattaatagtaattttataaaaagacacattctagttttaataaaaggttagatcggtagctgaaatgcagatggattctagtgtttgtaatctagggtaacacagaaaattaaactttatattttatattatatataaatttattatattctctgatattaataactttattttggcttattattgatcacattcactactaaagtggataaagacaattttaccttattacccgttactaccaataaaacaaggtcaattacaaaatgggtatttccgacattcaatcaaacaaattttgcaatttccaatttttgaaaaataaataaataaataggagttctatttgcaactcgaaaattttataaatccaccctattttaataatttttattttacataaaatatatatttttaggtcattttacaatgcatccccttaaaaggtatacaatgatgcatcttctactagtttcggtatccacaagaattttttagtatatttttttttttcatattcgtgtttactatggttatctaagatattttacgaaattttgagaaatttagaataatttacaatatagaatacaatattcaaacagtctatttcacacgcgtataaaataaaataattacacgggcaacacactgtttgaacttttttttgggcgtgttaagctttttgttaaaattttaccgaaaatatcaaatagttgtaacgtacatgaccgtgacaaagaatgactaaaaaactatttcacatacctaaatatatagataaaggtgtatcagtacattttttttttaagaagatgtattgtaaataattttattttaatttttttcttccaattcatatttttacaccaatcaaacaaaaatttattatatttcaaatattataacaaaaaattaaataaaaaataatgtaaaattttattagaaaaaaataaaaataaatattaaaattaacacaaaataatattaaaaaaataaaaaatatatattaagagtaattttaaaaaattattttaaccttaatttttgtgtacatatcattttatggtgtgtaataaaatctttcataaaataaatattgatttattatttttttaaaaaaaactatcaagtctcgtattctgtttttttgggtgtttatgagaaaaaatagcatagaaatcgatgtgagaaagcgccacgtattatgcggcgaagaagaagttttttcatttatatttttcttttttatttaatttaattaatta

SEQ ID NO: 67884 - DNA, 1333 bp, Cannabis sativa
tcgtgatattcccacgcaccactaaattcttcctctcagacattgttttttccaaagtgaaactatactttttcttttgaaaataaagtactaatcataataatcgtctagataatgaaatcctaaatctcataatgggccaagcccaagcccagtaagaattatatggttatcttgaatagaaacaaagagtttttacaaaaatactggattttaggtaaaactttacaattttactaacatagaattttttacaaaatactatctttttataaaataaccgtaaaacaacgaaacagaacaattaaaacaacagtggaacaacaaaaaccaaccgtgaaataaccgtgaaaacttaacacaatacacaatatttgtttaaaaaaaattccaccttatagtaaaaagtaaaaaatttgaaaattcagtatgtggtgtaaaatctcctaaaaacaaagcaataaccaaacacaggcaagcaatgaggtcaattctgtattaattaattggtagtcttcgaaagaccgacaatgtttgaatgtcttttcaatatttagtttttgaattgtatttttgaaagagaattgctaaaagacactaaaaataattttaggaaatatcgttaaccaatctttaaatgttgtctataaaaagtgttggacaccactggtattaaataataatgctctttcaaagtaggagtaaaatataattttttgtcattttaaaaatttgaccgtgttcaactaatattttctaaaatttttttcttttcttttttttaaaaaaatactttagcattctactatataccacgacatgaactcaaggccaaccatagtattttggaacttgagtttttttggggccttgagtaaaatttaagattaagctctttatatataaaaaggatgtgtttattagaccacaattttatcacactgcataaccgtatcttatttttctagttttaaagtcttgcagtgtaattacgggttgaaaaattacaaaatcagcacatgcagtttggtttgaaaaaatagtctaaactcacaccattcacacactcatatccaaaacaagacaggatcaaaccgaatccaaacccaaatctagatagagattgaatcatatccagatcaaaagagaacacagacccgactttagaccgcaaaaccggccaagtcctaggtcaacatccgggtcacggtcctactccgagtctaagtttgggtgggtgggtccatagcttttttttttttttttttgaataaagataaacttcattaactcaagagcaatcgctcaaaagtacaacttcaagttccgaagg

SEQ ID NO: 67885 - DNA, 552 bp, Cannabis sativa
tttttttttttttctatttttaagatttttttttgtttttcttttttcgtttttacgatttgagttattccatttcataagttgtgatttgggttgctacaggaattgagatgtgaattattgagttgtgatttaaattgctccgtaaattatatgcaaaaatatatttttttttaaatgaaaaaaccctttaattttaaggtgggcataattaaaaggttaattttataataaatattgaatatacttcaaaaacaagttaaaattaattgtaatgatggctgtggaacttactccctttctagttggcacaagttcgaattaccatatgatcatacaccttgaaggttttttttttttacaaataaaatccaaatatacagaagaaaaatggggcgggggaaatttcatataatatattttaaaattttatatatatctacattaattaactacaattttatattatatattttataattttagggtgagctttaaccttttctgggctccatgagtccatttgtacgataaatataatgagaaatttac

SEQ ID NO: 67886 - DNA, 635 bp, Cannabis sativa
ttaactttaaaatcatgttaaaaaatttttggtattcatttattattataactaattttgtggtatatttattacataaaggctaatattttttattaaagaaaaatttgcgttaacagtttggtgctttcattgagagtctttgtagtaaaaactcaaaaataaccctcctcagagacacaactcaaaatctgtaattatggcggatgatactcagcgtaatgaagaaaatcatccagaggaggcaacctgttgccttgaaaatgagcctcaaggatcacaaagatccaatacaactgaaattccccgttctagaaggaacgatggagatttcaacccaactggtgaacagatcccaaaaaggcaaagtgaagacgcctatgatccaatcagattttcaaactagagaaatgtcgaattagaacaagaagcgacggaagccaaggttgcacagggagtaactcctcaaacttaacctggtccatctacaatgcgaccacaaggaaggccctgaggttcaaggaccaagagacaagaaaataatcaagggaatcccataaatactcaggaacaataacctgggaatgcgagggatatcccaatggatagagaaaatgtaaagaccgcctatgaat

SEQ ID NO: 67887 - DNA, 4289 bp, Cannabis sativa
agtttaatactctaattattgaaagagcattgctataaggcattggtgcctagcaccttctcgacatgtcacgttgcgattggctagcgatcctccctaaaagctattatattaaattatatggaactcgatacttagttagaccaatagatattgacacataagagggtagtaggcaccactagtgccctttagcatttctctcattgaaatgctctgatcaataaataagttataaagtattatttttattgctcgaaaagtaacggttaaagagtctcatactattagaaaaaataataaacctttacgagtatatctgatctgaaagagaagagtcaagaaaatgaattaccgtatatcatacttcatttatgatctatttatcattacatatattatatataaatataatacacttttgacaattggattaagatatagatcaggtcaaattattgttcaagcaacggatttgattttaaacgccttagacctccaaacgataaaccaataaacgaaaacttatttttctgagaaaatattagaaactgagcaaagaaaattcgacccgaagatgtggacttatttaattgcaacctaaccagaccttgatgactcatccattgatgagtcgcttgtacttaaccaaactagtaaggcagcaaaagaacttcaaactaataatataagccaaatgctagctagagaagaaatgggttaattaattaattaaccgcggagcagaccttcctaatttcaccagctgatccagtgagaactccaagccttcccatgttgaccatggaaacaccgaaatctttaaagaaagaggatgttccagagctagatgcgtggctcagaacataagttttagtctcactgtcatcgagaagtgcagagtctgatgagaagagaccccttctcttggccaccacttggaagtatttaacatcaaaggtcttgaaacttcctgggtccatctccaccaatgtagtccggtcagcaggcttgcacttctttttaagttcatcaatgtactctgaatccaatgttggatcggtatcaccttttccggtgaagttgtatagacggttgttgaaggcagtgcagtgtgaagttccaatggtgtgtgcacctgattaattatgacaaaaatatattgtattatacactataatattcaatgaaatataattattattagtagtacctgagagcactgctatgtcttttgcacttaaacccctggttgaaaaggctgttcttagcgcagtgatattggcgaaaggcggaactagttgtcttaaggcctcggttatattcgaaactcttccgtctcttcttccagtttcaacttcccaggttggtccattcaactaaatatataatatgttttcagataaatatatttctatcaaatttaatttacgaaatgttatgtctaagttacgaaattaattcttaccgccgcaactgaatccctggcaacaagggccactatgtcagcacacgaaaccacttgtgggcactccttttctaacgcagtcttgattttatcgataatttggaaacctcgaaggctcaaattaggagtggcgaacttctcagactgattagtggctgaattcaacaacaatgaaccttcacaaccctgcagtaaaaaacaaaattagttaattaattaatatatattattaatttgctgaaattaaatattttaattaattatatatttaatagtactctcaccctaacaaaacaatcatgataatgcattctcatcaaaggggcagccaatgtgggtgcaactttcacagtatcgtgtgtgatttgtgctacaattgcctctgcttttgggcatgtatttttatagaacccaactttcaatccctgagcgtttgctgtgtggtgaaggactgagaatataaaaatcaattgtaaagcgaaacatattaaaaccttttgacttgccattttaattactcaaacagagaaattaaagatggaaactctatatagttgtttgataactataaatgttaattagcttagtacatcaaacacttagtttgagcaccaatttatagtaatttggagcgaataaacaaacatttgtcacgaacattacgcatagctgtctttgcttggccatatggcaatacttttttatttatatattttttttcatattatataataattttgtcataaatggctatctaataattaggcgaaattcctgttctttagtattacttgttggacttgttggaaaatattgatgtatattctagccaagataagaccaagaaatattttaattataaatttttttgttaataataggtgcgatcgaccaataatatgttcgtagtttaattaatattgtagatcaagtggaccccaatcatcacctcatataatgcataaaacacctgttgtgatggatattagccaccaacataattgttctctctacttaaattgttgttgttttttcttttctacttaatcattatttaaacaatattcaattttttaaattaaaaaaataaaatatcttaaaaattaaattttaaaaacaacaataaattacttttaaaatttatttaaacattttgtaattataatatattttgtcacttttaaaaaatactcattttattttttctatcatcataatatttccgcactttctttaatctctcaatttaattactctcttccttataaataaaaataaaaattaggaaacagattttgatttttattctaaaaaaaaataattataacactttaaatttccaaaagcaaaaattatgtataggtgcgtttgttatcatgtttggtggataaggaccatttgaaaagttgttgccatttgaatgattcaaccatggttattggctactctacactactctacttagaaaaaaaaccaaagtgtaagatgaaaaaaaggggtcattaaagtatgtgtcttatgcccaataagcccaaaacattaagcccaatgatcatgtcaagccacatgctaaggatcagatgaacgaatgacacaaccttaacattttaatacagcagaattaggcttagatccatccatcccaggacccaaggtaaacgttgaatagattatatgcataatttatatagcttatttgggctgaatctgtatatataatgactgaattcaaccgttaattagttttgtacaattaaacatatatatacgcagctttcaaaaccatccatgcctgatttcaaaaaagagaaaaccatccatgccgtaagctatagctacatgcatgcaccgttaaaacttaaaggagctcatttctgttttttaacatcaatttgttttgatggtatccgaaagcacatgtgccatatgtatatgtatcactaattttatgtatactttcatggaattatatattaattggcttatttctcccttcaacataaacgtttttcaatttttaagttattctaagagtacactaatatattataattattggaatattcctcgcgcttaatttgttattatttctaaacaagttgtgcgcatcataagccacgtgggatacgtatgattttcattcatcatgtttacgtgcctcatcaacattaatttatttgagctgtaagccttatttcttatttaaataaccatagttataattagttattttttttttttttgaaaatgttataattagttataatgttaattgtaccaataactaatatattatatcttgtagtatttaataacttaaagtagtcctgcaatttttttatttaaatatgagttttattaattaataatttaataattgatagacggcgccatcaatattatttggctcaccccccaaaataaagaaaaagaaaataccgagaaattatttcattacatatacatatgatctcttattacatagactagaaatatagtacacttttttatgaatgatgcaatgggaagtacctagtacaaatcaatattattgttcaagcaaaggatttgaacgcatcacatgatcgatctggaaactcatccccatggttcatttcgtaccttcaaatgtacgtacacgcaaaaatacggaacttatttttcaaaataataaataaagaaactgatcagatgcaaatttcaactgcaacctatacagacagaagagtcgcttgtacttgacaaaaatacggcatccaagtactttaaatcaaacaaaatgctagaagatcatcactggcatattagttaatcttggtgc

SEQ ID NO: 67888 - DNA, 960 bp, Cannabis sativa
tttttgttatattaattttatttctttttaattcttgatgttgccgtattttcactacttagcaatgtatgttcattttttaagtttttattatattttttttaaattttttaatgttttatatttttagattacttggaaaagactatttattaacaaattattctccaatgaatattttgcaacaaaattattggataattttttctcttgctttgaaagattatataactttgatatctatatatatatatatatatttaagtattaagctcttctctaatagattttttcgcttcaaagttattagtaattcttcgtactgataaatcataattttttttttctctctataaaatttatatatattataacacaaatatatatatgtatatctaaaaaaacttaaaaaaaactacatataagagctaatatgattttttttaattttatttttatacattttcataatgaataattaaatttttattatatttctctccttcaatcatgagctttaaatttttattatcttaactattttgtaattaattacatacattcgtattaattttagtgatgtcttttgatttttttaataatttacacaatataactaattcattgaagataatatattagtatttttttttattaattttaattattttaactttctaaaaaaatcacatacatttatattaattttttttataatttacatcatttaattaatgtattgaagatgatatatgtattattatttttaattaattttaattatttaactttctaaaaaagtattaatttaaaaaaattcttttgttattaataaccttaaatatataatttgtttcatgaaaaaaaatataacaacccaattaaatatatatactcagattttaatacttctttatttatacaattaactaaattaatatcacccatacatattcaact

SEQ ID NO: 67889 - DNA, 653 bp, Cannabis sativa
  modified_base (305)..(306): a, c, t, g, unknown or other
taagagaaatattaaaaagtattgctggtgtctagtatctttgtgaagtataatattactattggtgcaattcaatatcgaattttatttactttactttaataaatattataaaaattgttaactaattataagataacactttatcgtggtactaaacaccataaatacctcataacaatactctgtaaagggtaggttggtgggtttcatttgaaaaataaccaaatatttattatgtaaatactaggaagtttgggatccttcttacacatatatgaagatgagaaatgctaaagggcacnngtggtgcctagcaccttcctatgcgtcaatatcgctattggtcaaactaagtatcgagtcccatatactttaatataatagcttttagggagtatcgctagccaatcgcaacacatgtcgagaaggtgctagacatcattggtgctatgaagattgagcaagctattaatgttacataccctactatagtgtccaccactagcctatgttgcccttggagatttgaaaacaagaaaaaagaatcttttactaaaatgttacttgaattgttatagcatataaatgaaaaagaaaaaaatataccacttcaataatcttataattattatgtttactaaatatgataa

SEQ ID NO: 67890 - DNA, 526 bp, Cannabis sativa
aaaaaaacttaaaatataataaaaaagattatattttttttttttggtgatggcaaaataatatataattgtcacatgttaaaataattatagtagatcataatagtgtaatttttaaactcaaataataagtatgagtgtagttggaaaggacttttcaaattataaaggagagagatagataataagcaataaaagtaataaaatagtaaaactaatgctaactttttcaaaaatcacaccagagagaaaacgatttagaaaaagaaaagaaaaaaagagaaaagttaatattgaatgcttcttaagaagtgttgtacttgttaaaaaaaaaagtgttgtatacttgtctatatttcacatttatttggcaaaaataaaaaaataaaagttctgacagagagaaaaaggaaataaaacctattacaatttgaatgtataccgcctactaatttaaggcaaatgatatttggtatatacttaaattaaataactaatcatatatccataaataaaatgaagttaa

SEQ ID NO: 67891 - DNA, 1333 bp, Cannabis sativa
  modified_base (483)..(484): a, c, t, g, unknown or other
  modified_base (1285)..(1288): a, c, t, g, unknown or other
aaataattttaatataattttatacattaataattaattacaaataattttaatataataattatttttttcgaggcattcttcaacgatgatattgaatattgataatgtaatcaatgacgactttgtcgtcgttgatgtacaaaaactaaaaaaaaaattattattcccaacgattatgttgccgttgatattattaattgccaacgactttaaaagtcgttgttgataattgtttttaccgatgaattattctcaacgatttttcatcaataaaatgtcctcattaatggagaatactgacgaaaacagggtttttcgcgaaatttgtccttattgatgtacatttttcttgtagtgtttgttaattgatatgtgatatgtatataaatttatatatatttttaaaagtagttattattttttgttaattgatatgtgatataagtatatataagttcatttatttaaaaaataataatnntaataataattattattataatagtaaaatatcaatttatataaattcatgtttgaataacacataaaaaaatgagagaattaagaagaaaagagaaaaaataaatttggagagattataaagtaccatgttgccgcctcattgccctcctttatctctatatatataataatataaatatatagattaacaataattatgtggaccaataattgctcaacacgaaatataaagtaaatatttaacaaaaaagtagtaagagacgtaatacaaatgtaacaagtatttaatttgtaaaaaaaaaatgtgatatttaagtgtgaagaactcaaattaaattaaagtatttataccataaatattcttatatattaatgtaatttatttaatatttttaaatatataaataaaatgtaatatcttattttataaatggaaagtggcttagttggtatagtctattatgatttaatatttttagttttaagttattccatgtacaaaaactttaatatataatagtgtcttattttagcaattctcttaattttgttatatattattaacaagatcctttttttttttttttccatagcacatttcttgtaaatattctaaaatattcaaatttattacaattttttttagggtatatactattttggactctatgttttataaaagttactaattggaccatctattttgttaaatgacaaaatagaccttatattttccaaaatggcaaaaataagactttgagttcatttttcaataatattattttttaatataaccaannnnaagacaatttctaacacgaatatatacaaaaaatataaaaagttt

SEQ ID NO: 67892 - DNA, 1165 bp, Cannabis sativa
  modified_base (1102)..(1105): a, c, t, g, unknown or other
aaatcaaagggtttgtcttcttctacactaattgatgcaaaaaacttccttgaagccatttcaatccgttttacattacaggtcaaggtgcctggaaaataaaatatggagcattaatcattaacacaagcaatgttgacattaatcattgtcatctagctaaaaatggattaatataatacgacataacttccgattcatcaaataaaaaaaaaacgttttttgatccgagtgttaagatcaagtacttctcgagatgatcgctaaaacaaagtaaggaactaagaaaaagcggaaaaaatgaagacgaagaatttgatagtaaaagagagagaaagaggaaatacgtgatgaattttggtgtgataatttggattgcattgccattggagagaggattagagagctctgtaaatgaagagagaagaagagaaagaggaagtagtgagtgaattgggatattaagctaaataatctttattcaaaactatttttgcccaacaaccttcttataaaattatttttattaactaaaaaagtaaacgactaatatagccacctaaatacaacctaaacacctaccctattctacacctttaagaccatttttcttctcctcttctttatttcttcttcttttcttcattttttcatctcaatcaacctcaataataagcttaactattattttttcttctcttcatctcactatttcttcttaaaatttttttacataaacctatctccatctattctccttaaatctatcatctactcccttaaaatccctaaaaataaaactttaatttgtaatcaatacaatctccatagataatactaaaaaattcttttagcttaatcatcattccgataagttttattatatatattcttcaatttatataatataatatatcatattatatatgtatatatattcacataatataatacatatacttttttttttttttgataaacaatgcatatacatattcatgagcatcattttctacttcaattagtgtaaaacaaatgaaatataaattgagattttgttcaatcttttttgtgttaaatttaaagttaagttttgacttgnnnngattttggttctttaattcatgtactttttttcttgttttatgaagagatctcattttat

SEQ ID NO: 67893 - DNA, 746 bp, Cannabis sativa
tgtgggagtttgtgcttgatatcaaagtaatcctatggaatctcatgtatctgttgtaaaaatgattatttgatatgttaatagtactctcgactttggaatatggcattctaaagatactaattctaatttggcttgttttagtgatgagattgggcaggcaatgctgatgatcgtaagagtacaagcggaggttgtttctttcttggaaacaatttggtttcctggcacagtaagaaacagaattctatttccttgtccacggtcgaggatgagtatattgctgctggtagttgttgtactcagctattatggttgaaacaaatgttgattgactatggatttgaattggttgttttaacttttttttgtgataagaatagtgcaataaatattttcaaaaatcctgttcaacattctagaacaaaacacattgatataaggcatcactttattcaggaacttgttgaaaataaatctttgcagtaagaatatgttgatactgagacatagttagctgatattttcaccaaggccctagactcaagtatctttgactccctcagaaaatcattaggagtttgtattgtctaatctttcttgtttttgtttttgtacaatactgttgagttgttcttcgcttgcatctaatcttgtttcattcttatttgacaaatcttgtttatgcttttggattataattagttaggatctcgttcttgtcatacttttgaggttgagttaaa

SEQ ID NO: 67894 - DNA, 608 bp, Cannabis sativa
  modified_base (299)..(305): a, c, t, g, unknown or other
gttccgaacaacaatgattcggaaggtttcttcatcaagaaaccggtttcttggtaatttttttagtgattttttttggcaacaatgccaattctaacgacttttccagtgccggcagcagctctgacgacttttccgataccggtagctacttcgacgatgaaaaaaaaaatactaatctagaaactcataaaatctattaatcaataaaatgaaagaaaaatagaggttcccactccaaatgtttttattgtaaattcttgagtgatccaaatcactttgtaataataataataatnnnnnnnataataataataattatataatactcaatattgataaaaaaaaaaaaacctctaaaactcattgatgaataaaagaaaaaggaaattttccaacaaaaaaaggaaataaaaaaaaaagaaaaagaaaaaggagaacactagtttaatatatcaagtgagaaaaaaaaaataaagcaacactaatattggtgcgaaaactgtttacacgagagttcttaaaaaaataataattcaaagtaaagattaataaattttttaattattaatattattttattttaaaaataaatatataattaaata

SEQ ID NO: 67895 - DNA, 2004 bp, Cannabis sativa
tacctaaaaataatacataatttaatcaataatcatcacaacactattactattgctctagtagttttatatggaaatgggtcataaacaaacaaatttttttgagcccaaaaataaatagtatttttaaaaaatattaaaagatatatatttaggttattatataagttgctacctgaattttcataaaaatataaaaaaaaaatcactttaaaaatatgtattgaccctcataaacttttggaattgactagatcccagattccctacatttcttaggttacttaaaatttgaatatgtagaagttgttataaatatatatagtaggtacccgagagtttgacgacgtcgttcgtgccaagaaataccaagtggcaaaacaggccaagaccaccaataccaaggcttcaaccaaggtgcacttggaaatgtaatcacactgtttggtccacacggtacactccaccgaagtttaagatctgattaattaattaattataattataaacaccaaaattaacatctataatataattattattattaattaattaattaattgataaaatatacagtacttacaatagtaagaagcatccatttgataacccaaaggcagtctaaatgtgccattaagcaaagtggtgggattagaaggtggatgaaacatgggcctatcaagcaaatcaggaaagtaactaccaatgaagccttggtccgcaccatctggattctctctctcattttccaacccacgaaccatgtccttaaacacttgcatcgaaggctgtagcacaaaaagtccagtgtggaaaatacatgggttaatgaacacagcacagaattgaccacactggaataactcatctgtgttttgaaggaaaatgttgtcagaatcgagcataacaactctttcgtactccactaaactccaaacgtaaatcttgttcattgttaacataaatctccaatcgaaattcgactgtttcttgtacgggttgtttagattttccactctcatcactttcgccccatcttcttcttccctgttatatatatataaaaaaatatatattaatataaaaatcttttttgatgtaacaaaggaaaatgatgaaattgtcatctttatcatctgtcacactctcaatactacttattaatattaccgttacttacaacaagttatattcatacgagtatttcaaggccaacaaattaatattattaaccgtacgtaatttacataattattatcattacttttctgtaaatatatttaaaaaaaaaaggaaatttttgaaaatatactttatttatgtattatttataatttatggcctaaaatttttatttattaagattgtttgtaaaattttaaaattatatacatggtcagtaaaatataaaaaaaaaaataaggagaaataatattatataattataaataaaaaatttataaatataaatataaatataaaattacattcatgttgagttatttctataatattttacaatttttgtggtctacacttcaaaaaattattcaatacaaaaaaaaatagaatatatggacggtatattcttattttatgttcgttaagacaagtggcaaagtgggtgttactttgtccattccattgttataatatgaaattgaaataaggagacacgttggcagagaacacgttggcagataccacgtggagtatgtcattccattccatttggcatccatatatatattataatatttataataatacttatattggccccattccattccatattttcagataaaaaaaaacactacttatccattcatatcatatatcagagtgttgatgaagaaagtggaggttttattgggtacaagcgggaccatctaagactgtacagcacagacacacagatattctcttccaaacagataaatcatttcctctacagattatacacacgtaccgtaataacgtactcctgcccttagctgatca

SEQ ID NO: 67896 - DNA, 1336 bp, Cannabis sativa
aaaattataaaattaaacttccattgaaaaagctaaattttagttgttttacatattttttaacttaatgaattgtgtttagctaaatacaagaataataattcatcgagctaaacatattttattattattattattatttttttttaatatatgtatatattgtaattttatttttataaaaatgaataagatatattaaaatatgatatttaaatgatataggaaaataatagagcaattatataaaaatttgagataaaacaaaattttggtgatgtatttattttatcgatattaatataatcaaagtaaacaacttaactctctgcaaaagcatacaatgttacataaaatatagagtaagaaatatttttaaaacaaaattcgtttttgtttcaacttattgtttagtttagattaatatatttcatatgtttcttccaataaaatattttatttcttgaatatagaattaaccaagctgtaatactcgttcaatttattactacatattgttgaaattgcactactaataattagcgatcaatgttagtttttttttttttttctttttcttttttagctaatcatttatatatatatatgtatttatatatacaattaatgcaaatcttattcaaaaaaaaaaaaaaataccatgcaaatcattttaacaattattaatgatgaacatgtacgtagtgttgctaatttgctattaatatgatgagaatataaggtacatggggaagaagggttattgataatttaggtgacgtttggtgttggaggtaatgaaatagaatggaaaggaaagaaaataatctctattccattcttttgtttgattgcatattaaagtatttgaatgcgctatttcaatgaaatagctttttcaccatttggtagaatgactattccattttgaaatgaaaaaaaaaagactattccaatgcatgatgagaaaaaatttaataattatttttatcaattttttatgcatttttaatttttttctattccatttctactcctattctcatttccattttgattcttatattttcattcctctcattcaaatgatgtgcttgtgctagcttatctctagtgctgtgtggtaattacattagcttttgttattttttttttttctattattcttattgcatgatcacaaaaatcaatctgttaagtattttatatatcatgatcatttgcagttaattaggagctggcctcaaattttgtggacagatataatatatatatgtataaataataatgcaactacaaataaatatatatctatatgtgattaaaaatgaaatat

SEQ ID NO: 67897 - DNA, 887 bp, Cannabis sativa
aaaaaaaaaaagtattcaatttaactacaagacaaaaaaaaaaaaaaaattgggctactcaaaagagattcattgatttttctatatatagatagatatttatatgggtatgtgcaatgcagatgcaatgaaggatatatatgtgggcacatgcttatgcttattttatttattcttttttttttaatgaacattactattaggtaatagtaatgtctagtactatttagatatatcgttttgtgattaattagtattattttctaaatattattacattaaattatatgaaatttgatatttaattaatcaataacgacattaacatataagaaagtactagactccactagtacccttatcatcagctataataattttaaaaacacctagcaagatatgtcaaacaaataaagtagcattctcttttttaatgtatatgtgtaattaatcatatattaaatatatatctttatttttttaaaattattgtatggttgggaatcattgactataatagtagatagaaaactagggggcaaattgttaacagatttattttgagggggcaaattataaaattatatattaacatatttaattatatataatgtatatatttatgatttttaaatagtagactacaaatttaaaaaataataataaaataagttaatgtggagaaatttttattttcttagtttgaatttttttatgtcgtaaaatacgtacttcaataaaatatttgatattattttttagttattttataatttttttatatattagttttatcggtgtttttggttgagtgttatagtttatttagagttattgtgaggttgatttctcattttagttattttcttttttttttttgaaaaaaa

SEQ ID NO: 67898 - DNA, 1414 bp, Cannabis sativa
  modified_base (383)..(394): a, c, t, g, unknown or other
  modified_base (663)..(676): a, c, t, g, unknown or other
tgtgatatttttatattttatttaaaaagaaactgctacacatacaaacttaaagtctaacatagtttagaaactattaatggatggtttagaaactattaatgtgttatattgatttatgtcttatacaaagttttatttaatatataaaaataaataatttatcattttgataaataattatatatttttaattattaattttttttttttcaaattatatataatttttctttgtttatagttttctttaaaattaacacatatatataataaaatattttttataatacaatatgaaatataattaatttaaaggtaaatagcggcataactatccaaacttttatgtttataagcagcataaatttaatgtttatttnnnnnnnnnnnngtactcaatgtttgtaaaactgtaatttttctctaattttgttagtacagcctctgttattgtcttaaacaaggcaagtataaagcttaaattcttgatcattgggtctagatagaaatatatagtatcagttacttccaaatgttcttttaataaattcaaaacatagtctatactgacgaaattggaagaaaattacagttttacaaacattaggtacttatgccactaaaaataaacattaggtttatgccgcttacaaacataannnnnnnnnnnnnnatgccgctatttacccttaatttactattatttatacatataaatatgttactatttttaatatattatttacacaatttttttaaatttatatatatatatttaaatttgcaatattttttatttttgccacaatattttttaatatgtaggtaatttattaatattttaactaatatttttttaacacgaagagtttaagtgaaattttatattttttcattttattttgaaaattttgtgagatttttcattttgtttaaaagaaaactataagttgcgtttagaaaataaataaactacacataaaactatgaatattattttttctacaaataaattatatctaaaaggctcacatggttaaaagctattttaaataactcatgtaggttatgaataatgtttttattatgtcattttgatctattaaaaaaaatagtattatgagtctcgaccatctctccccctagaggcaagatggcctagaattaatcccagcgcatgatgaaattagacaaacgcttttctctttggggagtatgaagaccccgggtcctcatggtatgtcagtcctgttctttaagcactactggagctcagttggtatggacttctgtgaggcagttgtggatttcttcaagtcggggaccataggggcattaatgcgacaaatgtaatccttattcccaaggtgcccaattcgaaaaagtatcgcagttcagacctatttctctt

SEQ ID NO: 67899 - DNA, 1561 bp, Cannabis sativa
taatttatttctataactacaatgaagagattgggaaatgtaagcttattgccttcattttttgaatttatcccacaaatgtagagattatcttcgtgacatgtaagcttggaaataacaatgttcatctctaaaatttccaactcatatttcctggcggcgtatgcaagttgatcacacgatcaagcttggtcggatgtcccttgatgactctacctagacatcatgtgttatatatggatagcataacatggacctttgtatcaatccttgggggctactaggagtgtaactatccgcccaggttggaaagtgtaagacatgtgtcatccagctagatgccacgtcatagtgcaaaaaatagggtaacatttgtcttccaagtctgcgcgggaccttcttggtcgcacgtggacttcattcgactaggaatcttgttcggatgggtggtgcgtgtcttgactgttgagattgatccgacatgactttgattgagagtcttttcggtgtttgaacattaaattcctcttgaattgttcctcgaattatgcactgacggttgaggagttgagcatgcgtcacttatgtcctttgcaattagtacttgagcgtacacttttagggagaaactccaaatttcaaatttttaatgaattattttccttttttaagtgcctataaaaggggtttagtacttagtgagaacctttttcaaccatttttactcttagaaaataagagcaaaagttttcatctagatcttctctcaaatcttcgaagaggtttgctgagaaatccatttacgctatcctccgagtagatcgagaaagctacaaacaacgagtaagtcacttatctctttgctttagacgattgaaaatgaatgtatgtattattttttggatttcttgccatgaactttatctgctctcgaactgttcttgactgattgtagaatagatagttctagggtttaaaactttaaccaatatttaactataacttctaattctctgactacgtattgattttgacctgaaatcattaatttccactcattcatgaaattttaaagattaccaagtacctttcgaagttttgaacttttgggtttggaaattccaattttgagtgaaaccctctttttgtccttaatctgacatggtcggtatgtaaagtctatttttcatctctttctccatccgattcttatttttctcgtctctcatttttcgtagataaaccctgataatttttgagaaggcaaacaccatatcgaccatgacttactccaatttctatataaaaatcatccccgactccgtgcaagtttatttttgcctagtgacaatctctcaaattctaattttgaagattaagaaataagcagtgaacacacaatgtccattgagaatactttattaaaaactgatttatttaactgtcttcataatattatttttcagtttatgtttaaaaaaaattatacatttttttgagttgatttatatatatatttaaaaaataatttataattaattaccgaattcttaaaaaaaaa

SEQ ID NO: 67900 - DNA, 979 bp, Cannabis sativa
gaccaggcgtaataaacaaattaaagggatgaaaaaatgtacaaaaacaagtcaaaactcagaagttcaaaatttttgggtttaggcttaaatttcctgaagattcgaataaccaaggtgaaagacgaataatgtgtgattaaaggcaaatgtcgtaaaccgtgaagctgtacagactattacaaagaaaatcacaaagttttgagcctagattttctatctatcttctacaataagttgagaacacatgtatgaaactcagaaattaaacacgcaaattaaaaagagaaaaagattgaaaaaacatactgtttgacgcctaagttcagtccagacgaagctgctcggatgcctttggtgggaatctcacgacaaacttgaagtaaaaatcttttttgctctgagtttgtttggtagagaaatcattaaaagtaaagttatgaggaagactcaaccttatttataggcaatgtgttgaaaaaggtaatcatttcaatatgcctttagacgcttcgattccctcccaaaagcaaatattgggaaatcaaatgtaatcaagtgtaagcgtcaaaacgtgatgagaaaaaccgggtttcaagacactaagtaagttagagcaataattagtcgaaaactgaagagacgcctggtcagcttcacatcgaatcatcaacagatgcacctaacacgtgtcacccattcaaagtgcaaatgcagctcggataaagtctacacgcaacttcgaaagtcccgtacagacttggagggaaaatgttatcccaattttggcactctgatgtggcatcccacaatggtgacacgtgtaatcaacttcacatatctgttcgcaagagatatgccgaaccgaacaccacatatatttgcacagacgaagccttctcaaccgggcaaaggacaacccgagcagcatgccaacacttagcaatttcaacacttgcatcgtgaatcacagaagcaa

SEQ ID NO: 67901 - DNA, 2061 bp, Cannabis sativa
  modified_base (582)..(582): a, c, t, g, unknown or other
  modified_base (711)..(712): a, c, t, g, unknown or other
  modified_base (845)..(852): a, c, t, g, unknown or other
aaagatctcggatccgcaagttttagatcaatagaaatgtgtagcagatagatttagatttagattttagataaaaataatgagaatgacgtaagggatgacattttttggtttgggtttggagatttttgattgacttacaatgatatgttgggtggtaattggagtttagtggtttgtgggacccggttactctttgttttaattgttcttttagtgaggtgcaccatagatcaccctccacccaaatgaatgtctatatggtttattgtatagtgatctttaaaaagtttagaagtgcggatttggaattgcatatacctatgtcttatcttctcattaataatagactatattgaaattcttttttggctagtggaagccatttttagaaattcgattataatatgattatgttgagtttagtaatatttttattttttaattttttaattataaaataaaagtagtttttatttaaaaaaaattatttttaaaaacaaaatgtgttctgtaaccacttttatttttaaattttaaaaatagaaaataaaagcgtgttctgtaaagtttatttttatntttatttttttattttatttaagtcgggtttaggttagaggtcagattcgggtttgggtcagaggtcgggttcagcgccaggatcgtgggaggaatttgagtcagggtctggtcggagtctaaaatatnnattaagaaaaaaaaaactgtttaaaaaatttatttttaaaattttgattctcaattaaaaaattcaaaagtgaaaacaattttatagaacatgattttgaaaaatattttcactttttaaattttaaaaatannnnnnnnattaaaaaagtgttatcaaacgtcaccatagttaagagcctctccagtgagtaatggagtccaagtggtgtatagttataatttaccatacttataaaaatattattttaatatgttctaaaagtatgttaaatttgaaacatataaaaaattgtactaaatttgccacaaaatatattattgtgtcaatttagcctacaataaatgttactttttatttactataatatcactaattattgtaattcattgacttttacaaaactttacattctttatttactatattaccattatattaataataaaagaataaaaaataataatttttgtatattcttaataaaatatttgttatccaatttttccacaatgacgtggcaaaatactcaggcgacatgtgtctttgatttcttgtagctaggcggaagcaaatgtcccgaacagactctatattgtatgttagcatgcataacctatgattacccgagtaggatggaagatagatcatccgaataggtataaatctggctttccgaactacttatcaagagttaattacttcaatatgatcttgtgaagtccagacacgaaggcaatccctacgatcgtgggattgaatcagagagattatgtaataaatgtaattttctattttatacattgtaagtaaaagaaaaatcttctctcgtgcattaaggccctataaatagtgacttagcctcactatgaaagggatcgaaagaattgcttcagagaaagagatctaagagaattactcagagattcattgtaagagcttttagagagaaaagtacttcgttctttctctcgagttaatacaattcaagggaagtaagctagtaccacactcaaggggccaaacctctttaaagtctagtgttctttattactttgttgttttttctctgttttaattacactcttaatcgcttattaattgactcactatcgttggctaaaagcgagatcaacattttggtgctttcattgagagcaaaaaccaaagttttctgtttttcttaagttttaacaggcttacaagatggtgttgcaaactcttagaggcctggctgatcagggcgacccgatggtgacagatcctaacgtgcagacccttgggaacacgagaggaccaccaaggacaaacctcaaatagaccaatacacagccacctactgtgggcca

SEQ ID NO: 67902 - DNA, 1779 bp, Cannabis sativa
tgtgagtcaacatactcagtaagaaaataataaaaatatcatagcaataacccagattatgatcaggcgcccatacacccaaccataaccctaaccccctgtccgacacggtactaagtctagaatgttcgtaggactatactatcgaccacaatattagcctatactcagtatgcttgtcatactctagccgtactgatgtgatagcatcgatcagtatctgagccaaacatagtatccagtataactctacgtatattgataccactatcgatgtaatctaacaagcttaataattatgtacactaaatatgtaaacacatatgcatatttttatactaatgttacctcgttatcgaattcaggtgtgccggccaacctgagtggaacaactgcttgacgaattacagacttaaatcacataattcgtaaaactgataagtgacaccgtaaatcactttttgggaactttaacttgaaactaaaagtttccctatcgatgaatagcatgtcaataaactaaatattaaaaaaatgggaaaaactagggttccctaaaataccccaactggtagaccggttccccaactagaattccggttctgggggttttttggggaccaaccggtcgaccggttcctataggtccacctgaaccagaattctggtttattgcaggaaacacaaaatctcactacaacctcaaatcgactccaagtttcaccaaaacttccagacctgcctaatataccacaatgaacataaaccaaacaaccaaacagctcaacatactcagaatcaaaaattaccattaaaaaactcaaactttgtctaacaaccaaatcaagccacaaactaacctcaattcagctcaactaacataattttaccatagaataaagtctcaaacagcaagaacaaatatagaacctaactcatagaaaaatcataaaacacctaacttgaaacttaagaaaatcaacaagagatgatatagaacattacctttagtttgaaaccactaaaagcttgctaagaatccttgaattatgcaaaaaaaatcccaaaccctagctggttctagggagcaagagagagagagagagagagaggagagagaggagtgagagagagagttgatttttctttcttttcttgaataaaatgaaataaaataataatattctaactgaattacatccaatatcaaattcaagcttgaattaatcgcacaagtagacaaaaacaaaagaccattctacccccacttgtgtcaaaaagactccaagctagttagggttattttagtcaaatttaaaacctcgactattctcgatattcccaatgtctaactatattgccccgctactgctaaatactaaaatgtgattctattagcgaaatgtcgcgttccaatgttgtggggcacaaaatatgtaaaaacataaaatttcatatatagcataaataatataccctgaattcaaataaatctccataaaaggataactcataaataatattctagtttcataattaaaccctaattatttgctattttccaaaacaaagctaagcggtctttacataaaattaggttacaggtaatttattaattatttttatttaatttctaaattaatcacaattgcttaataataatcgaacgacaaaaagaaaatgtaacaatcgtggttaaatatttgatgtaaccattgaaacctcttccataatataataacaaagaagaaaaaaataataaaattcttgaaattattt

SEQ ID NO: 67903 - DNA, 657 bp, Cannabis sativa
aaacatccttaattaattaaatattgaacccatattctatcaaatttaatacgaaaaaaggtctcgtttgaatttttaccttaagcctctcacttgcttgagacaatcgtgtttactatcaaaaattaaatttaattgaatttaagtatttaaaccacaaattatttaaaaatatatacataataatataccataaaataaaaaattaaataaataatttaacaataaaaacataattataatatttaatatccaaattttgtgtggtgctgctgctcctatacatatagccacacacacatatattatatacatttgggctgtagcagatggacacttgccggcggccctcttgactgcgtggtccattgccattatcacaggtatcactaaaatcagttgtatatatttgcttaaagtgtgttttttatttgaataaacgaaaaaagaaaaaaatattcatttaattagatggtgtttctatgttattaatgttaagtttgaactttttgattgaattggtttagttatgttctgggttttgtttttgcatataaactgtttgataaaattcctcaatcaactgtatttactttaaaaatgttgagttttctgtggttttttttagcttagtccaataagtgtgaaaaaactaat

SEQ ID NO: 67904 - DNA, 772 bp, Cannabis sativa
ctttacatatgccaccaaaaccaacattatcattaaaaaaagagtaatattgtttgtcatccatatatatgtatatttgtattttcatacaacttctagtgcatacatcatattttaatttagagaattgctaacttctagtgcatacatcatattttaatttagagaattgctaaaacgcctaatatttttagtggtgttatatatcgttattagtgtaattaactagcgtgtaatttcatataattttaaaaaataacttttaaagaatatcgctgaccattcgtaaaatatcatctatgtagaaggtgctggacagcactagtaccccaataacaaataagttagaaacattaagtttttctaactaaattgataccttcaaacgaactaattgttcttcaatgtctacaattcttataaaactttaaaataacttgtctgagaatggtccaattctctcaaattcaacaattgatgagcacaattcaagctctcctacaattttgggcatgcatattgaatcttttacaaaatatgataattctctcaaatttattgagtaataacgtccttacattatattggtggagaaataatgtgttaaaacaaagaaaacattgcaaaaaaatgaaaaaaaaacaataaaatagaagaccaacacaaaaagcaaatattacacacaaaacagtacactcataaagcactaatgtgtataattataaaattataagaatatgattatcttaatttgcttcagcacttgaactct

SEQ ID NO: 67905 - DNA, 544 bp, Cannabis sativa
tttagccgccaatatcccatttttctattatattttctagtgtgttagtccgagtactataaagagaagcatatcactactattcattttggtactaaacttaaaagtgtaatatgagagagttggagggggtgttaaaagagttcattgtgtatttgatcaatatctctcatgtgaactaaattgtaatggtgctaggctaatctctcttgtcacgtattgtaaaatcactttggagattaaataaagaaatcaatcattgttgaaggctgttttatcagattgatttctctctcattttagttttattgttgggtaaatactattttggactctgtgttttacaaaagttaccaattggactctctgttttcttaatgacaaaataaatcttatattttctaaaataataaaaataggaccggaagctcaattttcaattttttttaatataaccaattttaagacagtttttaacacgaacaaatatagaaaatgtaactgttggattggttaagtattctagacattgcagcattaggaa

SEQ ID NO: 67906 - DNA, 620 bp, Cannabis sativa
cagaaaaaactcacaccgaaaaccgcatctatagattttggactgtatacatatataggtttagagagagaaaggaggttttgggggaattgagagaagaggattagccatggatgaagcttgagatggtttttctgagaaatgggtctaatgattgattggactctctctctctcttttgttaatttgttaaacaattttaaattttgtttaaataaaaattagtgttgtaattaattaattaattaattggtaaatactatttgggacaataataatattattattggcatcagcgctctagtgctgccttttgattagcaatattctctaaaagttatttttttttttaagttataacagactcgatagttgattatgattactatgacaccgaggaaggtgctaggtatgagtgatattttttagcaattttctattgtattttacaaaagttaatgattagatattttatttcgataaatgataaattagatcttgtattttttaaaatattacattgaattgattttctgtccaaaataaaacttaaaatgttaattaggattttgaccttcagaatttttacatgtagaaaatcatgttcctgaacttttcag

SEQ ID NO: 67907 - DNA, 996 bp, Cannabis sativa
ataacatgaacaagaattcatgataactcaggagttaggccgatctagtattgatcatcgttataatatgaattaggtctttatgataaacgacatgataataaaaaaaactttattcatatccatcattgtcatatataatctctattatatacaacatcttcacataaatgtctcactacatcagtaatttgaaccaagattacttgcactaaagaacagacatcagtgaaccatatatactagcaaccattgattaaagattctataacattaatatatagttgtctgttttattcatagctaagtggtctaagttctctgcaaaactacaagtcaaaacctcatatatgaataaagaattttataatattcaatataaattattcaataataaatattaatagtttaacattcaagcgtatatcaaaatgttcaactctttattaataatcataaatgtctttataggattttcagggcataaaccccaacaacatatgcctaagcatacggagtacttccaacacttatgccgttgtaacaaatgcccaaactttgtagatgaaggctccatccatttaccctccagcaactacctttacaacccctatggtttatggaccaagtgttttcgcgcaggcagctgtataggttagtttttccaggttcggagctgtccaaactagatacagtgccgctcccaaacaaacgaaccaaaaagcaaaagctctatagtcaaacgtaacccagtcagggagtaaaaagagttcgaagggtccaaactggagtgattctacaaagaagagaaagacccaagagtcaagatacacttagtacaaaagtcttgtagatactcgagagaatgtgtataaggaaacttgtaacatggtccattacaataagcctccgccaatgtacaaggacagaagacaaaaaagagatccaaacaataggtgcaaatatcacgacgatattggacacaccacaaatgaa

SEQ ID NO: 67908 - DNA, 609 bp, Cannabis sativa
taaaaatagcagttttttgtagtggttattgttatattgtatttttaactatgtcaatgttttaaattaattattatttttgtaataaattttaattggaggacgaaaatataaaattatttgttaaaataaaataaaagttagaatgcaaagaaagttttatactaattaattggtgtagattcaaaatctaacactattaatggtgtaaaatttggtgcacactaatttagtgcgtacgtaatgtagtgtgtcatcaaagtgaaatagtgtaaagattctacactaatatggtgaaatggtgtatcattggagatgctctaagaccatttcaaaaggttacactaatttggtgtggaatctactccaatttaatgtagaattttttattttttggtacaataactccaataattcacacaaaatagtttacaaaataaatatatttaaatgatctgacattttatattatttacattaataactaaagatagataatttatgaaataattagttagaattatatcatagctactagtaagaatttaaaattttaaaataatatttattaaatcaattaaatgctaattttttttaaaaaaatcttct

SEQ ID NO: 67909 - DNA, 765 bp, Cannabis sativa
tgggataagtgggccctaggcacaggcctagtccgcctatgcccagggtcgggactgagggtaatgtactactaaatgtcaacattatattttaattaatctaaaattttactactaaatgtcaacatttttttttcaattaatatcaattaatacttaaatgaattttttaacgaaattttttatatataactcactatttacgtcataatatttctttataattatatttattttagagtgatcattataatgattgataatttatttttgtacgaaagattcttataaatgaattgaagtttatttatgaagggataaacaataaacatagtgtgatattattagtaaaatatgtgaaaaataatataaaaaataaaaaaaaatcttaataataagaatttaattatgggaaagataagttggagtatgaagtcattacagagactttggttttgtttgaaaagcaaaataaggcgagaggtgtggagtctcaagcccttattttagaaaataggggagaagtcaaaacaaagaaggccaatatagaaatgacaagttcagaggcagatcaaaatccagaagcaaaattgatggctgcttttactgtggcaagacaggccacattaagaaaaattgtaggattttaaagcgagaaatgcaggaagccaacaagaaaaaaaacaatggtgacaacaacacagctacaaccgccactacaaaagaagatgtgccaatagtcattgtcgatgaatgtttgcatgt

SEQ ID NO: 67910 - DNA, 972 bp, Cannabis sativa
cgttaaaaatgcccctgagctattgagattgttggatttaagaacttttttccaattttagtaaaaaatatctaatatggatgaaagttcaggagccataatttagtgcatgtccaagtttgagaaacataatttggtagtctggagagcatgatttagtacatgaggtatttttaacgaccttaaaagttcaacaaacataatttagtacatgtcaaatttaaggaacaaaaataataattaatcttattattattaacaataaaagcaatgtttattattataaccatacattagtgtatgtatgacatatcaacatcataattaaataaatcatcagtaaatgaaactgatgcttccagtacaagaaagacacgtatacttttgttccaaaggtctttgaatagccaccactgcccgggaccagggtgccctataatattagaatatacatttttgaaaaaaaaaaaaagaagaaaaaaagttagaaatcaagtcctaatctcaagataggtttttcgttaaatggaaaaatattaagtgtgtaactaaaatttatgagaaaaaaagtttgttatttaaattttattaaataaaaataattagataacctttgtgagtagtgagtgagattaacattttacacatggcttatattatcttaaataattaaaccactataattaagtatccgtttaatatagcaattatttatttatttatttattttgtaaggaatataacaactaattaaaaacggtgttgatatatacagtctctacacagagtcaatgtgtgtgaatttaattaatataagccatgtgtaaaatgttagttttccttcactattatacttaataatatttatttttaagatgtcgaattaattaattatattatcttaagaagaagagatctttttggtgatacttggagtgacaatagactacgacaattccaaggttgctgtaa

SEQ ID NO: 67911 - DNA, 990 bp, Cannabis sativa
atcttgtaaccttttactccatctagatagccaagaaagatgcattttctggctcttggttctaacttgtcttgcctaatgtgagcaaatgcaacacaaccaaatactctgaaatggtcataattggcattcttccctatccatgcttctataggagctttgaactgaattgcagatgaagaacatctgtttattaagtagcaggttgtgttaacagcttctccccaaaaattctttgataacccagcctatatcaacatacgtcttaccctttccaaaatagatctattcattctctctgccagaccattttgttgagagtttttgggaactgttttgtgtctccttatgccaactttcctacaaaattttgttaacaaatctaaacaagattccattccattgtctgttctcaaattcttaacctttcttccaatttgagtttcaagcagggttttccattccttgaacttagttaggacatcattcttgtttttgaaaatgtgtacccaaacatatcttgaaaaattatctatgagtgtaaagaaataccttgcaccacctctggaaatggtcctagatggcccccacaagcttgaatgtatgtagtcttagatgcccttggatgtgtgctttcctgtaccaaacttgactttagttgattttcctagcagacactgatcacagaactctagatcttatagtttgtccttcccaaagacaccctttttctctagaattttgagacctccattgctgatgtgccccaatctcctgtgccagatttttgtgtttcttttgacatcacaggctgcaagattgacttgactgcttagggtttttccttgtagtatgtagatcccatggtccttgactcctttcattaccatccttgatcctataatcaccttcattatcccactttcaattcgaacagtgtacccttcttgatctaacatagccatggaaattaaatttctttttaactca

SEQ ID NO: 67912 - DNA, 890 bp, Cannabis sativa
ttttactattttagaaaatataggatctattttgtcatttaacaaaacagaggatccaattagtaacttttgcaaaatacaggatccaaaatagtatttaccctttaaaatttagtacaatagtattttttatcatttttttttaattatttttgtgtattaatttatgaaattatccatattttgcattaggtcccagaaattcttgttcaacctggatggtcctcactcctcactagatagattccttccacgaacaccttatagataccaaccatgaaaaaaagttagaaatggaccaagggcattattgtttcattaatttgaaaaaaacaactgaaataaatcaataaatagataaaaatatagagtttttggaccctacaccctattaattattgtttcacttgcacttaattttctaaactcaaattttaatggtaaaactttctaaattattgagctgttaataaatttaaggtgtcagctagctaactgtcaccatagactctttatgtgtacattcttatacacatgacaagtttatattcatatacttaatattattatttcaaattttattttaaaattaaaattaaataaaattataaaaataaaaaataaaatatttcaaaaataaaaaaatattataaattttgaaataatttttaaataataattttagctgcattaatgtaaacatgtcacgtgtataagagtgtacacataagtaatttattttggcagttaactgtaaaaaatagatgacagcttaaatttgttaataattcagtaatttaaagaattttactattaaaatttgagtttagagaatctatatatataaataaaggaaagcataagaggattgatgtggcatcttttccttc

SEQ ID NO: 67913 - DNA, 1141 bp, Cannabis sativa
tggagaataagttcaggagacatcaagtcgggaagccaggaaaataatcaggatgtgatgtttaataattcgagttggaagcttcagggtcaaagaggaaagatgactctaagaggtcgtccaaagataagaaacataagaaacgcgacaaatatgtacccatttatgttgtctataccgagcttaatgaaactcgggagagtatctacctcgcacttgaacagaaggtcgctttcaataaaccaaagcccatgaaacatgcgagatataaaagtcacccaaccagacgatgtgaataccatggagatattgggcatacaacggaagagtgtcatcagttgaaagatgagatagaaggcctcatagcgcgaggacacttccagcaatatgtaaaggggcaggacaatgtccatgatcagcccggtctatccagtaacccaagcgactagggaccataaccttcctttgtaggaggaaaggatacatcggttatcttaggaggataacacattgcaagaaaaataggataaggggcaattagttcggtcaagcaattacgtaaaagtattgcgaagtaatcaaatactggctcgcaatggctgtcgtatagagctgcaacacagaaaagccaatcgtcgactaatggtggtttgagcagaacaacaaataacaaagatcagttcacttggagctgtgggaatatattagggattgaccctaaatattaatctcgctttatcaaaatcagatgcctctagaagattgataaaataagcaatagaactggaaaagctcttatgagattaaatcgataataaattaatgattgcaaatcacatcactgatgtaatattttgtaactcagtcgtgaataaagttaatcatttctttcgataagtaattataaagtgtgaccctttaaaagtacttaaggggcatatttgtatgattaaccggaatttatctagaaatacatggtataatgcaaacccgccaattttaaaaaaaaaattaaggttttcaaccaaaccttttcgatgagaaaggggtcgaactgttataacttcctgaccaaacctttttgacgagagaggggtcgaattgttataacttcctaatcaaacctttttgacgagaaagg

SEQ ID NO: 67914 - DNA, 739 bp, Cannabis sativa
gcttttgagagcgtggcaggtaaactctgcaacatacatctcctcgtactccttgtaggtccatgcatttcaaaatacttaagatgtgataaggattttccttttgagtatacattttccaggtcggcattttgaacttgtggggcaactctaggatactgatctctgataagaaaggggatccacgtgctcggtccaacttgaagtcattgttcttctgatcggccaaaccttggaacatattttttagttcatccaactgtgcctgcatggatggattaacttgttcagtctcttggccgaccagattcacgtcaggatctctttgagagggattttgaacatgggccctgggctgaatggttggcgagacatactactcatctagccctctccttatatttagatcatctttgagatcatgagctctacccagtctattaaatatagatacactaggttgtctcagtgactggttggttcggccgatcacttggccgaaaccattaacttgggtggagttattaagtataacctctcctgacaaattactagataaggtctggctgcctaccacttagccaataggtggaacctgtgatcggggattgggctgctgactgttcagggttataaaagtagtgttcccaactggatcttggtctaactcgcccagcgggatgctggtggcaagttcgtattagtacggtggctagtcttgttcggttgttgatggctg

SEQ ID NO: 67915 - DNA, 706 bp, Cannabis sativa
gtaaaataatttccaacattttataactctaagtttttcctaatcatgtttgtcttctccacaaagccctacatggcttagagtaagccccaatggcatggtttaataagctggaacaatctatgctacttcagtgggatcttcaaaaatgcaaaagcagtcacctcactcttctttacaaagaaagcaagcaagctcttcctccttcttgtgtacgtagatgacattcttattaccggagaagatacaactcacatttatatggtaatctctgatcatcattctcaatttgctctaaagaacatgggagcagtttagtactttcttggctttaaggtccatcaagatacctctggtatctatataaatcaagccaaatgtatatcaaagaattattggttaaaacaaatatgtacagtgctactcccactctcactcctatgtgtcgaaacggtaagttttcttctactagtgattaccccatggttgatccatctctgtacatgagtgtaatcggtactttacactacctaactatgactagaccagacatatcattagctaccaacaagctatctcaatttcttcaagctccagctgttgaacattggaactcatgcaaaagaatactcagatatctagttggtacctctactcttgggcctcattttaaactaactcaacatcttcaattggttgccattct

SEQ ID NO: 67916 - DNA, 1015 bp, Cannabis sativa
  modified_base (980)..(980): a, c, t, g, unknown or other
ttctatagttgtgttatagttatgtttatgtgtgtgtttttgtacaattattttaagttgtttttaatctatacgcatttatcatggtatatttttttagtttatttctgataatttttttgttgtatatatgtgcattcgtttttttatttttatgttgtgttttagttatgtttaaatgatttttagaatatcttttttgttatacaattattttttagttgttttttgatttatgtacatttgttatagtgtatatttgtagtttatttttgataattttttagttggatgtgttttgttttgtagatgcagatacatatatttagtttatttttttgataaatttttttaaatacaatgataatttttttttttttaattgacacaacgtgcactagtagatattaaaattatattgttatctagttaatttttgttgttttaattatatattacccaatatattatataactcatttttaaaatataagattttattatttctattattaatgtaaccattcatttaatttttaaaaaataaattataattttagctgatactaactcaaataagaagagagaaaaaaaaaaagagttgaaagtatgaaattgtaacaaacaaatttaataaaaaaaaaataacatagtagtacaaattacaaaaagttaatcaaattgtcaaaattaagtaaaaaaaaaatcgtaatagaaaaacatgttgaggaattgatattgttttgcatattgcaacaaagtcgatatcttgttatttttctgttgctttgtagcagttttatagttgttttcatgttgtttagaatattttataatcgttttagttgttttttcgttttactaaaacaatttttttattattataaaacttgaagacaatacttttaaaaacttaatacaataaatgtaaaaaaaaaaaaaaaaatcgtaaaaatgaaaaaataacaaaaaaaaaaaanaaaaaaaaaaatttttttttttaagggaaaaaaaa

SEQ ID NO: 67917 - DNA, 542 bp, Cannabis sativa
aaataatattgaataaaaaatgtagatgaagtattgaataatattctattaatatagagtatgaatagattatttaaaaaaaaaataaaaaaaaaagaattataaacatctgatgtggcgtatttttagtttgattctttaattttttctttaaaaaagtttctattatgaaatatttgatatgatgtgagtagatataaacatgtttttttttgttttttgaacaagagaatatctttattcaaaacagccaaagaagcaacaaacaatatagcggcagcagccacacaacccacactactagtaagagattacattaataatatacctctctaacttgtttttactccctgtacagcaattcaggatcctaattttaactaccctttttacctccctgctgataaaagtggcagtattacatttcaaatcaaaaacataacaatttctattgatccaaatacagtacaaagttgccatgactacagtattcaagactctatccgaaagctagaagggggtctcgacaaccaatctttgat

SEQ ID NO: 67918 - DNA, 879 bp, Cannabis sativa
gttgaacttgtcgaaggatagcacctagaaacgactttgctagatctgagtgcttacttgctactgtcaactcgggtactgtcacatatccttgtatacaagttgatcaccttaatcttgagaggtaaggctggaaatttgtgacacgacacgactacataacttgaaaacgatacaatataaataggttgggatgaaatatttaattttcgtgtcaaagtcggctcgacacatttaacatgtttattaaacgtgtcattgtcaaattaacacgcttaatcccaaaatgacacgattataacatgtataagaatatatatatattttataaatttataaaatgtaaaatgaaataaaatctcataaaaatacttttcttcataaaaaaaataataataaattaaaattatgaattttatgagtaatatttgtgtttatatacataattatgttaattgtgttatcatgtaataacatgtttaatagtgtgtcaaacatgtcaattttaaatttgtgttatgacacgtttattaaataagttattgtgtagtgtcgtgtgacctactaagaatcatatcgtgtttgtattggaaatttgatttttttatgcatatattaccctaaaattaatctcataaacctatatgtattaatattggtcatatatgtcaacgttcccatttttcccataatacccctccccatgccctcctctctatctctcttcactcttttcattctcttcatcctcctcccatttcactcttttttctttatcaaagtcacactaaaatgacccattttacttacattttgcctcttcaaggtttgaaaaaaccaacactgaagcaatacattgttgagccaccgaagaaattt

SEQ ID NO: 67919 - DNA, 561 bp, Cannabis sativa
cttctacctatgacagccaaaccaaagacaaccctctgccggcgcgggtggtctaaacggaccacacctccattcttgcagccctcagaaaaacccagaaactctaatatctctctccctttctcgccagtttcaccctcgctggaactctatttctctctgtctctcttgattttctcagtggagccaccctcgttcggcgaaggcctaaacggaggccatggctgacctccacaagccacgaaatcccaggatctcgtgttccccaatccctctcttgctctcaaaccctttctctctcgtcgtgtcaagctcagtccaacgttgtgatccctctctcgcatcaagctcgacgttaaccccgtgatctcgagccgtgtgcccctggggttttttgggcctacggacgatgatgtgtggtcctatcggggcgtgggtgatcggatcacggtggtcccgccgttccagtggccgccgcacaaacgtagagagaggagagaaagggggggtgtcgagtgaggaagaaagagaattagagtttccaattaaggtttatcattt

SEQ ID NO: 67920 - DNA, 1407 bp, Cannabis sativa
aaacaagtaaggagagagaggatcaccctgtctaagaccccgagtaggctgaacactaccagtaacactaccattaatcaaaaaagaaatttgagtagtagaaatacacctcataatgagagacacaaattgttggggaaaattataatgggacataatactatgcaaaaaatgccattcaactctatcaaaagctttagccatatcaagcttaagtgcagcccaacctaatttacctttttttctattggtaatagcatgcacaacttcctgagccagaagtatattatcaaagataacccttccagaaacaaaaacactatgagcaggggaaacaatcttacttaagataacttttaaacgattagctaaaaccttagaaataattttataaaatgtgttacatagactgataggcctaaaatcttgaattgagcacgttgtttcttagggataagagttattaaagtctgattaatataggaaaaatctctatcattattaagacaatccaacacagccttaacaagatcttggcctagagtagaccaattcctttgataaaagaaagcattcaggccatctaatccaggtgctttgtccccagaaatctggaaaacagctttcttcacctcttcagcccgaaaaggctcccctaaataatcaatctcaaaattattcaaagggggacctaaaacagaaagaatttgttcaacagaaccagaatcacaaccttgagtttgaaaaagattggcaaaatatgaagaaacaatactactaataccctccaagctattaacaacctccccatgatcagacttaagaaatttaatagtattagtttttttccttttagaagcaaatctatgaaaaaacttagtatttttatccccagcattaagccaattaacacgagcacgctgtctccaatacacttcctctttatacaagaaagcatccaactgagattgtaaaatcttaatctcagccacatgactctcctctaaagggatatgattttgaaggtcagcaatacgtttattaagagcaactattttatttttaaacatactattagtacaaacattccaagactttaaagaagaaatgcaagactcttgtttatccataaaactagcaaaattagaattattagaatgtgaaggactcaaccaagaacgctgaactgtttgataaaattcctcattttccaaccagacattctcaaattaaaatctcttcttagagcgaataggaatagaaaaagtatctaacttaatatctacttttaatactctatgatcagaaccaaaaaaacctaaatgatgcagaatagcactaggaaacatatcaacccaagagtcagaacacactgcccaatctaaatgttcataagtggatccatgt

SEQ ID NO: 67921 - DNA, 1057 bp, Cannabis sativa
tcgcagggaacgaaggaccaaccccgaaggactcaacctgaatcaaccaacctcgagagaccaatctgcgaggtatcccaaccaggagacacagatcgacgaagatcccgaatgacgtaaccctcgcagcagaccttcgtgagacaacgacgtagaatctgcctcctcatccttgcatggtcgcacacctagcaagtacatgagctccggttctgtggagacgcaacagggaggacgatatcaggttcacaggggtaatctgcgttatcaccttaacgctgttttcagagcacgctcccacgcccctcgtgacgaggaagggcccgtgatccccaaatgggcgatcaaggtgtaaacactcgaacaaacccgcctaacgcaccagcaacgactaccgaggttaatgtcccagcaaacctcgctgcagtagccatagcccctgcagccgcagcagtcctggctcccttagccagaggtattgatcaaagcatgctcttgcaggctttgaaaatgctcgagcagcagagaaagcccatatacaagctgcacgggacctctcctttcactacggaagtgcgacaagctcagctccccaagggattccggttatctgaatccctaaagtacaaaggtacctctaattccattgattatttagaaaaattcaatactattatggaagtggatcaggtacctcagctcgaaaaatgtcgcattcttgcggcaacgttggaagaaaatgcccacgattggttcagccaattgcttgagacctctatctcgacatgggagacctttgttgacctgttcctcacgcatttccaagccacgatgacctataggctgccctataccactctggctaacatcaaacaagagcccggtgagtctttgcaggactattttaagcgttttaatgccgaagtaacaaaagtttagaaggctcccaagtcttcgctattctgtatgttaataacaggtgtcctgccgagaaccgatttttggaaggagctgcaggctcgaagaccagaatcgctagtcgagttctttgccatgg

SEQ ID NO: 67922 - DNA, 1587 bp, Cannabis sativa
  modified_base (1526)..(1528): a, c, t, g, unknown or other
ttaccccaaacataatattttaatattttgataactggtaaaatatataatattaatggatactatttatttgttacacaaattcattttccaattaattaatgtcaaatattttgattggcaaaatactcacaaaatttcactcatatattagtgtctggagacctactagagtcacgtaatcgcgtcaaaatatatagattaattatgtattttattttcattaattacgtttaaataaagacagtgtgatataaatttttcttaaaaataatgtgtatcatttgtcatattgtttaaatgtatgctgatatgatttttttcaacattatatactaataaaacaaagcaaaaatattaatataagattatggttagtttaatgtaatgaaaattgttatgtaatcaaaattactattataatatttgattttcttttaaaagtgttgtaatgagataataaggtaatgataattatattataccatggaatttttattttattggagaagttatataatgagaattacatcacaaaaataaactgactcaaatactatttttatataagaataaaaattaaaatatagggataatttatgaatttattacttattcaaattttattccaaaaaaaaataaatatcgtaatcaattctaattactactctcatttcaccaaactaaatatcatttaagctcgtataattttccctatattatttactaataagaaaataagggaaaaaaaattaaaaaaaaatagcaaacaaaattgaaaaaccaaacaaaacataaaagaaaaaatattggcaaaaaaatgtacaaatgaaaatgattaagtacatatattttttgaaagtgaagtgcataaaagatttttttttttttttttaaaaaaaatgagattaaaaaaggattgagatttattttatttttttttttttaaaaaaaagaatttgctaaatatagtacaatttttacatacatcattagagatattcttgcaaatttacgtataattttttttaaaaaaaaaaaaatctaatcaaagttagaaagatatttacatattaataacgaaaatattaaggggaacattaaggtgtcaaacactacaaaaggtaccataccgttattggtgcattttaatatcaactctcaaaaattttaatttaattaataatttggaaaacttctaaccaattattgggtagtacatcagtatggtattgaatacctcaaggtgttacatagcaataatagtactgtttacccaaaattttatgatgatgatgtgtcaagagtagtaacacgcggcacaaaataccgggactaaattaatgaagaatatgtaaagtcatgaccattgagataaccgccaaccatgaagtgttagtctaggagtataccccaacctcctacactttcatggtacaattcatgcattttatcatagatacaatgacattctcaaaggtatatggggacatcaacattacaccattgttgggttttatgccctnnntaaaactcaatttcaatgtaatctattttattcaaaatcaataaagaaacataagtatt

SEQ ID NO: 67923 - DNA, 627 bp, Cannabis sativa
taaagttgacaaattcaacattaatgatgttaggcacaatattaaatgagagattatacttcaaaaaaatacgatcaacatatatataaacaagatgtgtgctctattcataagatgagcagcctgattagcagacgatttgacaaaatataaagaaacatccctaaattaaagaaaataaaagttgcttacaatcctcaacggcactaccaaaagcagatgacaaaacattcaaatttctaacaactttaaccaatactagacaatcaggataatactataacattcaaaagatcatgcttcaaccatgataacagttcttgagagtcatgggggctttaacattttttggaatataacttgcccaatccacagtcctgcagtcccatgccacgacccaacccttgtgatcccgaacaactccaccaaaactatacctttcatcctcgtcaaacaatgcagaatcaatattcagtttgagtctttcataacctagtttagaccatagctcagccccatctaaaagataccaagtatcaaacgcaggaataaacttctttctcgagattttttccactgatcaagattgttagatttaaggacgtttgtctaattttagtaaaaaaa

SEQ ID NO: 67924 - DNA, 1602 bp, Cannabis sativa
tatagatttaattcgatccaaaaaatattgagtctaaaatattgaataaatatgaagtagatgtaatcatttgacaaaatttaatggatatacatgaaatagaaccgattcaatgaatgttggatcaatttggataattaaaattaattaaatctaatcagttgataaaatttaacactcagtcaatatataattggataataagcctaaaaatattaaatgtagtttaataaacactttaatttgtactttctatatttattaatgattaactttttttttttttttttgacaaaattgattcattaaatttaaaaaataaatgtaaagaatgggagacatttaaacaaattcattatattaattgtttttttttttggtttgacaatttcttgttcccttaatatcatacatttgcactaaaaaaatggcttgaattgtattttatataaatatattatcacttcacttcttatcttcttatcttgttttgctagtgaatactaacatgataaatattgatatatatgattgataatttttaatttaattgattagttcgtatttagttaggagaaatgaaaatttaaaaatatgaatgagaataagaaataagaattaaaataaaatttaaaatgtataaaaaaatatatttttttaaatttttttctaatcttgaattagaatatttttttttttttttttttgcattttaaaatggaataatcattttactaaaataatcaaaaaaactaatttgttaaaatgacattttaatattttaatatgcaactaaatagaataataatatattacattctattttattatcttaaactaaacatcacatgatcaatcaattatttttaggaatgattttctttggtcagattttatgaacaagagatttgattcctttatataggataatgcttgagtaaaggtattaaaaacgactttatgtagagtcatttttttttaatatgtgtcattattttattttatttttattaaattttcttatttaatttttttacatatataattatttgttaaaatactatcattttcttaaaaaaaaaaaaaaactatcattcacttctctcttcttctccttcatctttttctctaaaagttcctaaactataactaaaactaagaactttgatattttttttaaaagaaaaatagaggttagaactcaaaaattctctaatggcgaagtcaaagaacaattaaaaaaaaattgtacctatctctcctctcaaattatatccaccaaaaaataattttttttttttgtgaatatgagtatttttgacaaataattataaaaaactagctaattaaagaaataaagttaaatatgaaaataaaatgaaataatacacctatttaaaaaaaaatgactctatataaagtcatttttaatacctttactgaagcattatccaaatatatatatatacaacataaatacaaattttcttaaaatagtttaaaagttcattattttatatctctatcatcaagaaaaaggagtaagtgtcaaggatcatacttattataatatcaataaaaaaaattgtaaaatatatttaa

SEQ ID NO: 67925 - DNA, 871 bp, Cannabis sativa
ctactacaaaaattttcaaaattataatagctagctagcttaataacctataattatatactttaacattttttttttatcgttttgcgattagctaataataatctttaaaagtattatattaaattatataaaacacgatacttaattaagtattggataaataataatattaagtaacttttatcatttctcaaatggctactagctaggtatatataaattatttgctactatctacaaaaaattgtcattgatttttgcagctttaaaaactacacgatatttattatatataatagcaaataattatatatacatatacttggatccatgcacgtgcacattcatgcaaagagatttaagacacgttaattcaatattacatataaaatatgtaagagatagtgctagtacacactaaatataaatacccaagatttattttaataaaattactacataaattacaccaatcacaacaaagattaattaattatgttaaaacttaaaataaaagtatgatcatattgatctatggttgaccatttttattgttacgtaccaagaaacaattctatctaagcaataattagctagggggttagctaatgttattcattatcatacatctttactatttaattaataagtttgtacgtatatgtcgcatgttgaacattgttatgcgaaattcgagctcttaagctcatcatgagttggtgcaggtggtggtggtggagaatgaactaatagtctactacgattacttgtaccagcaaagtttctttcgtcaaaagatgcaggtttgtttggattgggtgaaggtggttgattatttcctctctgtaaagacgaaatcaataaatta

SEQ ID NO: 67926 - DNA, 788 bp, Cannabis sativa
ctatattgtacccaactctatgactattcaggctgctccctcaaattctcagcccacaaatcaatctctctctatacaggcctcaaacaacaccacttctgcatctcagtcatcaccccttgctgtatcgccatctcacagcccacaccaagatcaatctagctcaagtcacagcttctctacagcctcttcccttccctaccctcttcctactctcagatctgagccaactcaaagtgtcacccacaatacaccacctgtcccaaccaataacactcactcaatggtcactcgctcaaaagctggggtgtttaaaccaaaaagttacttcactcaaattcacaatctgttagaaccaactaatgtcaaacaggcccttgccaatcctaaatggaacaatgctatgaatcaagaatttcatgctcttaagaacaagaaaacttggatacttgtccctcctacaccagaaatgaaagttattactaacaaatggttgtttagaatcaaatataatgcagatgggtccgttgacaggttaaaagcacgtcttgtggctcgtggatttcaacaaacaccaggtctagactttcttgagacattcagccctgtgataaagccctgtacaatccgcattatcttctcacttgctgcaacttatggctgggatattcaacagatagacataaataatgcctttttaaatggagaactcaaagaagatgtttttatgtatcaacctcaaggttttgttgatcccgattatccaacacatgtatgcaagttaaaca

SEQ ID NO: 67927 - DNA, 779 bp, Cannabis sativa
agtatacctctatataagaataattatattttaataaaatatatacatatattttgtaaatttatttacgtagaattaataattttattccaaattgtaaatttgtaatacatgtataaacattatatttactcaaaaataattctattaggatatagtattaataatagtttattgttattattgttacattaatattttttggtattttgatttttttttttctagtgtaactctatttagttataacctctcaattataatataatttgcttggtcccaagtatattcttgaataggggttctactgtatttaatagcttgaagtaaaatttaatcaatacagtttgaccaaacgattttttgttatatataatcaaataattaattttgaattcaaaattcataaaattgaagataatttgattgtattgataaaattttatcaaacaaatttaaatttagggtgccaaatatgtatgattttaaaatatacggtaccaaataagctttattaaaaataaatactaccgaatttttatttagataaagagtttttaacggttaaactcttccaattatcgtttcacttgcacttaatcctctaagctcaaatttttacggtaaaactttccgaactactgaactgttagcaaatttaaggtgttgtttgatgaactgccaccatagactgcttatgtgtattctcttgtacacgtggcacatttatattagtacacttaatattattatttcaaaataaaataaaattataaaaa

SEQ ID NO: 67928 - DNA, 1059 bp, Cannabis sativa
ctttaaaatctaccaaattatgtctatcgaactttaatatgtaccaaatcatgtcctctgaactttcatttatgttaggcattctctctaaaattagataaaagtttttaaatttactaatctcaataatcaagggggtttttaacgatcttataagtttaaagggtatgatttggtacgtatcaaaattcatgaacaaaaatcctaattaactttgttattattgtattaaatcctaaatattagaaataataataattattatggattaattggcttttggatgatgtagtaactgttgtatttatcattcaatctattattatattttttttttgttagcaagaataccatattgtattaaaattgtatgcatggaatagagttacatatgggaggagaagtttttttcaattgaataagctagaagagtatatttagccaattcatagttcaaatattactaattaatatgagaaagagatgttcaaaaattttagaaaataaaattataatgttaggaaatagaagtactagaggtgtacagaaagttattaaattcaattataaccgaccgatttaattctaattgatctaataaaatcggatatccaattataattggatcagattggatgtaaattttaaaaatccaatcggatcagatcggttgttggatgagacatccgatctaatggataaccgaaccgaaacgatccaatcatcattcagtggtcattcaattatatttatatatttttaaaatacatttataattttacatatttaatatattttaaaaaaatattaattgatttaatatatataacacatgaaattaaagaaaaaagaccttaaatttaaaatattaattctcatccttttaaacgctaataaaattgtcaatctgtattgaataagttttatttgtgatagttttattatgggattatgataattaggttaaactaaactaatgtctattatgtatgttggattattaggtcttaaattatattatatatatatttatacgagtgcactcttaataggtattac

SEQ ID NO: 67929 - DNA, 810 bp, Cannabis sativa
gcctccgtgagcccatcagctctttcccttgacggtgagtagtctcttcaggatgagtgttgtcgttttccccattatcaaccatggacaaagaatttcttctttcgtttggagggatttttctgagctttaataacgtaggctctcaatgaaagcaccaaactgttaacgcagattttcgttaacgaatatgaacctatttttgtaataggtttagcacagaaattatagaaaataataaaaacaaaaataacacctgatttttacgtagttttgcagttaacactgcatagtccacgagtcaatcttattcagacttttttgatacaaaactagggttctttacaattagtgtattcttttctctctcaaggatttttccttcagtttttttgtacattctgcccctatttataataacataggttggcagttaattacattaaaattcgtatcccacaatgatattttcccgaaattatgggttataattatgctccacgtacataaatgtatttattattagaaaatcctacaattgtgattaaatcgcctttaaaggtcaacgctgatgtggattaagacacatcgtaaaacgtgtctcgctaaggcatctcgcttgatacgtgaaaaacttgatttattcataagtcttccggcaatggcatgagcactagtgtactgagaaaacttaagaactgctctttgactataaggccttgcagactggacaatcatgtattgggggctctcaataacaacaataatcctgtagcgagctggagtgtaacgcccgtattttataataat

SEQ ID NO: 67930 - DNA, 1055 bp, Cannabis sativa
agccattgacttggctaccacgggtgcggttcccaaagtgaagtgattgggagttttatcattctctttaatgcgatgacgtctccagtaaaaccgcaataattgataccacaggtcgcagatccttctcatgtaacccatttgcttgaaggcctagaaattcaagacattcacgaaacttccattgtccacgagtatgccgtggacattatctccctcaatgttcgcgacgatgaccagcgcgtcagaatgtgtgtgggggacccacctcgcatcactttccatgaatgtgatatcgtcacattcccttttgaatagcttttccggccgttcactcaagttgttcacattggtgagtggcttatctttggcttctctcgcatatcgctcttgcgatttcctggaatctcctgcgatatggggtctgccaataatagtcaggatattgcgagtagccctcgaaccactcgcattttgattttcttctttgtcatccgcttggggatgactttcctcatttttcttgtatttgttgaactttccccgcctgattagttcttcaattttgtcctgcaaaaaccaacattccagagtagtgtgaccaatatctttgtggtatttacacaatttcgtagggtctcttttatcgcggtttcccctgattgggggaggctttttgaagaccccgttcttttcttcgatggcgtagatatggtcccgagggactgcaaactctgtataatttacaaagcgcggaccacctttactcttcggggaggactccttctttggaggggacttggctaattttggacttcgctgtctctgcgtactgcgtcttctcagagtccttcctctggaattcttccctctaggactatgaaatcgtgactgcgacactggtgacttattttgtctttgcccttctctaactcaaccagagaattttcaatcctcttatacggctccgccatagcgaagaactcgaccaacgattcaggtcatcgagcttgcagttctttctagaaatcggttcttggcaggacacctgttat

SEQ ID NO: 67931 - DNA, 1132 bp, Cannabis sativa
ggggatgagatttcttgccaaaaatacattttcaccaataatcatgggaatttccccactacttctctgacatacacttttctcatgctctcatgggcagcttataccctcgcctgtcaccaccagtgaacaagtcttgtccacatacagctaccactcaacttgggcttggattcaaggcccaacaaagggaaaaaaccccctccaaataaggaaaaaatgaggaaattacattgtatactcactttacatgttttaattattacctttatttctatattatgagatatactcacttttataaatgatattctcattataccccttaagttaatgaaaattaggtgctagacttaagtggagggtgagggtatattgggcaacccactcacaaaagtgggtacattttaatgaaatataatatgaagatatttttgattaatagatacaaaaaagaggtatttctcaacttatcccaaaaaaatattttaaagataccacctttagagttatcttcagaagagggcccttcatcagtaaggcccataggattttttctataaataggagcactatttccattgtaaaaagggatgggagaatgaaagattaagcaaaaatgctatcaaataatactctaagccttctgccattattgtaagcttcaacattattacaagtgactcgtagactaggattcatcaacacttgaactacataaaaatttcactctctaaactcattttattgctcttaatcatatgtttaattggttgatagtattaatataattattaccaatttttagagtatattgattattgtttttttgttagtagtattagaagtcttcgtgattttatttttgtatatatatgaaattgatcaaatgaatgttataatgttgaaatgtgagtaggtggaagtttaaatttttgtaaataactaatgtactccttattgtggtcccaatgtgggtacttcaaattcaattatgtgactttatatatacctattaggagagtggaatataatcaatatctatatatctatatatttatataatgttgttgtttggacagatgatgtggcaacatatatgagctctccttgttgtcgagtgaatttcgca

SEQ ID NO: 67932 - DNA, 527 bp, Cannabis sativa
cactactacaaaattgggttttagtgacactctttagtgacccgcacaatagtgcgagtcgctacaaggttaagggtgagttttagtgacctggacaaaatgactctaaaaatttagtgttagtatcctataatccgggtcactaaaaatatgacgggtcgctaaagagtaacgtccgtaatttatattattttaaaaaaacattggcttatagtgacgcgccaaacgcaattgggtaaacatattctgatgttgtggtatttttttaacacacaagtatacgtatcgttaacaagttgtagactcacaaagagtgaggtcaatctcacaaggattgtagttaagtagtttaaaactaaatctttacttttatttggttatatcgagattaagagaaaatttaaattagataacaaattaataaacaatgaaaataataagcaagtaaatcaataaggaaattaacgatgattaaaagttagggctttcaatttcaattgcacctattgattatggtttaacatgat

SEQ ID NO: 67933 - DNA, 4206 bp, Cannabis sativa
taataataataatatattgggcactcaccccacttgcatactgctttttaattcaatcaaattaattaacaccatagtatggactcgtaaccttaattaggcatgttttcaatttaataaatttcccctgaactagcaaggaccaatcctacaagagagatccttacagcaaaattcatgtgacaaactttattggtaggcagcttgcatataaatttcacatgcatgttgactttctcaaaagaaaacaaataagtgaaattaccattacaataacaaaagtcactatgtgagtatgtgacatccaccccttatcaaaaaaatatatatattaaaaaaaacacaaatatatagcattatcaaagatgatctcaagaatacaaaccaaaggagctacaaactaaatttgtgggcaatgaaaacacacacaaaaaattgatatcgatttgtcctttgaagaagcacatgggttgctgcaaattgccattacaaacttattaagtcaatgagattctcaaaacactcttctcaagacatcaaattcagatgtgtggctttcttagccctactgccatgtctataatttcccccacaaagtcccacaatctacctccattgaaatataatctttctcaatcaaacacaaggtcttggccgaatgagaggctgttttactctaccattataaaagacatattcaatgcaaatctttaatgtagcctataagaaaaacaatatctaaaaatatatgcataaaacttattcatgaaccaactatgctaccctttaacaacaaatgcagcaagttagtagccaaggcttaattgcccctacctaacttctacccaccttaatatttgagttggctacacctacatgcattaataccatatcatcaatcttatctaaaacaaaataaaatctatctattttatagttttatttcttctatcaaacagttaactttaccacttatttaaggtaattcaaaagctagcaaaccaaagcaatccttcctcattctcttgtcaccatagaaaggtaaaatttattacaacaggttgtgacatattgcaaactctataatatatgaggtaaaaatatatatatatattctatgagactagtacgctacacatacattcccacctctttcttttttattttccttattatttttctttaaaaaatatttttggcaggaagtggaaggtagcagcttccacagagtataaagtaggtacagcagaaataaacataacaagtctagcaattcactttctgctaaaatttgatgcaagtattaaagactagtaaaaacaagattaaaaaattaatagaaactatcaatcactaactttggtcgacaataaaatataaaactttaaggaaaatgaaaatcccactatttgaaataaacaaattaaacagcccaacatgcaagaaaacaaaggttataaataataataaaacgaaaaatttaatctttatcataagtgtcacaccagcacaacccaaaaaaaagaccattaatatattctttaagaaataaaaagtgttaattaatgaccataagcttcaatagcaccattaacaaggatggtttttccacgaaaacccataactatgctaatcctaccattgtgctatctccaggaatcgctatttcctgctaaaaaaaataattttggataaatccactagtaatgggaaaaaaaactattctggagatagcacacttcccactaataaaaatataatttttttttttaaaaaaaaaataaattataaaaattataaacaaacaaatcaagaacagatattcttccccattcacactctcccagcaccaaattaaacagtattaaattataaactttgtagagataagagttcagatatggcatccaaagcaattacaggtcttgggagtgaaagaacagaaaccaaaaggcctgttgggaatgttgcaattgatggcatagcaacatggagatggcaagcagagccctttagctcctccacagcaagtacacaaagcacatatctgaaagctccccaactttcttctgctctcattcatcatcatctccacttttcctgtctctaccagaggaaccagtggtggcacctccttcaggctctccgccgccacagacccatttaccttcaaatcagtacacatagaaagaaacactcaatccaaagaataaattaacaatattgataagaaaactgaagggatctgtaaaataaaggtgggatttttagttataaaagataaaagagactcacttggactgaacttgcttcagtgttggtaataacagtagccaagaagagcagcaaaataagagaaaagatgaccccatatgcaggcatcatggttcttgagaaggttggtactttgcttagtgtttgagttgcaaaagttgatgggaatttggaaaggaagggagtgtgggtcttgctcttttctagagcgattttcatttgctgctgtgtcataatataaataaataagcataaataggaggaataataaaaggttagaaatgggatttttgagctgcttatggtggtctagtagtaattgggcactctttaatggggtttttcacctttttacttttgcacattaaggaagatgggaggatgagggtttaattggtttgggttttggaaaattcatttgtgaagactcagaggggtttttttgttttctaaagctttgctctactgtcatttggtgctgaatattaagggcatatggccccccaaactcttatttgtgtgacagtatgaaggtcataatgtgaatcactgtagtatacatatcccaacttgcaaattgcaaggcctatgccacgtgtcaaagatgtatgttgtcttcatgatatttacaatttattttattattaattttattattaggaggcaaagatgatagtaacatattcatattaccacttgcatgtaatttatgaatatgattttcttttctttttctttttttgatggaatatgatattataatttggcatataatgccccattatggattaaatcttctacacatatttatacatggataatgattataggcatataccacttttttctctattttaaatattttcatgagtgtcggtatagcctgcaattctagatttggggacccctttgtttcaacaaaatgttgtgtttctatatgcatgtcttcatgtacccaaagtaaatgaaaagtagtttagataatatcagatttaaaaattttattaaatttaatgtaaaaaaataaatttatgttatatttaacctattatttataccagatgcaaaattaaataaaaataaataattatattaataaatatttaatattttattgagaatatataaaaaaaattattattttttatttttttattatttaaataatagtaatattgtaaaaaaattatgtaaaatttagtaaaaatcaataaaatataataatttataatattatagtaaataaaaatgtaatatttatttgatgactaaatttagcacaatattatatgttgtgtcaaattcaaccaaacttttaatatgtatatactttttaaaatacttttagaagaatagtttttcataagtatactaaaatatagcaatccattgaattttcacatagttgttaattgttgtgtaacaggttacacatactcttctcttctcttttttttaactgtttgttgccttgttggggggtaagagatgaatagacgatcccctattcctcaattaacaaaaatgcaaaaggaaaatagtctaattgaagtcttaacaaagacgaaaagttgattctaatgatgcccgtccaaattttgaaggtacttttctctttatcttctttggacttactttaaatcacggtttttaatttgtcactctttttgacaattcaaaccaaaaggagaagatggaagtttggactagaaggaaaaagtcttcaagcaaaacagatttataggcttggactggataaaacataaaaatatggccattaagtattgcgtgatatgcttattagaaataaaaaagttttgcgtgatatcttccagcaaaagaaaaaaaaaagtattgcctgataaatgcacatatttatgcatttccagtaaaaaacaatgaattcaattttgttgtctcaccaattaaagc

SEQ ID NO: 67934 - DNA, 671 bp, Cannabis sativa
tttcttttcttttcttttttatatgtatatttcgacatattcatttgattttgataagactcatggtgctttgatttaatatttttatatttaatcctgtctaataaattttaatgtgataataataataaaaaaaaaaaaggtatgatctaacgttgaaaataagaacattatttaattatgacatataagagtttaaatattgatgtaaaattgaaatgtatatatcagacaattatattaatattcttaaatgaaattttctcagactaattgtccaacaactcgtgttttggaggattcaaaacttataatgtcaatttttttttatgtggtaatatacattttttttgataaatatgtggtaatatatattgtaataataggattcaaataatgtatgactaagtatatgaaaaaatattgggtaattttacaatgtgcttttttaaaagaatgtagtgatatactttctaattgtttcggcatctagacaaaaaatttagtctaattatttttatatttgtgtacgttatagttatttaagatatcatacaaaattttgaaaaattcgaagtaatttacaatatagaaagcagtgttcaaatagactatttcatatgcgtataaaataaaatagtcacgtgtgcaacacactattttaaccctat

SEQ ID NO: 67935 - DNA, 747 bp, Cannabis sativa
aagactgaatattgttcgtaatttcgttctcaaaaaaaaaaattgttcgtaagttttatttcattttttaaatcagtttttaatattattaaaataaataatcaatgcattattatttttttcaaaaaaaaaaaaaagtcaaacttgacttgtatatctattaaaacgtcccttctccataataataagagtataaaaataaatatacattacagattacacgagaaaatagtcacccacattacacgagaaacatttttatttagcaatacattaatatacaatctgcataaaagttaaactttgtaaaaaattaaaaaaaaaaatgccgaagtacacttatggtgtccaatactttatgaggtttaatattattattaatacaatttaatattgagtgacgattatgttactttaataagtattataaataaatcgataactaattataggattctttaatggaaaacctcaattaaagaaccctcatgatctctaacaacaaaaccgaagccatgcatagctattagattgattaaagagagtgtcatccagggatggagctatgtgtatatgctcacaggggtcacggcccccctagatttttaaaagttaatgcatattgagtcgtattaaaatgtatatacagtagaacctctatctaagaatacacttgggaccaagaaaataatattctaattgagagtttataactaaatagagttacacttaaaaaaaaatcaaaat

SEQ ID NO: 67936 - DNA, 1018 bp, Cannabis sativa
tatgttttatttacaattttactatctaaaatttttaattacaaaaatacacttataaaattttaaaattacaaaaatatattttacctagcaaaaagtaaaaataaaaattgagaaatcaactttacagcaactataaataactataaaataaatgcacgacaacaataataaaactataaataaacttaaaaaaaaaaaacaatttattatttttactaaaaaaaaaaaagcactttttgtattaccataaataacatatgagcgtctgcccttttagtgctctgcggcagttggtgttttcaacggtttttgacagtttttttatggttttttctgggttttccttgactcttcaacaacattgctcccataattgatctttcttccatctggtcctgatctcaattgaataccttccttataattatggatcctaatatacacaaaatgaaaaagcctctgaatctaactgaggatgaagagggtgtctttgatcttactgatttggtggttcctgaacatcaagatgtctctgaccttgttctctgtgccaaggttctcaccaacaagaaagtatggttgtcaacttttaaaaatcagatggcacagcactggaatggtagatttccagtaaccatcacggagtcttctgatctgttttcattaagtttcggctgtgcaggggacaaagtgagggttctactccaagaaccatttcattttcaaaatcatcacatagtgctgcattctcccactccaggacaaactgttcatcttgattcactcatatacacaccattttgggtacaaatcttcagacttccttttctaagtaagaccaaagggcttgcaattgcccttggtaatatcattggtgaatatgtggatgtttttgaggattctctcaatgaaggctgggggccattcctgcgtgttagagtgaaaattgacatcaccaaaccacttttgcgagggaaaatgatcactttgcagcaagcaaaggaggaattttggg

SEQ ID NO: 67937 - DNA, 643 bp, Cannabis sativa
gagccctaggaacttttgaataacattagcattgttcacacttgcggacatattcaatgcaatccttcttcatggtaggccaaaagtaaccttgacgaatgatcttcttggaaagattgggttcagatgtatgatttccacaaaatccctcatggatttcgtgaatgacaacgcttatttttgttttggctatgcacagaaggtacaacatcgataacctcttcagtatcaccttccatccatgattacatacctgggggcctagtactggactttccttgaggtagctctatctttcgcaagtgtaccattttttaagtactagagtattggtgccatccaagaagttgagtggtcgatggcagagaccctcattccttgtgtgcttgaagttatcaaatgtgtaatggggactagttcgtatttttctatttttggatatgttgctaattttgccagcatctcagcaaaaacattcttatctctagagattcgctttacagaataatgtttgaaatgctgcaatagctctcgagttttagctacataattggctatcttttcaccttttgtctgatattctcaagacacttgattgaccaccagctgtgagtcattgtagagttcgatgtactaagcacca

SEQ ID NO: 67938 - DNA, 755 bp, Cannabis sativa
gactgttaaaacacttagcgtatatatacattatacaaactaagcataacagttgaatgaacttgaacaccgaatagcaaggcatccatctcgctataggaagtcatactcatggtacctccactaatcaacttcagacatctttcaatgagactcactgctttgtcagtcagctttctcagatagaagctgacattcaaatgatgttgactgttgaagttcatcttgtcaccaagaactgcattgtcagatggagcgttatgtcttcaatagcagaaataaaggtatttacattatcaatctcagaaagacttgggaaaagcttcagctcactatcaggtttattgctgctatcccagcgagataactctatgagagcgtgtttaaatccacgtcaacattgacatggtaaaagcagatatatcacagttgtgtgattttcaaataataactgtatttaatttacgagggacgtaatcaaatcccacaatttcaggggataatataaaattgtgggaaatcaatctaattgtaattaactgccctcctatgtaactataaatatgagaaggatacactgaaaaagggacataaaatccttttgaggaaaagccctagtttggtatcagaaattttaactgcaaaaccatgtaaaaaagtttggtgttatttcttttccttttaatgctattatttctgtgcaaatccatcacgaaataggcttgaatttagttaacaaaaatatatacgttaac

SEQ ID NO: 67939 - DNA, 1418 bp, Cannabis sativa
ctgccatcggcttacaatatattgttaggtcgtccagcattgatcggactaggggcagttagttcgatcaagcacctatccctgaaatttcaaacaccagagggtgtcggagtggtgcgaggcgatcgaatgctagcttgagactgctatcgcatagagatacagcatagaaaaggcagtcatcagttaatggcgatcttgaatgaaaaaagcgaaaagaaggacgaggatcttgacccccaggctcaagatgaaagaaacttattaaaaccaattgaagaattggaagaagttgttctcgacccatgaaatcccacaaagtgtgtttacattgggaagaacctggacaagcagctaaaatagcaggtaataagtttcttaaaggagaatcaggatcagttcgcctagagccatggagatatggtagggattggccctagtataagttgccatcatttaaatgtcgatccaaactagccagcaaaaaggcagaaaaggagacccttggattccgaggggcaaggggcactaaaacaggaagtggacaggttattggtcaataactttatacgcgaggtgttttatccctcgtggatagccaatcctattcttgtcccaaaacctaacagaactaggagaacttgtattgatttttctgatctgaataaggcatgcccaaaagactgtttcccactacccaggatcgaccagttggtggatgcaactgctgggcacgagcttatgtcatttatggatgcatactttggatataaccagagaaaaatgtaagccccagatcaagaacaaacgagcttcataaccaacatgggactctactggtacaaagtcatgccatttgggttgaagaatgctggggcaacatatcaacgattggtgaacgagatgtttacaaatcagattggaaggaacatgggggtgtacgtcgatgatatgttagtaaagtcagtaaaaagtgggagtcataccacagacctcgcggaatgcttcaaaatattaaagaagtataatatgaagttaaacccaaaaaaagctcctttggggtatccatagggaaatttttgggattcatagttaacgcgaggggtatcgaagcaaaccctgaaaaaattaaggcattgatagtcatgccatcaccaacaaagcctaaagaagtacaagccttaacgagaaggatggttgcgctcaacaaattcatttcaaagtcaattgataagtgtttgccattcttcaatgtattgcgaggcaacaagaaattcgagtggacagaagagtgtgaagaggcctttcagaacataaaaaggcatctagcgacgcttccagtttttgcaaaactaataactagagaaacgttacttctctatttggctatctcggaagatgtgattagtgtagctata

SEQ ID NO: 67940 - DNA, 865 bp, Cannabis sativa
ttgttggtccacacttgctagaacattatcttttgacaatgatgttgggataaagttgtctctcttctaaggttcattttgcgaatgctccatcctcatattcaaatatatggttgttgttcgagagatcgctcatctgaaagatagaagatcatttcagtgtcttgtgagtgcaatttaaggagtgtcctcagatttatacaattgatcgtatacattgttctctctcaaattctccgtccttttttctatgggatctgcccctatttataggaatataggttgccagttgtttacatttaattcaaaatgtgtaactgttgataaaacgtgatcaatttcccatgaaggagaagaactgtgtaggacaaagtaagttctagctcgggacattcaagatctcgagatcacagtcgatctacgcgaggaggggatagacctcggcatagtgatgatcgagaaagtattagtaatacgaggagtcgtcgatcttagagttactcagatacgagatccatgagcaactatgaacgaagacatctagatctttgtgaacattgagcgcttaaatcagaatgcacctaatttatgccaaaaacttaatgccaactgaaagcaagaggatccaatccaattgcgaatcagtgagttggaaaataaattcaagtgataccaagatgaggaatatgggaaactacgtcaacagagtataagtagactatttccagaggagtagggcactcacatcttaaaatgtggtatagaaccttcaaacttgccaagattctatacgagacaggattcagtttgaagggagcgactccaaggtaattgcaaaaatctttaaaataatccctcaagggaa

SEQ ID NO: 67941 - DNA, 588 bp, Cannabis sativa
tccttgtggcgcgcaaagacttagcaaatgtttacaagttatctgatccacgtgtcccctctcgactggtccacgtattttggacgaattctggagcaataaaaacatttaaaaacagtattttcaataaataaaatgttaaaattctgaacatctgtatttttgtaatttttgttgtttttatgtatttttaaaataattatatttaatatttttataaaattaatgtgatatatttttatttaaattttttttttatattcagttatttttatatgaaaaataacattgcagcatattaagaaaatgatattaaaaaaattatttaaaaaaataaaacaaaaaataatactattatttactaagttaatattacatttaatatataaattatgtatattttttgttactgtgcaaaatacaaaaaaaatattgaaaaaaattatattttttttattattttttcttaataattatgccacttttatcattaatacacgttattttttttttaaaaaaaaaaatgctaatcccaatataaaatgaagaaaagaaagagaaaatggaagaaaagagagagagagagag

SEQ ID NO: 67942 - DNA, 643 bp, Cannabis sativa
gttttaagtatcagttttaaactgacacttataaatcatcaatagtgtcggttagtagtgagtcactaaaaaaataatcgatatttaaaagagaaatactagcttaaatgtaatctcttaagtctccgttcataatcgtgacttcagagaaaattttgaaaagaaaacaacgagatcttaaccactttcatctctctcgtctctctcattttctttctcagaccaaaccaaaatccctaacccctctcttgtttctctcgtcctagcgcaaaccccaaaaattaaatttttgtgactgtagaataggtgtcggttttataaaccgacactaaaagtataggtgtcagtttaaaactgacaccaaagtagattttgtagtagtctagacgtacaactttttattatatttttattcattttgcatgtatattaatagcgatagttatattgttcaaaaaaaaaaaaaatagttgtagttattagttttgggatattgattgatatagtaaatttgttttgttttttgtgtggactagataatagagaagacactattgagtacataccgggaatcaaagccattgagccgaaagatttggtatcattccttcaagatactgatttctcaacatctatgcatcgt

SEQ ID NO: 67943 - DNA, 3227 bp, Cannabis sativa
aatgtaatgacattaaaaggcaaggtaacgggtgaaaaccatggtattttgaagaagaagaaaaaaccatggtattttgaagaagaagaaaaaaaagagtagaaccaattaggaaacaaacagagccaacgggtgaaagaattaatcagtaggagatggttaatcaacactaggcatggaaagagattggtcactgtaagaagtttggggagtagatattgtacacagatatgactagcaatcattaacacactagataattttgaacagcaagggttcacaaaaagtagtgtaatctgggagtctattggcagtcaaaaaggataattcgctcatcaagtttggattactttgttagtgttacatccaaaggttgagcctaataaataatgtaaaacatttacattatgcaggataggaattaatcgtgaatttatattattacaattattagttaccactgtttgttattatggtttatttaattttttagtaactatgattttaatagtgttaaactattagattacatttctcaaaaacaaccacaaaaccaagacatattatatgtttatatacataactggtgtgtgtgtgtgtgtgtaaggtagaaaataacttttaaaaacacctattggagatggaatcatttttgtggaaagtaaattacgtgcaggaaactttacaaaagtatcaatttgtaaatgcatagatttaacaaatttcacatacatacataaatgcattgcatgagagctaaaattgcaattaaagcaaggtcatagttataattgtatcttcattcatgaatagggaaaattctttaaaggaatttctcttcccactatttttatttagattaatctttagttgtatggaattcgtgcaaagctcaatcaacataacttgcctctcctaaacataaaatctcgtaatcacacatatgacactcataaaactccattaccaaaccctgatctgtcctttttccctgatatgtgcagcacaggaagcaacagaatagtatagatactaggttctcattatataactacattactacaattgagatggaaaagcttatgtttgtaattttgtaagttgtctctgggaaatcctaggcatgatagtgtgtcataccaaatctatcctttctactgctcaataataggtggagacggatatgatatagtaagtggaaaaaaagatccatgtcaaagctagtttacttacgttgtaggaactatataatctacagctcactgtagttgcgccaaactgcacggaattcctcacgaaatgtgttcagacgtgctttcaagtttggtgttctaaagcttgcatgtagcacggtggctgagggtggagaacaaagaacaggtaaaaaaattaggatatagataaagaagttataacatgaaaaagaagcgaacagaattttttgagcaagtaatataccaagaagtccaatagcaagtgcccaaagaacagtcaacaaaccagcagaaacaaaccaaagaatgaaactcactgtcaaaagaaaaatggatatatgcttagtaaacaacagtaaatcacatactaggtactcaagcaatatttatagaaaagagatggaattgtgtccaagaatcaataccagaagaaaataacaaaacaaacacccagcgaggccgaccacatatatgtattgttctcttagctgatggacgtccacgaataacaggcctggaaatgacataaaaaataaagataaacaacaattttcaactcaactaagctgcaaagaaggcaagaccaacaatgaacagacttacgtaagcggaggcctcatctttgctgctaaatgtggagagaattgcctgaccgttcttgttaccttctcactaaaagtacctgcaaagctgtaccaataatctttaatatagtcacaaatgattggctctaaagtacataaggatactattgaaaaatcaggcaatctctaaaactggatgcaatcgacttgatgatcacatgtgaaaattgcacaaagaaaaggcaaattgattgatccaaacgccgacgaaaaaaaataaaaaagaacagcccttaaacacaaagaagcgatgacacttcatacaaccacagaagaaataaaagaaggttacctgtcatttagaaaagcaatgctaagagctgtaaggaaagcagccagaagagacactggcctccgaagaaagcccaaccctacagtagaaagtgcatgtataagatatgcagggcatacacagatattgatactcacaaagaaatcaaatatagatcattcgcttaaacttaccaagaataaaaatgatcaaaatgaagtagttggttcggtaactgcataaccacataaaacaaatcaatcacaattatagtataaatatatgcaatagaaccgaatttttccactacaatttattttggacagttcagagcttgaggaagatattcaaaattcattattcgaagcaaatgaaaaataacgataaccaaccaaataacatagctaaacaccattttcatgcagctaagggagagggggggaaatgtcaaatccaaactgcaatctggtaatccgaacatcaggcaacttactagggtttatcgaaatttttctttcgattcaatttcattgtaaaagaaggaaaaagcaatgaatcatcaaaaccaagccattcaaaatttcagattcaaaagaaatcaacacaagataacaattcaaacaaagaaaagaattcattaaaggaatgaatcgcgatcgtaatcgtaatcgtaatcatactagtaaagattgcatttaaggcggctactccacttcgcgtatgatctgggaaaagtgaatcgggagaagaattctgacacgggacgcggcggcgatgaccaatcgacctcgcggagggcgtccacaagatcctccgccgtgacgttgctccaatccatggcagtgatgatgcttcgagaagtttctagaagaagtacggaagatttgggatttgaagaaagtacaataaaagaaaacttggaatgagagagagagagagagagagagagagaattgttatatgttttcggtatttctggaacttgaaaattggaataatggagaaatgaaaatgagtttacccagagaagaaggatactaaacgaagtcgttaaggaaaattaaaaataaaattagaaaatgtctgagcccgggttcg

SEQ ID NO: 67944 - DNA, 525 bp, Cannabis sativa
agtcaaagaaggaagaaaaggttggagagaaggaagaatcagatgatgatatgggtttcaatcttttcgactaaaagctttgatatggagattttgaggtttttgctatttgaatgttgttttaatgttctatttttatttagatatttagagaaggaagcaaaatttgacactgtattttatatttattaagatatttagagaaggaagaaaaatttgagacacttttactgtataagcttttactctaccttgtttagtacattgcaattgtgccacaaaaaactaatgtcatatacttaatgtacattgtattttataatattgtttaatagtttaaatattctgctaattactatttaaaaactaacgtattattaatttattatataaaactaatatattattaatttatataaaaattagaattatataaaaaaagttaatatattatcaatttactaatacaaaattaaaagaaaattaaataatatatatgtatattggtttattaataattttata

SEQ ID NO: 67945 - DNA, 1284 bp, Cannabis sativa
gagcatcagtttccacaagagtaaccggcaatggtagttgagatatccaattaagtgcatggaaaagagcttttgcctccatttgatcagatctgaaacaaccttggacaggtttcaacatagctgcaatgacttcacccttataattcctgacaatggcaccaactcctaaaaccttagatgtaggatttaccgcagcatcgacattaagttttaaaccatacatatctggtggcttccaaggaattccctccattggtagagttgaaattggtcctggagtaaccggttcagtaacagcagtgggccagttgttggctttgtgataattctccatgtagtttgtagcataatttgctagagccataccatcacgccttgattcaccatgattaattttgtttcggtcagtccaaatgacccacatgatgacaaaaaataattccaatctcgctggctgagtaaggttgcaaggtgaataatataatctccacccaccatgtttcgagctttgatgaaatcaatgggataattaaagtgtctccaaactgccttggcatgcttgcattggaacaaggcatggccaattgattcccaagcttgggaacacaaagagcacactacagaagtgagtacctttttcttataaagtgcagcagccaccggaagacagttttgtattactcaccacgcaaaaaattttatcttcgaaggtagtttgaggttccaaaatagtttccaccaatctttgtgagaggttgatgcagactccttattaacatcctcaaggtcagtagcaaaatggaaaccacttttaattgtatatgcaccagctgttgtggtgccatattaatctatcatcacctgcaaagaagcttagacgaattgagaggattcgttctatatcaatctctttgaagtgagcagccaacaaagtcaagttccattctcttgtttctgttatgaaaaaagaaactgggaggttgggaggacccgaataagagataggtttgtggtcaacatggccaggtatccatggtcctgacctagcgttgatatgcataccattccccactttgtatcgaagtcctttgagcaagaattctcggccccaacagattccttgccaagtcagagaaggagaataaccaatgtttgattctgaaaaagtaatattggagaagtatctgaattttagtaaccggatgagaagggagtttggcatttcgaagattcgccatgcttgtttagccaataatgcctgattaaaatgtacgaaagaac

SEQ ID NO: 67946 - DNA, 551 bp, Cannabis sativa
tatactttattttttgtcagtatcaaaactcatatcaaaactcaactttaaactcaacttttttttttattttatctcaaatttttacaatatttcatatattaatttctctatttatttgtctatatattatttaaataatatacattttttaatatatattattatattattaaaatatgaataaaatattgtttattctgataaaagtattcttttttaaaaaaaatattatatataatatttaaatatatttagagaatgaataaattttctctacattctaaacactattacattatttatttacttctctattataaagttaatgatgcagcacacttttatcaattttgttttttgcaattctccaaaaaaaaaatgttagaatatatttagtatattctcttatttctgtatatgtctctatttaaattgatcaaagcacgtgttgcatgtgaatccaaaacccgcaatggcacgaccatggttgcagcaactactagtgactccaataactcctcctctgctcctaaacaaagcaacactaa

SEQ ID NO: 67947 - DNA, 1671 bp, Cannabis sativa
aaaacttctaagtttttaaaaattaataggggttgtttagtaaaaatttttaaaaatagttttttaaaaattaagttttagaaaattagaaaatagaaaacatcaaaatgttgtttttaattttcaaaaataatttttttatctaacatattatattttatatttttactcacatacggatcctaaatccgaaaccatacccgaacctggatccagatgagttcatgtcatggtatggtgttaaaatattaatttttctttttaataaaaaaaactctaaaaatagttgtaaaacatttctgccaaacattattaaatttttaaaatgacaaaaactgttttttattctcacttttgagaaaacaattctaaaaactaaaaactgaaaacacagccaaacaggctcctaataattagaaaaacgaaagtatcttgtaattctctgaaaaattaggaaggtagaacatatttgtggcataaatattaaggtagaacgtatttatagcataaatatttaatatttttaattttttaatcacttatatattatttatttttttcgactgtttaaatatctcgagtgataacttagttaaatgttatgttttttagtcacacaattattctttttggttgagactaataaaagtgatcttagttacacaaaaattagtatcatgttgtcaccattttgcagtaattacttgcataaatattactacaaaaagtattttccaaattagtctataattcacaccaaatttaaagtgtgtgtttttgggtattgcctgtataatcagttgttttctaaattatattttgcacttataaaaaaagttgagtggtctcattttttaatggggaaatttatctatacttttgtattttcgagtataaatatttttttttttagaaaatgaacccttggttcggcacacattaaaaagagagaagaagatacaaaatttcttgtaaaaaatctattgatgttgtctttgtccatttaagattctatttatagaacttggtaaagtaaagtgttaggaataatattgtaaataattagattgataaaactaactactagttagttatagttgttaagctttaataggtgttagttaagtgttttattagtgttaattatgtaaccaagcttttgtatataagttactttgtaaacattttctccacttaatacaatttattatttctctcaaattcattctttgaattttttatatggtatcagagctttttcgtttacccttcaatcatggagaattcgtcccaaactaatgcttctctcaaaacaccaagttcatctatggtgtctctaccaaaaacatcaatcttctgtttctttcactcattctattttgattcgattggataaacataattctcttccacgacgccaccaaattcttgcttcactcaaaggtagacaactccacaaatgttttgattttcttagagctttgccaaagttcatcacaatagatgaatgagctaatcgtgtcaaccttgagttcgaagattgagaataacaagacaacctccttgtttcttggttgttatcatcgatgccaagaaaactacatattgtatgattggttttcatacaattgttcagatatggagccccctcaatgaacattatactgccct

SEQ ID NO: 67948 - DNA, 643 bp, Cannabis sativa
aaaaaaaaaaataccataacaaacagtgactatttcaacacaaaacaataaaaaaacagcaacaacctacatatcaatcataaaaataacattttaaactaaatataagaaccaataacaaaaaaaaattacttacccattgattgttgctgaagtttgttcagtgctgcaagaatggaatctcacaccaaattccttaacttctaaaactttgtagtagcttggagaggttaattgtatactaaaactaaaattttagtttgaattagttagaaaggatgaaagaaaatgaggtttcagagaaagagaagggacatctgagagagggtgagagtgtatacaaggatattttagatactcaacataattgtatacacatttccataatatcgatacacataagtttgaggaattaatttctcacaaatatctgcattgatagttaaagagcattgttattaggcaccagtgatgtctaacacctttagacatgttgtcttgcgattgactaacgatattcactaaaattattatattaaactatatgaaatatgatatttaattggactaataacaatattgacacatgctaagtagtactggttcctttagtatttctttaaatttcccttcatttatctag

SEQ ID NO: 67949 - DNA, 3732 bp, Cannabis sativa
aagtctaaaatagatgaaagttcaggggtcataatttggtacatgtcaaagttcgagagacattatttggtagatatcaaagtctggatagcatgatttataaacaatcactgaattagtaaatttgaatgaaattggacaaaagtcattaaatttaataattttaataattcaaggaaaatttttaacaattagaaaagttaagagaacatgatttgattcatacaaagtttaaagaataaaaatcttaattagccaaaaataaatatatctaatacacttaataattgaagttaaagaatacatataaatttgttcttactttatcattttccattccattcaccatattccatatctatataatttatttaaaataatgatattaaatatacattactctttaacgacaatcctcctagctaaacaaattaaattgcctcaatctaggataaattaaataataataaaatttcttaaataataagtttcatattcttcatgaaatagtgtagaaaaatgagatataaattatgtgaatataaacaaattttggtataacaaaagttcttatatttgccattattatgataatgagggcaacacgttgtcaaagtccaagcaaagaaaaatcttaatagtggggcatacaccccattccacacttattatagtcaattcaataatatgtgtatatatatgacaccctccctaaattaatacaataatattgttgattatttgatttgaacacccaatttgattttaatttaagtccacttatctcaattcaatctaatgccaccgacactatctagtatttatactctttaatatatacactcatttcatatatagaaatgttgtagtaaaatttgttctaaacaaattaatcatcacatattaatagataaaaaggtgaaatatttctaaagatagtaatttattgaaagataataaagaggagaatcattaagtaattaccatggaaagcttcacataattatggtgtgtttactaaactgtaattataatcaaaacaattaatgggagaaatgaatcggtttaaaataaaaaaataatcgtaaacaatattttattatgctgtttactaaattattcggaaagaaaaccagaatcctattattttatttacataactagaaaaggtaatcggaatattttaatttgataaaattatcattattagaacatgtaattattttctgtttataaatttttaaagggcatatttatcttttttatgtttaattaataaaataaaaataaatttataagttaggagagggaaaagtatttcttataaaaatagggggagaactttttcatttgttttctctctaatttgtgtaggccccactattttgtctcattccaaaatttaataaacaattgtatgggaatcaatatcatatcattcatttccatttcctttaaataaacatcccattagattaacgatactaattcaaacttaaacaaacataataaaaatatagcacaaagtacaacagatttcttagctcgaaagcagattgcataaacccttgctttgagatcaagagtattccaatgtcataatgtttgtttcgaattagattgtcttagcgtggtctaaaaacttaataatcttgttgcattagataaattgttggggctggttttgcaatatattattattagtcttttaagatttaaagaagttcattttattcattattttaggtctgttaatgtagtagtttacaccttggctaaatatgttatttcagtttctcttagttctgtttagtggcttcattaccctttattatgagtcacttgattttggttgggaacattaatgaataaatttattttctccaacccctttctttagatcatattgctctaaaaggtggtgttcttcacgtagaacaaactgtggcaacatctgcggaatttttgtgagttctcgaaatggaatgatgtcggaaagaattttatctaacattgactggttggagattttcttctaaaaatactcatatttcaaaacgatattatagatcaagttaaaatacattaaaatgatccatgaacaaaacaaacatacatgtgtatagaaaatgaaaacttcatatcttgatgatttaataagttctaaagtttctttctttttcttcttttttacttattttgtcccctgaattttaagaagagatactatgacttttacatattgcaaatgtccctaagtcaagagatatgtgcctataatgtcatttgaaaccactgttcaaaaaattaatgagattaataagattgtgaaacaaaaaggagaaatttaccagtctttaatatgtgacggggctgatcagaatacatgttcatgttctcggtgtacttcaacttgctcgtctcgctcttttttctaatatttttagagctcaaagagccttcaattgtataagatgaatgaaaaattatagaataaacatgaagctgttatagaaaggtgacaattcaaatgtagaaatatactcttctaccgaaataaaatacaccaaccttgccattcccacactacttttgattcacctttcactagctttgtacaatgatctatgtgagaatcttcctaaaccaactcctctacctgtaatgcaaacatgatcgaggttacgacagcgattatctattggatttctaacctaccattaattgaattagaggaacaaaatcactaactagaaaaaagccaaactccatatttgctagtgtcagctgcaaatggggtttatctttgagtctgagttaagatgctaagttatggttcatagcaaatactcaaaaatgagaaagtaagaacaaatttcagcactctagaagaagacctaacgactcaagaatcctccaaggcaatgaagaagagacgtaaaagggtaaatgtagtgaaataaaaaactaaaaagctacaggatgaaaatgcaaatgataaagtttgacatgaaaatgttcaactctgtaattgtgttaggccccaggattagtaggatgtgctagaatgtagtaaataaaaagagtatttgagtcttttgtgtggaagggtattagggtagttttgagtgtggaattatatatttaattgttagtttcaaagtcatacatattgtgttgtgctttggtagaatttaatatttttaatttatccttttaatttttattgactttaaaaccaaaaaaaaaaaaaagagtttggtcggtttgggcgggttaatccgaccaaaccgcccaaactgttggtcggtttacaattttttttttaaaaaattggacgggttgcacttaaattttagcaacccgaactttagattggggttagaaaatatataggataaactgcccaaaacgaccgatgtacagccctcccatcagttatagttagctttctcatgtattgaatattagctcccacaaacacaaagctagctcaagtggccataggtaggtgtgtgtgttggaggtcctgggttcgagtctcatgtaaaatatgattataatatataaatgcttaaataaaatatatatatatatatatatatagatattagctcccacattctatttgggaattttgattttatatacttaaaaaatttaaaatatttttttaaaaccaaaaacctagaccctaaaaaaactatgatttttttttcaaaaccccaaaaa

SEQ ID NO: 67950 - DNA, 1651 bp, Cannabis sativa
cttctggtcctcatgactatagaactgaagttgacggtacagaaatctgctcatttctaattttctcaataacccctttgttgtgtggtttgtaatccctcatataatcatgttccatacaaattttatttgtggaagtaaatatcttctggtcctcatgactatagaagtatgcacctctagtctcctctgaatatcccataaatatacacacttccaacctaggagccagtttccctgtctttcgtcttagaacacgagctggacaaccccaaatataaaaatatttcaaactggatttgtttcattctataattatgttggagtttttcttatgctcttcgagtgtactgcattaagaatttaagtagcctcttgaagcgcgtatccttagaggttgaatggcagtgaagaataagtcaacatagacttgaccatgctcgacaaggtccggtttcttctctctcaatcatcgttttgttgtggtgttctaggtgttgtgagttaggataggatcttgataagtcgttatttgtcttagaaatattgacaattttatgtattaatatttttaaattgattctttaaattattaattagtgtgattttaattttttaagctattctaaagactaataatgtgttatcctcaaaatcacccttatgcggcacagagcaagatgacacgtggcaattgataataagtttggacggtatacaattaattgggaagaccgcccaaaaggctttgggcgcaacaactaagaagcaaaacaatcgaccaaaggagtaaggtgatcgaggagtacaacttttgatcacctcgaacaacttaaagatgcatcctggatgaaatgtccgaccaacaatatcgtcacagttgaagactttggaaaagatcatcttcccaattaaagtttttgcaacgctgtcagagccactttctgcaacctcagttgcaagatctgcctctataacctcatttgcttcaccatcacaattaaaaaaatcatacaaagctgcccattcgtcatgattcatgtcgaacaattatgaaagcttcaataatcaagcttcgtaatccaactcttagcaccctaaaaaaagaaccacatagagaggtaccgaaaaattttaaataaatatattcggatggagaataactaaaaaaaaaataatatttattcacgaatatatatataatgttagggtacttttacaatgcacccctttaaaaggaatgcactgatacatcctttatctgattcgacattcaaaagagtttttttgtccaatttttttttcatattcgtatacattatagttatttaagatattctacacaattttaagaaatttggaataattttataatataaaaagtaatgttcaaataatttatttcatacgcgtgaaacacactatttaaaccttgttttttgcgtgttaattttttttttttaaaatttcttaatattttgtaagatgtattataacgtacatgactacaataaaaaatttaagtagaaaattattttagatactaaaatagatatggatgtattggtaatcttttttaagaattgtattgtataatttttcaaaaagttatgttctagtatattttattttttttttttaacattttttt

SEQ ID NO: 67951 - DNA, 1358 bp, Cannabis sativa
gtcgtctgccaagtcgaccaaactgaagaaccacgcgttgttggctgtgatgtattctcacaatagagacgcaaatttttgagatggatggatgaccaagagtacatccttcgatctcaccaagcagagctggatcgccgtaacagagaagctagcgacttgataaggcagtttaatgagagaactactgaaagaggttaggatctcatcgtggatcctctctaagggagactagttgacagattggggagggtcaatcaacagactatccaactaggttccttaagaactaggacagatcttcccctacccgaaggaggacaagctttgctacgaaggtctagtggcgcgaacagccagatctccacaaccagtggtttggtggtagccagggatctcaggctctacaacacccccaattggtcagcctttgagcggccacccccttggtggtatacccatggcagcccagtagggtgaactctagtcctagggcctctaggagcgagtaaccaagaggccaatcttcagtcggctaggtccgagaatgggtaaaaccacccaagacatctaattgagaagtgagtctagtcacttcaaatatctagatccttcgaacgcgagcaacttgtgtgatctactccctatcaacgcacaggctacaccagcctatcagatgagaacaagcgacaagaccctacccagcatagggctggcctaccaaggtcagtccagcttacaaggagtggctgaccagaccttttcccattcagggttgtagcccattcaagaaggccaattagccaagtccctgcagtaatagatccttatgtgcaagcataattggacaaaataagggacatgatcaagggcatagctggcccaaaaccttcagacctttaactagacaattcaaggggatcaccattctcggcatatattaatgtcttaccctagcccaagttcaagattctagtatggaagatgtataccaagcaagaagaccaactggcacacataatgtaatgcctgtattttaaaacatgataattcaaaaataatctaattatattatatttatataaactcgtaaatcgagatcctgagtttataatcattgttgaaaatacaagtattatataaaaagttacgtaatacatttttttacaaactacgaggaaactacaaaatataactcaaaatgctaaaagaccaaaaccctccaggttgtactgcggcgatatgtacaatccttgccaagcccatctcactgctcctctagcttagctttactcttacctacacaaggtagcaaactgatgagtcgacccactcagtaagtgttgggttttatgccc

SEQ ID NO: 67952 - DNA, 710 bp, Cannabis sativa
tgaggcagctatcatttcatttttcaggtgatgctctactatggtatcaaaaagcgagccatgttaagttgggaagagatgaagaaactggtgctgaagcatttcaaaaacactcaaatggggtcccttcatgaccaatttcttccagtcaagcaagagggttctgtaattgaatatataataaataatttatccagctctaagctccattagacaacatagcgccagaaattagttacaacatccaaaaaatgcagatgaagcgatggaaattgcccaagaaacatccaagaaccgaggaaagaagtgagcaaagctgctagcagcaaggaaaaagaggaatacaaggagaatttcatcaggtcgttggccctttggataatatctcattggaggtggagataggaacttcacattgggaatgcctcgtaccaattggaagctccaaaccaagggatttcaaatgggaaatcatcgggtatttaccaaaggagatcccacaacgaaacgacctcagtctctctcacaaccatgtaccagagcattatggcagcaaagaatggagctctagtggaactcaatcttgtgggtcaagaagatataccaagagaagaacttccggctttccttcaaccaatgttgctgaaacatcaagcaatttttgaacaatcgcagggtccattgaacaactgcagggacctcctccccaa

SEQ ID NO: 67953 - DNA, 1056 bp, Cannabis sativa
  modified_base (1018)..(1019): a, c, t, g, unknown or other
ccggagtataatgaatttgttatagaatcttttccatgtgtcacccaagtggatgccacatcaccttgtgcagaaattgagatgacatttgccctaagtttgcgtgggtacttcctagtcgcatgtggacttattcggtcactaagttgatcagataggtaacatgtgtctgatcttcaagccattcttgatctgatgtgccttatcgaatgtctctttaaagttcggggcattcaatgccatcttagaagctagacctcaagaaacacggtgacagttgccaggtaccgcatgcatgacgtttgcactttcttaatgagcgttgattgtccttttttgggggtaaacccaaaattcaaatttcaaattacttaattatccctccaaattcttataaaaagggattaaagctttcttgacactcttttagccattttaatcttcaaaccatcagagccatattttccttttttccacaaaaatattcgagagttcttgctgaaattttacaccaccagagccatctcaaagcatctttcaagaatctatgaacattgtgtaagtttcctttcacccttttatttcttgtaatttcatgcataacttattctgaacgaatctgtgaaatcatcggttctcgagactgttcttggatgatctaaggctagtaaacgttagggttttctaattattgatgttaatatacgcacaggtcttttaggcttccaattttatagcttctatttttttgttttgttagaaattatctaatattgcccatttgcggctttttgaaaattttccagatttttgccattccctaaacttggaaattttgttattggaatgaaatttcttccttttttcttttgaatcagtctggtcggcatactaggtgtgttttatcttccaaaaatatgtacctctggccgattcaaaccctttgtattcctttttttgtagatgaaccctcgtgagtactagggaagtaactaatggaatatattttaccaggatnnagatttactaataagtatgtttttaacatcctaaaca

SEQ ID NO: 67954 - DNA, 925 bp, Cannabis sativa
gaggactattacgattgagaagctggctgcacttcaatatcagcagcagtagaaagaataatttattttattacaattaaagctagtattcatgtaacataatagttaattaactcattccatgtagttttactaccttaaactgcaatatttctgattcaaaataatataataaaagaatggaggttgtttttctgttatgggatttgttgttgttttccaagtttatgtcatatagagttgatttgtgttaatgacagtagctgtcaagttaattttgatttttcttttacttaattgcatttagttttcaatttttgttctaatttttgcttcaagtttgaactgaatttaattgatttggtctgctatacttagaaattgattattgaggagaaaatgattatttggtacgttagaaaagagataatcatgtttggattaagttgtttgactatgattacaggttgtttcagttagtagctgttgtctgcttgctttgctatcatcttagtgctaagattgctcatttataaccaccaaagatctcataaaaacccttttgctaactcttgtttgatcttcattgacttaataattatctttcatttcattgttaaatcatgctatctattttgtcacactcaagaatttggttcttgtacaaaaaatcttaccaacgataacttaattggtaccaagaaatattatataacttaaatgaatatttgaatatttttcacaaccaaaagagaaagatatggtactgctttacaaggccaccttgtgttgtcgcagtaattaaagagagggagtgtagctagtgtactattatatggttcgaaaaagggaggtgtggaacttgattgggatgtaaggttgagaatagtggaacgattagctgctgctgcaatctcatacttgc

SEQ ID NO: 67955 - DNA, 1182 bp, Cannabis sativa
ctcgcacgtagcttttgctagtatatatatatatatatattgatttatatatacttaacccttttattttttttagtggcaaaactcctttaagtttatttttttttataaatttgacacgccagttaaatattaccgttaaatatcaactagatgactactgtatacacttgtgtatatgtaagagtacaacttcgaagtcgatacaagaataatgtagttactatgtagcggttatatttaactgaaactttaaatttacaaaaaaaaataagtaagttaagagtataaaaattaaaatataaagaaatttcattgtaaattcctcaatttattatgatcattatttaaaacaaaaattccattcattaagagtgataatttgttaatagtaatagtatccttaaaatgtataattagaagaaagaaaagggtttaaattggaataaaaacaaacactatcatactaaaataattgtaataattgtgaaagtgagaaaacttacaatggagtgggggaaaggaacaaggttctccactaactgaatagaaagcatatttcaacataaattcctatttatagcaaaatgaaaccatcaagtagcccagcccactcagacacccacaaaacacttcatttcttattattattttaaaaaataaaataaaaaaggaaaccttttctcttcttctacgtctcaataatttcttcttttacgtggcaacgaaaaatcctttttccacagttcctggatgtatgtctatcactttctgtactatactataccacacccatcacaaatatttatgtataactactaatcacatctaatttaggtatacttattgaaaaatgtttgattttagctcaatcacttttaattcctgtcactaataattttacattataagacacacaaaaatttatgagagtgttaggaaaattcttttttgcactctcttttatacttttttttattattatttttgagatgaaatattaacttcattgaataaattaacattctcaatacaaaaaatgtaagagtttaccagatatagaaatatcaaaaatgctacaatcagatgataccgagaatgtctagcaacataatgtgctactcggtttgctgattgtctaataaaaaataaattaacatttaggagggtagataacaaaag

SEQ ID NO: 67956 - DNA, 816 bp, Cannabis sativa
cacacgaccaattacaaatcttggtaatgatggctttcgattatcatcaatcattaaaaatataactaaatgatatttacctctgaaacctatatattattataatcttaaattttttaatttgttaaaaataattctcgaactattcacagtgttgtaaattgatcattgtattaagtttagtcacacgtaagaaatagaataataacatgattgtttaaataattgccacatcaacaacacgtctgtaattaattttaaaaaataatttattttttaatttaattctataagtaaattttttaatatcattaattaattgatttttattttaatatttttttttaaaatacacatatatattttttatttttaatattaaattatacatatggcgctaacgtggtaactggcgaagcaaccatgtcattattttgtttgctacatatgataaaatttgacagaaggaacaatttacaatactatgaataatttagagactattttaacgggttaaaaaatttaggggagacaataatgcataggttatagttcggaggacaaatcctaaataactatcctaaatatgagtgtgtgtatataatagattaaatagggtttatcccctctaaactatgactgttgtagagttttggcccctaaatttttctctgttgcaagaattccttctaaattataaaaatcgttgcaaatgtttccttacaattgcattctggtcatttatttaaataatttattgatataaacattaatctagtctgtaaagtccttttttggcaagttagatgacaaaat

SEQ ID NO: 67957 - DNA, 1027 bp, Cannabis sativa
taaatgtatatgtatcacttttaagtttatgttcaatggggaactccattgataataagaggatacagcaagcaggacataccagcactggttgcccatttcttacaacgtatcgtttgctctgtgaaattggctgtatagcagaatcaaaataatcatggtcagtctccataaagtttcaaatcaagtaatcaactgtaactaacagtttattcctttaataattcaaagtcgtggcagagaagattaaaaatgtgtcaagcaaaatgactgtgaactagctcaacaaacatacggtttgcctcttcagtatgtattacatcctacagcaagaatctaagaaaacttacatattgttgcttatctctaagtccaagattatcaagcagatcttgtacctcaacttcactctcagtctgcacaaagtggaaaaacctttaagattcaacaccttaatagcaaagcaattattttcagataagaaaaatattccagcgtccatagaaatccaaaactaaagcgggtttcaataatttatgcacaaaaccaatctaccatcgaattggctccttcatcccatatcaaaccgttatgggaaatactcctcaactttccaccagctcttccctcagcttcaaatactgtaacgtcaaaaccgcatgacttcaacttgtaggctgcagcaagcccactacaccatgaagacacaaagtcattttaaatcttcacaaacactccttaagccatcattttaagaaagaaaaggactacacttccaattcaattcaaaaatatatactaacaattagtatatatattaataagctagttccaactcaaatctacttgaaatttatcgcattttgtattttatacatgtgtgtataagcatctaaagactaatgcagcttagcatttacatgggtacccagaagaaattaacgaaattgattcgcctcaacccaactaagaattattaaattaaattaaccagtaactaaaatctgctaaagcgaaaaatgaaaaa

SEQ ID NO: 67958 - DNA, 1094 bp, Cannabis sativa
atatatatatatatactagtattagtaatatgcaatgtgttaaattttaatatatatgtatatatatattaagtactatctaattattaatttaaataataataataataacaaatttaaattaaatacaatttaattatatttttaaaatatataaaattttatttaattttaaatttatttataaaaaatatatctaataactaattttattaaacaataaaataataaataagtttacatatttaaataatataactagtaaatttattataaaatataattaattcattaaattagcatctaatttaaatttaaattaaaatttatataaaaaattattaattgactgatttaaatatgaatttaagtttttgttttaaccctcataacaaacattctcttggaaaaaaattataattttaagcaacataagtatgtgtcatattaattcgtacaatttaaatcaaatttcatatattttaatttcataagattattaaccactgatcgctaatagtgtatcataataggtaatataaagtattagacattttatgggtgacctttggcaattcttgtataattttggcgaaaattacatatgcataatagggtttagggtaattttggcgaaaattttggcaattattcttgtgtaattttggcgaaaattatatatgcctaggcttgaataaattatatctgcataataggctcaacaaattgtaaaagctaattactaagtagaaaacaataatacatgtggtttagggaaaagataataaaatgaaaaggtagaataattgtgggggatccaaaatgggttggaatcactttaataaagtggataatccatttagagacatttatttcaagagtaatgatgagttgtataatccaaagtatgcgaataaaaccaatctaatattaaaataaaaagtgagcaaaggaaagtatctcccaactcctaaattttcactttggtagtcttaattttaattttttatataataattaatatataatatatcgtaattatttatgatatactgtaattttttaaacataaattagaataatttatcgcagta

SEQ ID NO: 67959 - DNA, 804 bp, Cannabis sativa
acaacatctaatccagtttagtatcctgaatatcctttatttatcagaaatattattatgactgagactacctatcaatatgtcctttagctctcaacccttttgagctcctagttattttttaaaaaaaaataaaaaaacaaaacaaaattgaatccattttttctttcaatctttcctcctatacttcatttttttttttcattactattctctcattaatattctttgatcggatattttcttcataaagatatatatttttttaaatgatacatattattcttttgtttgtattcaatatttacataaccccttatttcactccttaaaatgaatatacatatcatttattgatacgtatacataaatagcaataaactataaataaatttttctttgacctgtaataacaggttactaataggtaaacatttcttttttagaattaattgattataatcaactattttcttaaaataattaattaaatatttaataagacttcttttttttttagtgtagcgtaatagtattttacaataatttaatagcttaatagcttcaaggtcctaggttcgaacccatgacctctccatttttcctatccctccctcaccactaagctagccttagtggcttttaataagacttcttttaacaattatgatttataaataattttttatttatatttaaatccctactataattattttaacaatcaagtcatttaattataaaatttacaagatagagattgcaatacgattgcaatactgctttctttcattctagtatcaa

SEQ ID NO: 67960 - DNA, 1036 bp, Cannabis sativa
aaaaagattgttttggtatattttttatttgttttggcatttagtgaagttttttagtttattttttttttatatattgtacttatttaagataatctgtaaatttttcaaaaaatattgaataatttacagtgctaaaaataaagctcgaacaattatttacaatgcatattaaaaaaagagttatgtgggcgtgcaacaaaatagtttaattttttttatacgataaactatccataagtttttaataaattacaagtatttttaaataattacaacgtatacaatcatttaaaaaaaaagattaaaaacttttctgaatgcggaaaaaaaaaaataagtgtaccataagaacccttttaagaggtatactacatagaattaccgtattttattttataactatataaactgatatttttaatatctatgagcgtctgtattataaatattaaaaggcattattatatctagcaccactataatgctctccaacataaatttttatcaatccagatttcgaacaaacaggtggagttagttaagagtaattaataatttttgtaattattattgaattaaaatatattttatattaaataacatcaataatcatacaaaatattttaagaaagttttatagtgctctttcaaaggggtgcaccactcttaaaatagagtttacacaatgtgttgcaaggattattttttaaaaattttatttaaatgcttatgaaataaattgtttgagcagctttctatattgtaaattattttaaattttatcggatgttttaaataagtataacgtttaaatcataccaaaaaaaaaaagaagttgtactaaaatttttttaaatgccaaaacaataaaggatacatcagttttttaagggtgcatatatcttatgatgatattgaacattattagtgtccaaataacatttcttttaattattgcagaattaatgttttatatgcataaattcttgtagtctctgtatgctgataattaaaattggagcaagtataaaat

SEQ ID NO: 67961 - DNA, 943 bp, Cannabis sativa
tttgtacgcattttatggtaaatttataacttgctaatagaattgagacacttagaatttaaataaacaactttattgatttcttggtcagaaagtcttgttactgtagtaacttacattcataaagctattatatgatctaatctgatctttagctaaatttaaacaaaaaataattgcacttataaaaagaaattgtacttttaaaggtggcattcgacttgagtacttaactattctatccaaatctttggacgggatccgtccagaaggccatctacttaagagtaaatgttcttgctttgtgtacttaaagtggtcatccgacttggtacatttaattgtaatactttctcaaatgttccccattccaataccttggtactagaacgagcttcatatttttgtcataccgccaaagtttgtatgcccctgattctagaactttgaccacctgatagggtgcttcccaatttggtctgagcacactagccctgctatcttttgtgttcaggaatactattctgaggaccatatctcccacaaaaaatttccttgctttcttgcttgttgaagtatcgagccaccttttgttgatgtgctaccaagtttaggtttgttgagactagcttttcatcaattttgtcaagtgattataataggagagcatgactagcttcttaatcgtaggccaatcttttgtgggacggaggttctaattctacgggtaacatagcttcataagcataggccatagagaatgacgtttgtccagttgctattttctcgattgtccgatatgaccacaatatttctagtagttcctctggccagttccctttatcttcttcaagtcttttttaatggtgtctttaagtgtcttattgactgctttgacctgaccacttgattgagggtgcactactacaaattagacttttag

SEQ ID NO: 67962 - DNA, 724 bp, Cannabis sativa
ccttttaacaaattaaacaaaaaatgccattgttgttaagaaaaaagaatgttcattggcatatttcgaatgaataaacaaaatttcgagtgggaaatttcacctcttgcatcaatttggcaaagtcggtaaacaatgccttgcgaccagactcgtcgaagattttatccaatgttatgtcttgtaaagccactaatgtcgtctctaacatgtcaagccccgcttggttcgcaaagatgaataccggaagtgactgatcgacaaaaggtagataggttatttttcgatatcagtgtgttctagttctaccaagtcatgaaattgtataaggcatacctttaaagaacagcacaaaatggcatcttggtgatgccatagattctttaatagtgagtcaccaccacctaaattgtctgatctcaccaattctgatcccatatagtaactgaatatgcaaaaaattgatatgttaataagctaaaatgtcccacatcgatcgtgtgagtgctatttgcggagtttatattacacttagcagctaccaagtcttaacctaaccccatcacagagttttggtaattggtaaatttgctcgggttcttttcggtatgacaaacattaaaaaagaagcgaagaagtgttacctatagctttggcagatccagttggctaatgtaagagcttctggcgagctttgtgaaagcttcggtccaattccaggact

SEQ ID NO: 67963 - DNA, 1466 bp, Cannabis sativa
  modified_base (41)..(53): a, c, t, g, unknown or other
aaatattgcataaaatacaatttaatataatacaatacaannnnnnnnnnnnnaatacggcgttccaaacgagcctttagtacatatgataataaagatgatgaatagatatgtatttattgtagtgattatcaaaaagaaactttagaattcatttttcatataatgatttaattgtgatattatgtgttaattccctttctaactcgactccataagttttgttgtgtcttgttttttaatttgttgtaataatagtgttttatcatcctattttgtggggtgtgattatcatttcaggtttcactaatataaagtagtttgttttgagtctttgaaataatgattatatattaatatttcttgaaagaccttatcgatcgttaatgttgttatatattctgagaataaattaccccctccattacttcgaaaaggaatatgctttatttttattttgtttgtttttttgtattaaagttttttttttttctttttgctaaacgaaaattaaaacaaacagaccaacaaacaagttttatttttgggaatttgatgagtgtcctaagaaaataaattaatagataaatatgaaaatctagctggtcccttaataaaattaactaactgatcaagatcatagcgagccaactgtacttccctttatatctttttttttttttggtgggaagatattataccataacaaaagtataactttacagggaagaaaaacgtgctcataattataatagtttatgtaatataattttcatcacttttttcacatatgtggtcattttttcttgagaaaaaaatctcttattataaattaaacagaattatttactagagaaataatactactacaaaaataactatttccaacgattctaaaaatgctttttttagagaccgttgctaaaaattaagtaagtgtttaaaattatcggaaaacattgggtactcccgacaactttaaacactcatgatgtattctcgataatttttaaacgtgctttaaaaattgtaattttttttaaagagaattgttgacggttaaaaatcgtggcctagtcgcctatagtatattataggcaatggtttttaatcgtcaacaattagtcaaatttgaaaaaatttcaattaacacattttcctcactccaatatatataacacgttttcagatttaaaagttttcaaatctatacattttcaaaatatctctctctctctctctctagagttctccctctctctctttctcatagacggcagtccacgagctccatcactcgtctctcgtcttttgctctctctttctcactttctctttcacgagctccatcatagacgaaagcttgttcaagctccaccatggtcggccacgaccacgagctccaccacgagaaccaccgtcactcgtctctctctctctctctctctctctacctctctctctct

SEQ ID NO: 67964 - DNA, 1336 bp, Cannabis sativa
attgttattagatatctgtggtgtccaacactttctatatgtagcaccttatgattggttagcgatattctccaaaagttattttcttaaattatgtgggatctgatacttaattataccaacaacgatatgataccgagaagggtgctagacacagtagtgccttttagtaattttttttcttaagttataaaagacttaatatttaatttcgctactaacaatatgataacaaataaaagtaccaagcaccaataatattttttaaacaattataacactaaagaaagtaatatcttttagtatttctatagaaaaaaaagagtactttttaacatgtatacaaaggagtattgtgttcttttttggttattaataatgactagtgtttcagttaccttaacatacatgtagctataatacctataacttttgttagcagatgtgtgaacacagattcttgtcaactcaacttactttactgtcaactcaaaaacttgtattttgtaaaagctaattatgatttgagaggagatctcccatcatatttttttagttaatttttatggttaaaaatatatattagtatatatatatatattatttttatattagtgttggttatgtttatgtttatggttaaaaatattcttagtatatttgtttttatagggataaaaatacatttgaaattttttgaacaaatgtggtaaatatgaatatcaagaactctattttttataccgtaattaacacttttcttaagatttttatattaaattttaatgtgtattaaattgtactttttaaaattttcaaattgttaaaaattttctttaattattaaaattttaaaattcgaaaacttctgttaaattttgttcaattttacaaatgtagtaattgtctattcaccaaatcgtactttcaaattttgacatgtgtcaaattatccttaaaacttccatccacatcaagtgtctattaaaaaaattaaacaaaaatttttaaattcaacaatctcaatagttaataaaaaaaaattaatagcttaaaaaattcaatatacgatttaatacatatcaaagtacttcagtaaaaattctaattaatatataatattttattttaatttaataatttttatgtaaaattgttaatttttaatcaatcctaaatgaaaaatcagaaaaactaaccaaaaatgtggaacatctctcttgtacacaatttccttctcttttttcctttttcctaaaaaaaaagagaattaaaacaatattccatttacaaaatcactatgctttactcaaccaaaactgactaaacattaaaa

SEQ ID NO: 67965 - DNA, 732 bp, Cannabis sativa
aacgtaggtgataaataattgataaagcgaacaacatcaaattttaataatagttcaccatttttagcggtaacttagttatttgtaactttcatactcctcctatgaagggttcgggtagcacattggttattattgtaaccttcatgatggagctaaatttcattgacacatacttcatactcaagccacacacttggttgtcaaggctcgggtttaaaatgtaacttgctccaagtctttatgtaactcctaggttggagcccaaatcttcttgatccatgatggagctttgaccttattgatttgtgatgggtccctcaccttcttgattgatcatagagctctcagaccatctgtaataagaaatgtaaaaattgtgctatatttagtacaaaaagtaattttatagtaaattcacactaagttttaactttgtgttccaatgcacaattacaaaaatttgatgtaaaatttaatatctaattaatgttttgttaaaaaaaaaataaaatctaataactttataatcaattttattattattttaatatgtaatacaataaaaaaataatataaatattttataatttaatgtgatagttaaatatactaaaaaaaaatatagaaatacataaatgtaaatgaaaaagtagtacatttattgtagtgtaaattttacatcatagtaaatattgtgccaaaataaataacttgctgtcaggtttggca

SEQ ID NO: 67966 - DNA, 1024 bp, Cannabis sativa
atgcatgatgatttataattagttgcaatatttttaattattaatcacaagttttattgtgattaaaagtaagatttttgtagtgaaacaaaaatttagattttgtatatgaaaagttatttctaaaaatgtgattgttgtctttcaaaaaaaaaaaaaaatgtgattgttgttgtgttatttaatgttttgatttttacaaaaattgaagttgtgattggttgaaatcaaactaaaaaaattagagaatatttgatgaaaattattacttaatatttgagaaaattttatcatagtttattcaagtgattattattggggttctatatcaaaattaattaatgattagtggaataatttaatatttttacattaatttgttcattgtggaacaatataatcgaataaaaaacatttagcttggaagagaaatatagtaatttgtccagatatatataattgagttatgtcgatatatgaatcagatattttaattggatcagatatagtcgttttaaactcatttagatatacagttctaccggtactaatataccctacacgatgaaataaatgtagtgtacaagttttttattatattatttttgaaatatggctgtagatgtaatatcacatatatataatacaacaaaactatatatatatagctcaattaatatatttattaatcctgatcacttccatatagaagaaagaatctattaatttataattcacattaactcaaatctactccctagttttcataaataatcagaacgaaacttattaattcatataataaataattgagctaacaatattgcttataattacctagtatcactagggttcggaatgaaactcttttaaatttggctaattagtaatttttttccccgaactttgacatgtactaaagtgtgccccctgttaggctatttttagcctatgttttggatctaatttatgtgcgtttttagctgtgttgggacggaattacgcttgttttctatgttttcag

SEQ ID NO: 67967 - DNA, 3949 bp, Cannabis sativa
  modified_base (531)..(536): a, c, t, g, unknown or other
tggccactggctgtggctgtggctgtggccagtgtggtcctagatcgtcctcccaaaatgccatcacaccacacgcacataccataataataataataatagggctttgctttgcgttgactgtcttctatgcattttttttcactttattttaaaacaaataacaatttacacattttttttaagggacaacttacatttttaaaagcttcttttagttcatttttcatttttaagggataacaatatatttttccaataacatttattaaacagtaaatattcaagagttggacttttatgtagtaccttaattattactgtcctataaagttgttgggttgtctgatatttataatatataggagtgttctaattcagtccacattattatttattactaagtatgaattttatatattaaatttaatttaatttgcatataataactcaaatttgatctaattggatttgcaaaaatgtaaatttaattagttattttagattaattattttttaatattaaattannnnnnatttataaaaaatatttttttttccacataaatacgtaacaacaaaataaaataaattattgttgtttatatgtctgtaacaacaaattaaaataaataaaacaaaaaataacaaattcaaaacaagaagagaaaaattgtatctataaagaaatatttaattttattttagattatattttttttatgaataaaataaatatattttcgatctactatgttataaaatataattgtatcatatgtagtagatttttaaattattatttgttacattaaaatattaattgtataaatattttttaaaatatatataaatatgttggattggccggattggattggttacttttacatgtcaatcaacattcaatctgcataagtgcagattttagattcttttatgcagattttagattcttttccaatccaatccgcacaaatgcgaatatccacactttgcagattgaattaaatatatcgtacgaattggattgaataggtattttatgaacatataaatatttacttttcactttttgtcctattttttttttttggatcaagaaggaatgaaatcttcattaatcacaagctctttacaatcaacaaaacaaaaccagcagccacacaaagctacttacaaatactctctatatacattttctcataatcctttagttttctagttttcatgtattgcaacctgtacattacaactctttgcacatcattaactatagctttagctgtaaaagaataagcattgtaaacacatctattcctattaatacaaatgttataaatcacagcagcaagaataacaaaatttactctttgtttcccattcttggactgtcgagccaaccaactcctccagccttcaaattccaacggccataccttgctgcctatccaattatgcaccagaatattcacttccctcaacagccagcaattgaaaaataagtgttgctgcgtttcctcaaccagcccacaaaccgggcaatctgtagtttccaactcaacatgaaattgaccaagtttatctcgggtcaagagctgaatattaacaacctgccacaagatgaatcgatgttttgggatgtttagagagctccaaacactgctgctatagtggaaaggctgctggtttaagagactattatacagccagttagtcttgaatttcccactagctcatgtagcttgtatgtccctttccgagaacttatctctcaaatgacataacttcttccaataccagctagtatcaagtttaagatcataggaccaaatggaatcatttttcagatatatatactattgatccatttcacccaaagagtatctcttttggttgaaatggcccaaatgtacttagcaagattagcttgattccatttaattccctccttaaatcccaaacccccataggcttttgggaggcaaattttttcccaagacgcaacatgaatcttgctacgattgccattagaccctaaaggaaacctctacaaagtttttcaacctcctttgtgacactgtgaggaagaacaaaaatgctcatccagtaattacgaagaccaagtaaaactgagtgaattaattgagctctgcccacaaaagacagatgtctactacccccaagtgctcaatctctttttgtcctatttttgataattgaaaaaattatccttttttatttaacaaatatttgaaaaaattataaaaaagaaaataaaaagtatcatattatatattataattaatataataaacatcccactactttttaataatctcaaaataatttataataccaaaaataaaattaaaattaataaaatgtttgaaatttattttcaagaccataaaaaaaatccttaataaaaggcatgttgtataatactacaattagcttaattaattacatcgtaatacatataaagttgttataatttctcatcatgccttcctattatataggagcgaaattagtgtctctcttatattttttggctttcagtaaatatgtcttagagaatttatatgttattaatagaattaagtattcaatttaacataattttatttaataattactatgtaatatcgttagaatatctcactgcctcctcatggtggagttaaaaacagtaatatctaataacaaatataatgtatatatatatttaatgttaaaatgaaactaataaattaaaagtgtgataggaagatagcctagaaaaaccatcaattttactttggtatcaattaggtttaggttttgtatcattgttgttcggcctcgcgaataacgtgatttttttttgttagtgaaaaactttttgaatgatgggtttggaatgaatgaaatgatgagtgttttgactgaatttatacatacatagaatataatatttaatttgattttaacacatgttgatgagtttaaatgggagagtcctacaattagtgagaacaactgtggtatatagagataatgattggataaaacaaattagaaaattgaatacatgtcataataaatttgcaacaaaattatgttatttaaaaaacaattaaaaaaggaaaaatgtagtttgactaattaatttccctccattcattttaatgtcaatatatatgatgtataattgtactagttacttcttctttgaaaataataaaaaaaaaactatgtattattgagtggtttatttgtgtatagcattttcaatatataacaaaacaaataaataacattatgttgatgtttattgaaaaataataattggattgaaaataataataataattttggcaatcatgaaaatgaaactatatgtaggtatgaatatgataaggatgtttaaaaagtttcatgtatatatgtacatagtatggattgtattgtaaaagggtggttttataatttaatgcccccaaattgagaggacctagttgtataaatgggtcttatataggtgggtcatgaattgcatgtgacatggtgagtgtccacattctttgtatgaaaactacttggagaattaaagagtggtactgctgctgctacctccacaaacaatcccaataatcacattgctttgttccatcaaaactcaaaaacttaaatttatttcaaattgatctccaatcacctattctatttcaatattgactagatttgcccaattcactcaaccatattgatagtcttatccattggcccagtggatttggacccttttgcaaattggcccaattttgtctctcctatttacaaaattagagaattaagccacagtttaggttttagttatgagtgcatgttgtttaggtttgattttttacttgataattctttttagcgagttttcttttttcaccattaatcatattttttt

SEQ ID NO: 67968 - DNA, 589 bp, Cannabis sativa
ttggatgggtcgaacttaaattaataaactcttatgctataattttggcataggtgaaattgtgttttgcatttattttttaatattctaaatgaaaattttttgcttaacagtacatacatcaaagtagagcccgttccttatgaatttgtctctaatttaactaattggtttttataaaaatatttatttatttttaagtaatttgtgacataaatacttaactttaacttccaattgtaaataaatacctaacttatatttttgaaactctgtaagtacttaatcgttaatacattaaatccagatatcattttcttatttgtatatttgaactattttttttttaaataataaaaatttaatgacttggatcaatcagggattactacgcgacaatttaattaatcaggtacctacaaaagttctaaaattataacttaggtattaatactaccaaaaattaaacttaggtattatttacaactgcaagttaaacttaggtatttatatcgtaaattactcttttttttttttgttatttttacatttggaaaatttgaatttctatctatgcattacgggataa

SEQ ID NO: 67969 - DNA, 970 bp, Cannabis sativa
tgctactgaattttcttagtcttttatttcattgttgtctgctgttattgtcttttggttagagtccttatgtctcaggcaggctctttgagacttcatacttaatttcaaactatagacattaggttactttcttatattgttaggttactttgtaaagcatgacaaacacaccaggctgacatgtagtgttaactttgtactgctactgaattttcttagtcttttatttcattgttgtctgatgttattgtcttttggttagagtccttatgtctcaggaaggctctttgagacttcatacttagtttcaaaatatagacattaggttaccttcttatattgttaggttactttgtaaagcatgacaaacatacctggttacttttttttttcttcatttttattatgttttttctttaaaaaaaaagtattcaaagtttgatcaatatttatttaaacaaaagaactagtgtttttccaaagtaaagaatgtaacaaatcattacaaccttatgtagtatggtgtccattacaaccttgtagggaagctctttctttgataattttcctaatctttttcaatgaataggtgtcttctaattcttgtttcaatgactctcagtaacaataattgggcttagtagctaagcccagatgatgaagaagaactgtattataaaccaagttactttataaatcataatagacatactaagttactttttctcttaaatcaagacaccattttttataagtaaaaatattaaaattatacttgaaacaaaaacaaatctagataaattgaaattttaatggtaccaggttaattaattaaacttaattgaatttcaaaatactgatattaggttactttcttatatagttaggttactttgtaaaacatgccaaacacactaggttactttttttcttcttcattttttatcatcttttttttttttaaaaa

SEQ ID NO: 67970 - DNA, 929 bp, Cannabis sativa
acgtatacaaaaatatacaaatctgtagtacacagagtcctaacagaaatcgtacaaccatcattgctcaatgatgagctgtcctttaaaattgagtgcagaaaaaagatctaaatgcacctagcctaatgacagaaatacacctgagattaattcattttcttcacatcttttctcaaacgaagtgggttctccaacacaccgagtttggcgacaagaaaatgaaattgagtgtgagaaagactcttggtaaggcagtcaacgatttgttcacttgagggaatgtatctaatctccaaagttttgtttagcaccttgtctcagataaaatgaatatccaactcaatgtgttttgttcgagcatggtattcgagattcgaggctaaagcactggcacccatattgtcacaccaagtaattggtgtactgtcaagaggtaggttaagttcttgtaaaagagcttgaatccaggatatctcagcaattacttgagcgagggctatgtgcttgatcgagagaccactggctgtttcttggagcaccacgagacaagagcatcaccaagatatacagaataccttgcaattgaccttcgatcatctgggcaacacgcccactcggcatcagaaaaacctgttagcacaaatctttctcaatatggaatgtgtaagccgtgatgtggagttcccttgatatatcttaacacacgctttgctgcactgagatgaacatttgttggatcttttaagaattgacttaatttatttgttgcatagctgatatctggcctggtataagtcaaatactgtaaccctccaataatacttttgtactcagttggattctcaagaagtactccatcagtaatagacattgttcttcctagtgacattggagttggacatgacttcaagtgcagcatcttggtt

SEQ ID NO: 67971 - DNA, 1452 bp, Cannabis sativa
tacccacatattccaatataatcttcgtaattacaaaattacgctttatttattcttatctccctaatcaactcataattagtttaagtaggattataatcctactctaatacccacttaatcacatatttaataaaatatatctaatttaaatatcaatatattttttgggatattacagaagtctccaccccactttcataaatttaaagctcactacatcccaatccccaaccactactgcaaagaggtacaagatgagtaaaataccttatgcaagttgtgtagaaagcttaatgtactcaatggtatgcactagacctgatctagctcatgacatgagtgtggttaacagatatatctcagatccagggtttgaacattgggaagctcagaagtggcacatgagttatatcaagggaactttgaacactagtatgatattcaataatgaaagccaatacagagaagaaattatagttctagggcggtgtgtcagttggaaatcgaacctacaaaaatttgtggccctttcttctacagagactgcgtataaggacacaattgaagccatcaaggaggcattatgggaaaaggttttgaccagtgagttgcagtttaattcagaagacataacagttcattgtgataatcgaagtgctctcaaaacaggttcaagtgaggaagatatgcagccatgacaatcctgtagacatgctcacaaagtgtagtgtttgtagatacaagtttaatcattacctgaacctactgagcattcaagactgttgagtcttgaatcatacattcatcactagcttgttgaactaattcaggtggatatgttgagaattagctcacaaaaccaatcaataataaattgctacaacatctttttttggcattctgtctattcttgtaattaaatgacagttaagttagttggcatctatttttcaaaccaactatcacacttgtctaagactataaataggtgtaacaactctacaccatagactcttagtacttagattagtctctctctctctctctctctcactctctcagtccagaaagaattctctcaccctttctctcttcttccaactgtaatttctatcctagaactagtgttagtgaaggaggattgtacaggtcccttgtttatctaataaagggttccccaagtgaagctattgtaacttgtgtgatataccattgttgagtataatagagttccaagaactctagggcaatgtgatatgatcaataaagattcaaatattttgttgccactgaattcaagataagctctttatttttatttattttctggtttaaaattttaattcttattattgtttgaatttgtaatttttataacttattattaaccttaacagtcaatttaatgctaatctaattcacatcaacatatatctttatatattaaaa

SEQ ID NO: 67972 - DNA, 890 bp, Cannabis sativa
tataaataatcatatttaattttgattaaattatcaacccatgtttatggtacttttatgacagttatttaatatggttatgtcttatttaattaatttaatacaatttatatataataaatacaatattgcatattttaaataggttattgttgtgtcatttttgaattaggcgtgtcaatttaaaaaataacctgattaataaatagattacccgcatcgacccaaaaataattcaaactcatttaaagcaaacctaaacccatttattttatacgaatttcaaatcaacccaatttaccaccactctctgaataaagattacaaaataccataattgaataactatcaaaattacataatcatattataaatgaaaacctatcgaaaaacaaaaaataaagctctaccaaaacaaaatacctttggtaatacttttttaatcaattttttgttttcaaattagaaaagtgaaaatattttccaaaatcatattctataaacttgttttatttttttaattttttaattgagaattaaaattttaaaaattttgaaaacaaaaaaaagtcactttcaaaaattttttaaagtaattttttatcaatattttggactacgacccgaacttagaccttggagctcggacccgagatccgatctggaccccagacccagactcgaaccgaacctcgaccccaaacttgacccgaaccctaaacccggacctcatacccgacccagaccccgaaccctgacctagaccttggacccagacccggacgcagacccagacctcagccctggtcctggacctggacctcggccccaaacatagacccgaccctggcccctgacccagacctaaccctagccctagccccagtccc

SEQ ID NO: 67973 - DNA, 712 bp, Cannabis sativa
agacttagccaattttcttgtaatcattctcctgagaataaaaacatgaagtagacatagctccattattgtcgcaacacagggagtcaactacgttaaattcttgtgtgtgctctttattgttacttataactttcatctcttctatacatacgagtgagttggctagttttctacataaatattttggtacttttattgagagccataactcaagaagtcacttaaaagatggttgcaacacgatccacaagtgtggaaagaagcacaattgttggccaacacacaggggccacaccagctatgggactggtgacaaaacaacacctacatctcagatgttgagtggaggtgtaacgtcatacttgcttaggtacactacagtaattttctaattactgtgcacacctttgctaaccaaaggatttctcgaaaatcatgttagatttaaagttttaactaaactttaaactagattttgtaggctgaaaagaataaatggatgagatgagagcatcgtgttccttttatggtgcttcaacagggttttagggttgaattacatgaattaaaaatagaataaaatattggtcaaaaattaccactaatggtcggccacttaagggaccattctctagttacaattttgccactttatttcaaccagttattcttctttcaataatatcatatttccaatttcaatcctata

SEQ ID NO: 67974 - DNA, 4975 bp, Cannabis sativa
ataaataaaaggatcatttataaactttatcttcctacaaggttcaaagtgtgacctttgaccactcaagttatggatattacatatctgccacagcttaaggatcgggtcgtgacaatttgtatggtaaatacacaaatcatgatcaatattttattacacattttccgtagtatatacccaaaaagaatgtcataataataacaataaaattcataaaaaagaatctcaaaattacaaaaggcatatatatgaaaaaattatggaaagataatcatataaaaaatggctttgtatgagattaaattaattaacaacaatacgtcacaattttcacaatttatgattaatgaaattgacatgcttagactcacgataggtgagtacataagcgctcaattaattatgcactaacataattatattttcaaaaaaagaaaaatcgatcatctatacaataatgttatgacatgaatataattatgtttcaattaataaataacaaataataaaattgtgagattataaatattagaaaataatttaccttaatttaattatgtgattatgagtcaattaattatttatattgaccaaaataaaaatataattacacaattaaatgaaaaaaaattaaaatagagcaaaatggtgaaaaaatggtccaaagttctggtctgtacgacatgtcgtttgctataaaacgatgcacaacccttaacaaaaacggcacgtcggttgtctgaaggagagccaaaaacgacacgtcgttttgaggtcatccctaaccttcagctggccacgcgggtcagatccgggtcgtgcgatctgacagcgaacccggtttcccgaccgactggaaacaccacctctggtgctccgtttccgacaccgtttgagtgaatttcaccattttcatatacaatccatttccagtacccatttttgccaagaaactctcaaaacttaaaagtatcttacatattttgacccctttatgggtgtcaaagaaaacgaaaaaaagttctccattgtctttgaataacatacccaaaatacttgtaaaaaaatcattacaacaatccaacaacatccacagtaaaaaaaattgaatatggtttttaacaaaaccaaaccttgagttttttgaaaaaaaaatatataggtaaaatatagataaaagattaaacatttgagccttaaaatcagataatcaagctctgataccaattattaaatataattgaacatcaaacaataattaaatattaataacaacattatcttatttaaggcatcaaatgcaatatatataataaagattaattttaccttgtaataattacaatgattatcaaacttctcttggtgctcatcccatcccttcaatctacccatcaaagaaaagagaaacaaaatgtgcaaggggtttctatgaacacaactcttctacattcttcacctatcttagccacacacattcctctccctttactaaataaaagggcacatccctttttaatgaggaattatgggtcaaaaaatgggcctacatgcccaatgtgagagtattaattgtcttggcccaatggactgaccaaagacgtttttggagcgtgtttatgggcccaagcgtacgttatgtccatcccattgtgacccgatggtaatatcatacattaccaattatatagttatcattatatgttaatactgacactaagtgagtaacacttaattatgttagtccacataaaatattctaacccggagttcctggtgaatggtgatcatcaatcatcatttatataattaatatcaaactgatcaatgtataagaaaaaagaaatatcaaacataccaaaaaatacatgcatacacacattatacatataaatatacataagtttctagagaaaaataaaacaatccagagagattaaagggttatcaatgtcctctagtaacacagagtcaaattcttggtcactgatcatggcatctccgttaatttttgtaccgcatggatgattaatggtgttattatttaatgacagatctcgattcctcaaactagatcgtatcggtcgatcaccactggagatgtcttttggactagttgatggtctactagtagtactcctctccttccttgagtaatacgatgtcgtcgtttgatcagaataattacctaaagcattcatcacacgcctggaagaatcgagagaataattaggagccgtacgcttcgagtgagtactcaatttatagttatctcctctaggaccaggattagtaccgatgaatctccgactcggagaaggagatctcgaggcggttagtcttctactactgctaataattggaccagaaggtttcgatttctcaggaatatctcggcggaagctcttctgtctcgtgagatgatgatagtcattggcgacactactcggcgaactcgatcggagtcgcttctgagagaccgagctcttcttaagcgctgccggaggaacattttcaggcgaaagaaacgacgtcgttttgttgctatagtttgaagtactggtctgcttgattgagttgatacggattatgtggggattttccttgtagcacgaccacaagaagtcgtttgagaaagacctgtctttagaggacgatgacgcagttgagctagagctgcagctgttgctgatggtgctggtgctacgacatgtcgttttggttgaaaagggacatgtggtgaaggaagaaagagaggagttagtagaaagagtatgagatgttgaaggagatggtggagagggtaagaatttgtttgggattttgtatagaggactattttgttgtttggtattaatagtggttgttggggtttgtgagattatgaccagcttgtcttggattagatccaatttctttgcaccatcttcttccgacgttgccgggttctcagaattatgagagttttgtggtatgcatttgctaatgcaagaacccatttgttaaaaacttttggttagttattagtatgaagagcgagggacgattatataatagtgttcaagtagtttatggtttgtgtaatttatatatgtacatattattcttcaacaagttaagttggtttgagtggaaaatgttttgaaatagagtgggagaataataaaatataacaaatgggaaaagtgggtggaatatgagggagttttgctttatgtatttaccttttaatttgttttttattctgtgcttagctttttgttttgaagatagttttgaattaggttgccgggtttgaaatccgttggacaacggttatgtgtgatacttttgattggcgcaactttcatcatgtctctccagctttttctttttgaaaaattatttacataaatggcaaagattgaatatcgcctctcctcaaaattgagctaatagaattgtttgccgtcattgtgctcgattacaattgatacactatccgaccactcttctttattttgaaattaaaaatgagaacaataataatttaaaataaaatactgaagaatggaaaagttttgggatataatgcgccttttgctaacccatgactgtaatatgtcacttctgcagtttatgaacttcagacattcaacaaaagaaattgttactaatttgatatagaattttttattttttccacattttcaataattcaactccaaattaatatcgcattaaatatgccttgaaagactttgctcttaaaattaaaaagaatcatgtctaatgaggacaaattttgtcagtaaaaggtgtgtatttcgtcgataatgaataccaatagctacatgtcgttagtaaaaaatcgttagtaatacctcgtcggtgatagggtattattactgacgacatttaaagtcgtcagtgataaaaataattaccatcgttggctaaaagaaacaatttttttatttctttttaatccgtacgtctatcaatgatgagaaagttgccattgatttatttattttaaaaaagttataaataaaaaaaataatttttattaaatattaatttttcactaatcaatttatattaaatattttttttaattaaacaatattcaaaataattaaattaaaagtgaaatctaacaccaaactaaatatttttatatcaaatatcaaaagtcaaatataacaatatccttaaataaagataatacttactaaagtaaatattcataaaccataaataaacataaaagtaatagttcatataactaaaataaaaatactaaaagaaatttgttgttgcgtcgtcatcatcatcattaacatctcttagaatctgcggttgaggagcatccgtcatctgtaggtagtatggaggcatctgggaacttgtcatcatctgagcagtctgttgcccatgtggtgtcggcatatgtgatgtccgctgctcatattgttgccccggcttgtggtgtcggcatcatctaaaaaggtttgcagcatctgtgacattaattgtgtcgacatcacttgtggcatccgaaactgtgagacttgagacgtctgaggcgactgcgtcatcatctgcatcattacttgtgggctatttggcgacgacgactatgacatcatttgcatgaatgtctaaaatatctaaaattgttgaaattgatgagccatttgttcagggagttgttgaggctgctgtaacggttgttgtaacaattgttgaaatgaaaatagagcttgctgcgattgctgatacttagtgtttaagaaaataatattaaacttttttttagttaagatacttagtttttaaaattaaatgcattaaattttaatatgtttataataatacttatatattaaataactttaaaaattttattacaataaaaatttaattatttaataattaaaaataaataaatttaaacttctttttaattaagatacttagttttaaaatt

SEQ ID NO: 67975 - DNA, 701 bp, Cannabis sativa
tttttaaaagttgggttagaatagttttagcttctagctgtagcttctccataaattcttcaaaaagttgtttttagactgtttatcaaacatatttttatcacagttttttcaaaaagcagcttttagtttttctcaaagctgtgccaaatgggccctgacctaattcgaaaaaatctataaaatttcattcactaagataaataattataaaaaaaaaaacacacacacaaattagaattataaatattgtctattacatgttgtgagagttttgtttatctttgtgtttagtctatttgtcttggttggtatggcttcaagtagtcatttggggattgatagaggaacaatatgcataaatatggttggaggaggaggaataaagaatattgattactggcgagattcagaaatgaaggaatgagcttttgatgatagatcatatttagtgggaaagtttcttataggacaaacttttggtttcgatgcgatgagcacacaatggcatctctttagcagctaaacaaaggagtaaatatcaaagaattggatactaatcattatctattccaattctaccatgagattgatattcaaattgtcattggtagcccatgaacgttcaataggattcagatgattttccatctctgaagagtggtgaagatcctaatttgattcatttacacaagttggat

SEQ ID NO: 67976 - DNA, 2217 bp, Cannabis sativa
atattaataattatttctatttttaatttacttaaaaatttagtagaggagatgtttaatatttttaagaagacaagtcgtccctaaaaattggacaataaatattttatttaaaataatagctataaaaaaaaattaaaaataactggagccctttttaaaattttaaaaaatgacttttgttgctcttaaaaattatttttcatttattgttattaattttttaacaatattctttattttcttagattatatataaacatactaatccttagattatatataaaacaattcattaaaaaaaaaacaccatttataatggactgctgtacttttcttatcttcttgtttaagagagtttcataaaaaagattagacaagtgaacaataataccaatcatgaactctcttacttattctaaagtggagtggaagattattgattgttgttgtctcttcacacctattttttcaaataatcacattatggagcaagctttcagtacttttcttttctttttcttctgttccggtggttgaaggacaactctcatggctgcatcaaagactccttttacattctgtgtatacaagatgagtttaattattatagccaatttcatcacaaagaatagaaaaggtttagttatgttttgtatatatacctgttgtgttttcgagctgcattcgatataagcaaatgctccgataagtttctgaagttcctctcccttataatatgatacacatatcaatataaatacaagaaatatgcaataattaattatgtaaagagtaaattttttcacttgagttgtagtaattggaacggcatcaggatggtctatgaagaattgtgtgtcatctcgaaggtctagctccacaaaaccaaaagaaaaattaaatgaaaaaaagaagaatattcttcttcatcttattagtaccataagtttcattaactaaacacaatatgatgatacacattatactacatatatttctacaaaataagcaatagaaagatgaaaaagataccaagttttgttccaacaagaataattgggacaccgcgggcataatgcttcaattcatgaatccactggaaaaacaaaaaaaacatacaaaaaacaaagacatcaacaactaaacattataattaaaatagatattttaataaatgataattgcccacataagaaaataagaactaaccttcttaaaaacattattatagctaattttgctaatgagagagaatgcgagtataaatacattgaccccacaataactcaagggtcttaatctgttatattcttcttgtcctattctccatagaataaaaaacttcagaccttgaaaagagtgttatttgtgtaaatttcagtcattcaatacttaccggctgtatcccacaatgccaagttaatattgcttccattcacaatcatatttgcactgaaattgtcgaaaacagttggcacataatcctgtttttttccaccaaagtatgaaataatgaataataaaagaatacaaatgtatcatcatttcaaaacaaacaaattcttaaatgtaagaacaaaccataataattacaaagaaatattaaacaaacaaataaaagatcaatcattataattagaaagaagatcaaacaaagaaaacccattacagtttaatttcaaataattataataaaaaaaaactcaaatcataagttgaaatgaaactaactaaccgtgggaaaaatattactagtataggagataagaagacaagtctttcccacagctccatcgccaacagttacacattttatgaacctcgaagcactcatttttcctactttcaaatttctaaaaaaacaaaagaaaaagaaatcgaagcctgtgataatatttttcctccttaatcctaaatgagtaataaattttgcaaggaaaaatctttgaatggaaagaaaaggaaaagcaaaaaaaaaaaggaaagaactttacaaaaggaaaaaattttgaatggaaagaaaaaattgaacctagcaaaatttaaagatttcaatttactttgaataaaagactctgaaatgcttcattcttactatgttcttctacgtgaccatttgaattattataccactcatatggtgtaggatagattagagcttaattacttttgattttgagggatgaaatttatacatgtgcatttgcttgttct

SEQ ID NO: 67977 - DNA, 4382 bp, Cannabis sativa
atataaacgcctttcctcaaaaaaaaaaaaaaaaagatttctcttttttttttaaaaaaaaatattatactcaaccaaacttagattatttttatttaatttggataaataattaaaaataaattttaattatattgcaaatttttctattttatattaaaattcaatttaaggtttattctattctattctatttattaataatgatacaacatttgggtcaaattgtaaataatgagaataataacgtaatcaatgccacgcgtcaagatcactaagaattaagaagcttaaatcgtaacggctgagaaatgtagacgttacaaaatcctaaaggcaatactccaacggctctttccttctccacctttgtcttttcttattcaaatttaaatatccaatttggaaaaccttattattctcttctctatccaatcttatcacccacactcacaaattccctctactccattttcaacactcgcaaaaaaaaacctctgcgtttcgaaatggccatggctctcagacccatagacaacgagcttccaacaacgatcccagaaaggcctaaaaagcaagctaaagtagcgattccgattcaaaaacagccccagctttctaccaatgacgaaaacaaagctcctgttgactccaccattgaatatatcgactccgacagtcttgaaccgattgaagaccctcaatccaagatccaagtgagtcagagtcccttttcttcagattatttaagtgtttctgagcaaccccatttcgaattttatttattcatttatttatgaaatttcagaacttaatagaaggattagaatcaaaagactggatccaagtgtgtgagtcactgaataatgctagacgttttgcactctatcactctgatctccttacccctttactgtaagctttctattttaatctcaatttgttaactttttcatgaaattaaatatgttattagtacaaatattacaatctgggtgtgattttttcagggacaaagtcatgctggtactggtgaaggcaatgaagaaccccagaagtgccctttgcaagacctctatcatggcttcttctgatatcttcaaggccttcaatcaaaaattacttgatacatcaacctctgatgcatttgatcacttggtctggttctcttaaccttgaataattattaattaataactagttttctgtgattggtttttgataaaggggttggattttatgtgatgaattttgcagatacttcagttgctactgaaggcctctcaagacaaaaagtttgtgtgtgaagaggcagacaaggcattaaaatcaatggtggggtccttgactcctttgcctctcctccaaaggcttagagcctctgttaagcataccaaccttagaatcagagctaaggctgctgttgccatttctaattgtgtctctaagatggtatgcttataaggcttaaccaattagtaatgaaatgactcttttagctaattcttaatggtaaatgctaatccagattatcaaaccatttgttttttcagggtctggaagaaatgaaagaatatggactagttgatctgattcaaatagctgctgatttgttgaatgatcgattaccagaagcgcgagaagctgcaaggagtgctctggtttctgtttacaatgcatttatagagaatgaagaggaggagaagaagcaagaggcatggcaaaacttttgccagtctaatttgtcacctatacacgttcaatctgtattcaaatttacaacttcctagaggttgaagaggaaattatactgtagtaactaaataaggaaaggttgtttttacatgacagccataagtgtgaacttctgagcttttggtcatgtaaaggttgtttttacatgacacttagtataacactggtttgagatgaatgagaattatttattgattgtttgctgtaaaaagcttcttattataaaggaaataaaaatatttcaagttttgggaagttaatcagtcacaattaccttgttttatttttaaaatattgtagtctttacattgtaaccaccactaatcatcattacaatctttcttatatgtaatcataaccaggctagctcaagtcaccataagaaatatgaaaagagtgcgtggtggtcttgggatcgagtcccaaattataatgtaatgtatataaaaacgcttcaattaaaaaaaaaatctatataatcataattcctaaaagaataatagagtctatccacactcaatcctgttaccattccaaaaatgataactattatattaccattactattaccattacacaaaaatcaaatgataccccaaagagcgactttgacaattcaaaaaaataaagttgtcgtatagtttatttaaccaaagagcgcaaagccatctcaacctcagcaaatggttgcccagcatatagttgaagctgacccttctttacaacaattaccttcaatttgtttgagtttattgcttcttggagttcctgcaaaagttttgcattcaaaaatgttggcacaagtctctcacttgaataaaagagtgttattatacataagatttttttaaggtaaaattatattattcttacttttatggacaaaggaacaatatcagctctaacatcacccagatcttcaaaaaatgattccaacagaaaacagaagttattggcatcactgcgatcttcaaatgcaacagtatacgaataatcattctggtttcgggcttcaataccaggctttaaggtgtaaagtccttctggtccttcaggatcagaacctcgatgcataagaacaacctatgtattggagatagattgttttgatggttagaaaacgccaacagaacaagaatgacaatcgattacagttagctaaacatgtaaaccttgacaaagtttattatacgtactagaacataaggaagacccaaccaccacatatcagtctcactgttcgattgaggctttggaacactattggatactcgtttctttccagctacttcttttcttgaactaccatttctactcgagacaagatcatcactgtgtccttctatggtttcatggttctctttcattaaagtttcatcacttcccatccctgacttccttgattttgctgattcagctgaagtctcctcaagtctaccctcctgatgtaaaacacctataatttaagcgatcacttgtaatgtacttctcaaagccatgtccatatataatatatacaaacacatacattttaactgtttatgatataccataaatgagccttgcattaattataaaaactaccagaaggcaaagacaatcataacatatatgaaaatttgtcaccttgacttacattttatcagaaagtcttgaactagattcatataagaaactacaataacatgaatctgtccagtttatattttaatatccaacatgattatgagatacccagatagtctcttctccatgtagtcattgtcaaaagacaaaatctaataaaagacaacaaaattggacataaatgccaaaagagtcaacaacaaagctgaacacacacaccaaaatcataacgaccaaacaaacatgtaaaactgctataagaaagttagaatcaaaccaaatattttaacaaataactaaatgctggaaaatactagctaaaaaacattcaaatatattgtatgatttagggacattaccatttcttggtcttcctcttttacttgctttcttttcaccaccacttcctctgctcacccctttgttcgaatcgctcaaaacattttttgtcaaatccttctcttcttctacctgtgattccaatttttcatttcgaacacttccattttctgcaattattttgtcactgaaaccatcccttttcccctttgacactttatacttttctgaatcaccaaatccctttggattctttcttggatcaatagaaggacttttaaatttatgttttttcttatacatctgattctcattttcctttctctcatccaaattattctttctcacttcatcttctaccttcttctcagcattgataaaatagttggcatatgttcctgtaaacttctctttatcagaattcaaactattctccaacttcctcaacctcgtttcaatctctttctcaatcccagttctactcttagtactcaatatttcaccaaaaccaattttcctagtcctcgaatctttcttttgcccatttttctcatttctttcaactttccgagcttgcttagccatagctctaatttcttcaattttctcacccacttgaacttcatcaaaagaacccagattgctactctcagacactgaat

SEQ ID NO: 67978 - DNA, 630 bp, Cannabis sativa
gcatcacctattcaaggtgctaggcaccactagtgccattaaaaccgatgagtaataacatgtgcgcatataaattacgaaaaaggggattggtattaggaattagtaatgcctagtggttagtaccttttagaagtattttctagcaattggttagtgatattttctaaaaattatcatattaaattatattgaattcgatacttagatattaacatgttagagggtattaattactactcatacattttaacatttctaaatgtacatataagttggcacacatttacttacgcaaattactttaacaagtattaatttttattgatacagtaaaacttttatctgcgaaaatatatatttagcaagtattataactaaatagagttacacttaaaaaaaatcaaaatactaaaaaatatcaatataacaacaataataataaacaatccttaatactatatcataataaaattatttttaaatataattatttaccaaattttagaaaccaataagttgaatatatgacccgaagaaatatcattcaaagaaaataaaatacgaacacgcaaggattttacgtgatttggacattaacgaacattagtccacgagtcaatattattg

SEQ ID NO: 67979 - DNA, 1728 bp, Cannabis sativa
ccctccgcacaaataaggaacaaatagggagatagagaatccccttgtcgaatgcccctactcggagcaataggaccaatttcatgtcccccatgtactatcttgtattccaccgtagagatcgtgtgaaaaatcagttcaatgaaacggttatgaaaccccattttactcatcatagccattaaaaatccccattcaatacgatcgtaagctttacttagatcgagcttcagagccatataaccggtttgccccttgcgttttcttttgaagtagtgcattacttcataggaaaccataatgttatcggagattaaccggccaggaataaacgctgattgattctcagagattatatgtggaagcacaattttcaagcgattggccaagacctttgaaatgattttatacaaaacattacataaggatatgggccttaaatcacccatattactaacattcttctttttaggaataagaataatgttagtattattggcattgactgggagcacacctgattcaaagaagttttgcacttgcgtcacaacatcatggccaaccacgtcccaacatttttggtagaagcccggagtcatgccatccggacctggtgccttatctgggtgcatttgaaacaacgcccttctaacttcatcctcatgaaccggccggattaactcttcattttgactattcgaaatggacggagtaataccagccaccacagcatcagtaagagcattagttgaagtgaataattcagaaaaatacatgtgaataacgtcatgcaaacctgaactccaatcaacccaagtacccgaactgttttgtagccttgtaatagcattgttcttcttgcgagatgtagctttggcatgaaagaacttgctgttggaatctccttcgcgaagccaaagttgcttcgatctttgtttccaaaacacctcccgttgagtaagaatttctgtcaagcttttttctgcatttttcaactctacagccgactcttcatctctcaacctcttcaatcgcttgatattattcttgcaatttttgattcgatctttgaagttgccagtgtactcattaccccagcttgaaagaacctccccacaacgcttaattttttctgtaattgactctccattactggtttcccaagaatcccgaaccacctgcaagcacatgggttcacgcagccaagcgttttcgaacttaaaatggcgaggagcagcagttagaacattgttcaccaaatcaagtaacaatggacaatgatctgagcttgagatttccaagttcaaaagttgagccgaattaaaaatctcaagccaaaggggagtagccatagcacggtccagtctaatttccacccaactatccgtaccacgcccacgttcccaagtaaagggatatccaatgagctctaagtccatcaggttgcaatccgagatggcttgttggaagccttcaactaacccattaggataacgattgcctcctcttttgtccgaatgagaagcaatgttattcatatcaccaattacgcaccaaggtagctgagattcatcagcaatcgtacgaagcaagtcccaagttctgaatcgaaaagctcggttgggttcaccgtacataccagttaaacgccatgaacctttctcaacattattaattttcacatcaatatggtaattggagaagcccagtacttccaaatcattctga

SEQ ID NO: 67980 - DNA, 911 bp, Cannabis sativa
cgtaagccaagacagagtaaatgtagaatgcagccttgccaatagcaagacaaagtctccttacaaggtatggcaaaatcgtcaagcaacaaggaaaagaagttaagtgattcgtcaagtaggtgtaccaacatgtctggccggccaaggggagtttacaggttagctaggatgagcttgtatggccagccaaggtttgagcacaagctggccggccaaaaggtaactttcagagcaagaaagagtttgcttgaccaaggaagcctaacctctacaaggaaaaggtgtacaaaggttggcctccacctctaaggggtggccatcaccaaggctggcagtcactaaggctggccaacacatgcaaaaacctggccaactcttgacaaagctggtaggaacatgacctgccaaaccctgtcaggaacgtgacctgcgagaccctagcaagttgtagaacctgctagatcctggcaggagcatggttagccaaacctcaacctgtagatcttgtatggtcggccagcctgcatcttacaagtacatggctggctagattttcccttgtagaacattgatgcatagccttcatccatggacaacaagccaagctgtgagttgggccttgaaagcccactaagatgctacgaaaagttctactttcaaggagcaatttggtcatttatatttattaattaaatatgtgaataatacctttattttacctatatataaggatattaggcatgtaagctctactatataaagagcattagcctatctctaaaaccctaagtctaaagtctcaaaccctaagtcatcagctctcaactctaaatctgaaaccctaatcctctcttatctctccatattacacgtccaaagggctctctacatctctctctctctctctc

SEQ ID NO: 67981 - DNA, 1185 bp, Cannabis sativa
tctaggaaagtgtgggtattcctattgaaaagcaaagatgaggcatttaatgcctttgtcaattggaaaaggctgattgagaatcaaaccaagtgcaaaatcaaaaaactgagaactgataatggttgggagtattgctctaatcaatttgatgaattttgcaaagaacatgggatagctagacatctcactgttagagatacacctcggcaaaatggtcttgctgaaagagtgaatagaactctcattgagagagttaggtgtatgttgaaaggtgctggtttggataggcctttctggggtgaagctgttaagacaacttgttacctaataaataggtgtccatcagttcctttaaaatttaagactccacaagaactatggaaaggtcatgcaccaaagcttgaccacttgagggtttttggttgctcagcctatgctcactacagacaagacaagttacaacctagggctctaaaatgcatgttcctaggctatcctgatggagtaaaggggtacaaattatggtgtctagaaccagggataagaaaagcatcattagtagagatgtggtgttcaatgaggaggaaatagcaatgaaaaaggctgttactgctactgctccagaaaccagcagcctaggagatcaaattgaggtggacactactcaatctagtcctattgaagaaacagaaactaccaagaatgacaatactgggactatcactcaatctattctcagctcctatcagcttgctcgagatagagaaaggagaacaacaaaggcacctgacaagtttggttatgctgaatttacaacctatgcacttagtgttgctgaagatgtggagaatgatgagccttcaagttacatagaagccatttctggtaaaaataaagttgcttggttgcatgctatagaagatgagaaactatcattaaagaaaaataagacatggacagtggtgaagagacctgaaaaccaaagaataatcaaatgtaagtggctattcaaacaaaaggatggtgtaccaagtagtgagggaccaaggtttaaaacaagactagtttctaagggatttactcaacgagaaggagttgattacaatgacatattttctccagttgtcaaacaaaccaccattagagttgtcttatccatggctgctagatttgatcttgagg

SEQ ID NO: 67982 - DNA, 573 bp, Cannabis sativa
aaagctgtggtacaagcaatcccaacatatgctatgagctgctttcgattacctgtcactttgtgtaaccaaattgagagcatgatggctaacttttggtggggatccacatcatcaggcaatgcaattcattggaaaaattggaattccctttgtaaggctaagattcatggaggtttaggctttaggaacttcatccatttttatcaagctcttctagctaaacaagcctggcgcctattagaatcacctaactctctcctcagtcgtgttctgcgtcacagatattttttaaatggtaattttcttactgctggtttgggtgcctatccttctttaacatggcaaagcattgtttgggaaaaagagcttctagctaaaggccttcgttggagagtgggacttggaaatcaaatcaattgcaaatcagatccatggcttcctggtcacaccgattttactcctttcaattttataggcaatgatagttctctccaagttgccgatctaatagatcaacatagaaattgggatttaacggttatttcagctaactttggccaagctgatatg

SEQ ID NO: 67983 - DNA, 1717 bp, Cannabis sativa
ttccaaattgcacaaatcagtgatccgttctcccaacagcttcgccacaataagtgtataaattctaggtgcttttaaagttaaaaacgaacgatatgctaagtaaggttgtcatgtttgttagccattaaagcgtgaaaccactcaaaaccattagatacaaaaataaaacaaatattcaaaaccaactcaggcacagacaaaaatatcttatcttagctattaaataaatgtctacctgaccttattttgttgtgcttttaacagattcttgtgatttaacataatatacacaatgaaagacttagaatagtcaactttaacaatagtctatattattgttcaaaaaaagcaatagtctatattatcttaacggttgcacacattcacaatgaatagttgcacccattctcaaccaataggcatccacagcacaaggcatctttcaaaaactacacaacttacaacatatccatgaacttgtgagaaccattctcaaattgtagaaatctgaaattcgaaataagcgaaagtgtctaattgcctttatacagatactttaatcactaaaaatatgattacaatatatgagatatatatacatatatatatatatataaaaaagtgcaagcatatttcaaaatcaataactattcgtcttgtgaagaatttttagcgtgagtttgatattctcatacgaagtttaaagcataaaactgtgaagagtttgaagagcaaaaaaaagttagtttcattacttatacatttattagagaatataacaaaatcagagtatataaccaaaacaaaataatagaaactaaatgggtggaaaggaaaaaatataaaacactataaacacaaaacataccattataaattaaattacagtatataatttaaaagacactctttgaaatttagaatatatcatattcaaataactaatcagatggagaaagaaccattcgtaatacaaagcattttcctgaaatgaatgaagcaatattatatcgtgacattgggatagaacactagattgagaaaccaatactattcaacaaataaataagagtgaacagaaatcgaaggagagaaaccacaaaatatgaagagggaaaaagaaatcacccctcgtttcccatccacaacatagaatccacaaacccgtgagaaaagccgaacaattttattacatataaaaacaacaatcagaaaccatgaaaaaaaaaatacaacgattcagagactcaatgttctggaaccaatcctcattaggagcgcctcaaattcatacctgtgagtagtgaagaaatgatcgattgaagcgcatatggtaatgagcccaagttcgagaactcgacggcctatgcccgtatctaaacggaagtcctgtcctgctgatgagttagtgagagaggaaacccaaccaaaaaggggacagggagacttgagtaactgagacaaagagaggttatgggttatgagaagaaagaaagagttgaggtttaagctagggtctattggtttggtttgggtctgcttcatgaaaccctacaacattaaacttgataaataataggaattatttcacataaaaaacaaaaaaaaatacgatttgactgaattttaaacatttatatgattattttcattttatttacagaaaatatggtctttttatgttataatcttgttaattttttgttatatgtat

SEQ ID NO: 67984 - DNA, 2349 bp, Cannabis sativa
ttatactatatagtataaataaagtctattaatctttacttttatttgtaataaaatgagtttttttaaccttatgtggtggttgaataacaaatttttattatttaatctaatcttgcttaattagttaaaaaaatttatttattattttgtgaaagtcttagtattaagaaaagtgtcttaaacactaagaaaaaaataatctacatagaaaatgtggcattttatgtgattgttattctatttttactcatttgtgaggctttcttatttgaatatagaaatattatatcactacatttttagataaatatctcatttttctgtttcaaaaataaataatgttgtgatgctctattttatagttgtcatgccaaattcacttttgggaagatgagattctaccaattccacaaaataaaatataaattttttcataatatttgttaaattgtttctttctaataaagaaaaaaagagtgtaaatagtttcttaaaaataactacatcatcaatcacaagcccattttattaaatttagaaatgttattctttttttcatttattttattaaaaaaacacatgtaatttcttttttcattccacagtttttaatatttgccacaaaattaccatctttctatatatatatatatatcataaaaatagaaaattatgtatctaatttcaatactattactttgtttgtaatacatacatcaaaatgttatattttaaattatatcacttaataaatataaaaaatatataaataaaagattagaaaagttggataacaccgcgcgaagcgcggcttagaaatattatatcactaacatttttatataaatttctcatttttttatttcaaaaacaaataatgttgtgatgccttattttatagttctcatgccaaattcacttttggggagatgacattccactaataccacaaaataaaatgtaaattttttcataatattagttaaattgtttatttctaataaagagtctaaaaatagtctcttaagaatagctacatcatcaatcacaagtccattttattaaatttagaaatgttattctttttttcatttattttattaaaaaaatacatgcaatttcttttttagttccacagttttaatatttgccacaaaattgtcatctttctatatatatcataaaaataaaaaaaattatgtgtctaatttcaatactattattttgtttgtaatacatacatcaaaatactatattttagattatatcacttaataaatataaaaaatatataaataaaagattagaaaagttggataacaccgcgcgaaccgcggcttagtttcctagtaaaagtataaaacaaagtaaaagtctaaataataaaacttaatttactacaatcaattacaataaaatagttagaaaaataattgttaaataaaatataaatatatatggtcaaaagaaacaattaagataaataaatataataaaaatttaatgaccattaaaacaagaataatcacgttcctaatttttttttttaattttagcctgccatcagtgaaatttaattaatatattaatactaatataatcaataataaataaaattaaaattaatattgatgtcaataccgaacgcttgaaactcgacttgaccaactcctaaattatctccttctggaagattgttcatcccgtaaatgtctctaaccaagttaaacgttggtgacgatgctgacagtagaaacatgagacttactcaacgatattcacatagtcaaactcccctgtcaattccaaacttggtctccacctggggcagacgtaatcaccaccaataaaatgacatcttttagctacaaggttcactgacatccaaaaaatctctccaacaagaaggaaccaccgacaaattaatgaactgactcctaaattttcaaaagatagataaaagaaaagattcctattcactatgacacagagaaagaccataccatttccgattgggtgggaggaataagggaaaagaacagaaaaattgaaaaagaacacccaacatcaaaccttccccacttgaaaccatgtgattatcaaaaagacatatcagagccactcagaataacttcataacaatatttgataagaaacaatcaagaaaatattatataaaaataaattaaaaccttcaccgattgttcaacctgtcaagctgtcatgaatggcttcgaccaggatatgattcccgtctataaagctatagtctctgagttcgccatctttgatagttaaatattacactgttttggcttcccagagctttggatctcctggcgccac

SEQ ID NO: 67985 - DNA, 787 bp, Cannabis sativa
  modified_base (737)..(743): a, c, t, g, unknown or other
gtaaaagcatctgccaactgtaatgtagtgttgacaagaatgagacgaataattgaggccttaatcttttctcgaatgaaatgacagtcgagatcaatatgcttggttcgttcgtggaaagttgggttgtttgcgatatgtatggcaaattgtttatcacaatagatgaaggcaggagcttgttgactgatttggaaatcagttaataggtactgaatccaagtgatctcactgctggtgctggcaagagcccgaaactcagcctctgcagagctcttaaaaacagtagtttgtttctttgttttccatgatatgaggcagtcgcctataaagatgcaaaagccggttacaaaacgtcttgttgtggggcaagcagcccagtcggagtctgagaagcctctgaggtgaagggacgagttggagttgtaaagaaggccctgccctgggcttcctttcaaatatatgagcaaatggtgcacgacttgcatatgtgtggttttaggagatgacataaattggctcaaggtgttaacagcgaatgtaatgtcaggacgtgaaagagtgaggtatagcagcctacctataagatgtctatagggagaggggtcatcaagttggtgtccttcttgatcatcaagcttaattctggggtccattggagttttggcaggtttacttcctgtgtagctggtgtcctcaaggagttggagagtgtatttgttggatatattttaccnnnnnnnagatttactaacaagtatgttacattaacatcctaatatgaatt

SEQ ID NO: 67986 - DNA, 834 bp, Cannabis sativa
tagaatacctactataatcataactaacgtaaatcataatataaagtagagtaaattgtgacataagtacttaaagttttgaatttttaagtgccataaatttaatattttttagcgatattagtacacaatatttgtaaaactataatttttcttcaatttgggtactacaaactttgttattacccatataaagcccagattctaaatcatttggtctagacaaaaatatatgtgtattattagttgctttcaaatcttcttaatcagaggaaaattataattttacaaatattggatacttatgcgtgccgctaacaaaaaaattattgagtttatgtcacttacaaattcaaaactttaagtacttaattaatttttttcgtcaaaatgacaaccctacttacctaaaaagttttctaaatttatttatcaaaacatcaaattagttttggtaattttttttttcctatttaggattttttttcccttgaactatgatctatgtatcattgtacccgtgaacttttcaatccattacaaatgttccctaaactattcataatattgtaaattaatcattctaagttttataacacatgataaacaaaagatggcatcgcagtttagccaattgccatatcagcaccatatgtataatttaacattaaaaaaaaaataaaaattatgtatatttaaaagatcattaaattaaaaattaattaatgattataaaaattacgtaaaattaaattattttttcaaattaattacacacgtggcatgaacatgacactcatgtggcaactgactaataatcagccatgttatcat

SEQ ID NO: 67987 - DNA, 1800 bp, Cannabis sativa
ttggtttgtttagccatagggccggccaggggtggctagccaactcccaagagtgagctggactgtcacttgatccctgtttgagtgtcggagtctgtgttggcttggatgttgacttggccttccctttgggtgagctgtactgccacgtggcacagtttctgtccatgtaagcgtgccacatcacgaggacaaaaattgggataacttttgcctcccaagtccctgtgtggacgtctgtacggatagggactttaccaacaagattgatgttatcgggactgcagttacttttgctaaataaaaagtggtgcctgtgttgaagaattttatcttgattgtttgatcttgttgcaattgagaaataattcctttatgtgtctttttgatgagttggtgaagtaagtgagaaaaaagggggcccaaatgtacataagtgagttttgggggaaaacccttttttcaatttcatttttcacttttactttctctcactagaatttagctcttgagaaagctcctccttctctctaagtggtcgaacctctaggcttcaatctccttgggatttttttgttatttcaacgatccaagctccccatcttcgtcttcatcggaatctagttgcaagtaagctttctattcattctctttcacttgatttgaatgatttgccatgaatgcatgaacattatttcttgttttgaacatgctttgattcttatgttagattgtaatccattcggtattttgatctgcatgatagccttaggatgaacaatgtatgatttatagatgaaaaagagctgaatctgacctttgttctcttggctctttgagtcacgaagaagacgaagaatatgtttgagttcttggaaaatcacgcgttttgatccatgcacatgttgatccatgaacaaggaggctttcccatgggtggctttcatggggtctggccagccatgggaaagccacccatggggactgtgtccctaggttggctggcctatgcctagaactagggttcttggccaaccgataagctgggtcttagggtctggccgacctctaggacctggaaccctagttggccaaggccaaggctctaagcgggcagccaattttctccctctttggactgtagttagggtcttatagcggccttggaggcatatacaactgtggccttatgcgtggtttatattggaaactatatataaggctagataatgagtccattatagttaattgtgcaacttaagacttactgtgtgtcttggtaattgtacctaagacgatacttggttgttggtcgaccttatacccttcgtttttcttggaagatgtcgttgagtgttgttgacttgaatatatttgtagctttgtcaggttgctcacctccctttatttcttccatacaggtagtgatcggtgctgaattgggggggtggcaactgtgtaggtcttttgctctcctcgtactgatggcaaggacaaaatgcactttgcgtagggcttctccgtatgatccacatgtggcgatggtagccataaggggtcaaatcatagtgtaggaaaagactgcccaacctcttgtcgaggctgcgccagaggtggactcagagactgggagctccgacgtgaaatccgagctggaagacgatactccagtgagggggagaagatataagacatgttctatcctccctaactgtcccttgggccattatgacgcctgaggcaatccctgaatggtcatggcgtgcctttagtaataggactagatctgtcggaaattat

SEQ ID NO: 67988 - DNA, 1666 bp, Cannabis sativa
gggcccattagcttgaacagtgtcttcttgagtagcctcttgtgggttaaccatggtatccccttctcaccaaacaccaaggacaaaccttagctttactgagttgaaaaagggaaaagggctatgaaacaaaacaataaacgatagagtctgaatagaaagggggaacagggtaaaaaggattaggtaaaggtgattgataaaatagtagcctcaacggtcggaaaaccaggcaaaaaggatttttgttgatttgacattaagtcaagttggagttcccaacactctcagtagagagaaaactattgactggtagaaaagaaatgcctattcgagattctgcaactaatattgatggattatagagagagcttattggttggctaagagtaactatagggacgataaaattcactacttgcttggattggtgtttcattcatttccttatgtttctcttatctagaccatggttatgaccaacaaatactgcctgtaacaacataaaaaaagtaccctttgttaaggtcttacatgtacttgtatgtaagcaattgacataggtagctaaaaactcttccttgacacattcaccatattatattgcttagttggagattttacaaactaatttgacccactttttcactctaagaattttgtgtcataagcactgttaaaatacgtttggttggagtaacgaaaatagaggaacgaaatgaaataaaataaaatttaatgtgattaaaaaaattaatattttgttaatttgtttttcacttttactttttattgaaatagcaatttaatactttgaactacaatcaaataaataaatagaatgaaaataatttaattacaatatctccggcaaaacaggttcttaattgccttatttcggaggtagtaattggtagatacaaagtagtacaagttatttaagaatgacacaattgagaaaaaaaaaagaccaaaatacaataagagtacctttaatgagattgcctcaagttgttttagccatatgcaatatggatattattgttaatggaatttattaataccattatttgtatttggcaacagtcatgtaagtattatttatctttttatttaacaaaattattttatggtattattttataatatttaataaaatttaattatttaaatggtgacatgtaagatcatggtggataacttttaaaattgtaaactattaaagtaatttttgtatgaaaaattgtcaaattttatgtggataaagatgtctaagatcatgaatcactactattatacattttttttttgaagaatcacctctttctttggttattctttataagtggctatatattgtgatgtttaattttatttacttattaatttttaaattaggagtctttcactattttgatggaatcgaacactctctgctcttttgatcatacgccgctcttactgtccaatcagatcttgctgtcgatattggctccgataacttattcgataaccgaacagacaattcaggtcagagaaatctttaaagccaagttaaatgtcaagtttgacatgtgatttttttttttttgaaaaggaattgacatgtgattaatgtcggtaataatttttttttaggttttttattcaatattaattaattagg

SEQ ID NO: 67989 - DNA, 970 bp, Cannabis sativa
tatatttgtgaaagaaaaatatatcttttcaaatatttatatataattaaaaaaattgattcaaacagttttattaatttctttcttcaattaattttaataatgttctttgctaatgacatcaatattaaatgtagtggcgactataagtaaaatttgatactgaggattgtgactttgagtgtagtgacgactacaagtgagatacaatgataataatgaatttaaacatagtggcaactacaaatgagatacagtaattacaacaggattgatagtggcgattataagtgagatgcggtactgatgataatagcgttgaatgtagtgacgactacaagtgagatacggtgataaaaacgaccttaaacatagtgataactacaagtgagacacgtaataacgactttaaacttttgtttatttttcattttacatagctaaaatataatttttgccttatattgtagcaattttaattatgtgacataaattaattttgtgattaatcaattaaataattttttttttatttttaaaattaacatatagaaaataaaaattatttgagttaactaaatttaatagatattaatttaaaatattatgatgtataatttgtttcataataaatatggattaaaaaatatctaaataatttatataaacctaatatatatttaaatttaaactacaaatctactttatttataaatagttttgtacttaattttaaatatttttaataattttattattttaaaattttaaatttatgttttaatttttttcattttacttgttaaccaattaatcattacctaacagttttctgttaattgttgttaaggctgttttagttgttaagttcgttattactgtgtaacaactttattttacagcttgtgtattgtattacattggtctataaataaagagctggcaattgggtaagcctttgcatttcact

SEQ ID NO: 67990 - DNA, 1008 bp, Cannabis sativa
taacacctaaattgtcaatagtaagtatttttactgtttcaagtgctctagttcaacaaaatataccaagagtgatgaaatcatagacaacaacacccctactagctaaaaacatacacaaatcattggcctcaatttaaacctttggtagcttcagtagcataagaacttatcaattagaagtttgacagtattttcatgtggagaactagtgcaaaagcacaagtggctaccaaagtagcagtctgaactaccgaaattcacattcacatatcccacattacaaaattaacaataaatgggagaaagtaagaactttaaactttaaaaactcaatgaagaaaattccaaatatacatatggtgcatggattattattgaaggatcttacaaggtgagaaccagatttctttgcacaatttgcacacttcacaccaccacaatcaagtagctcaagcagaaatcttgaagcaatgcatccacaatggagacgctggaagaaacagtaattaatttaacatctaaaaagggaaaaaaaaatataaaagaagaaagaagcagcttgttcaatcattgggcatgtcctcaccttgccacatgaaatgcactctctccaaccagattctgctgaatggtaaacgtcacaataaactaactgctcatatgcagacctaaaatttgcacatgtttccaggttaagacaagtattgcatgatgaagactagaaatttttccaagcaaaccagacagaacaattaacaacttataccccaaatggacttatcagagttatcatatgaattattttgctgctacaccaatataagattgtcttcacctaagatgtcaaatgattattacaacagataaacatatacataacaacactggtcactacactcacagagcacagctttgcatatgatcactttatgtttcagaaagaaagtgaatcagtccaaattcgtatactaaatgggtctaataatttaatggcataaatttggt

SEQ ID NO: 67991 - DNA, 998 bp, Cannabis sativa
ttttttttttaattagtaagatgagaatattttttaaaaatatatttaataaaattgtttttatttttaaattttttaaacgagagtcaaaattttaaaaataaaaaaaaaaattcaatctaagctactgagactcgaaccacgatctcgatttagacttgaacctcatcccgacttaaataaaataaaaataaaagttatagaatacactcttgttttttatttttaaaattaaaaaaataaaagaaattataaaacacatttttattttttaatattttttaaaaacataatttttactatttttacttttatttttgtgattaaaaaatttaaagataaaagtgttaccaaactctcacataatttataaaaaagagtgaaagaaagaggaatatataagacaatcttggggtgtttatcaaactggttataccgtacaaactgctcgtaccacaccacactgtataaaaaatacaatttaaaatattttgtagtgcaatctatggtttagaatttaataatcgtagttcaaaccgcacgacataatatattacaaaaatactaatttttacaatataattatttttttcatgtaataaaaaactcatacgattaaatttaagaaacatccaaataaactaatctcattctttatttattattacttctcaaattattattaatacatataatatacaagtcccaccctgtgttaaggtgggctagacccatgcttagagcccatccaaactcaagatttaaaattttcatatagtatacttttttacaacgaaaaaaaataatatttttgtgtaaaaagaggtccaataatactcatactttactttagatataatacacacaaaattttttgaacacattattactcagggctgaccatgataacgtgtaatatatatatatatataaaatttttttttagagataagtcaatatattcaacttagtttgtgtgtaaatgttattatgttaaa

SEQ ID NO: 67992 - DNA, 899 bp, Cannabis sativa
aaagccagcccgaacacaccacagctgctgcaacaggaaaccagcagcagccccaaaacaccttacgaactgtttacaaccttaattaaataattgtttctcttacactccttaaaagggcccttacaaacaattctcatctgcacaatctttctcacttccaaactcaatttactaggaaccatacaacttagatcaaacacacacctgtttctgttcttccacaaaagatacaacacaacagccatgaccgcatttaaaatgcgctttgtcagatctctggttgcgttgcagcagtactgaagcaattcagcagtcgaacgaggccaatggaagtcccccagccacctattgactgctacaaagacctgagaagtgtaacagcagttgaaaaaaatatgatcatgtgtttccacatcagtttcacaaacgggacaaagatggagtgaccattatgcgatgaagataatcccgagtaagcaattgagagtttgcaatctgccagaatatgaatctatgttttgggatcacaagagtatcccgaattgcacttgcataggcaatcggaatctcttccacaagataattatagcaatttttggtgctgaatttatctcccctagcagcttgttggagtttagcctcatccaagtactctcttatgctcaaaatcttcctgaagtaccaacttgcatcgtccttctttgcataaccccatatgctttgatctttcaaatagattgaattaatccacttgacccataagcaatcctccttcttagaaagcgcccacaggtacttagccaacaaagccttgttccacttttttccttcccgaaaaccaactcccccaagttttttagggaggcacaccttttcccaagaagctcggtggagtt

SEQ ID NO: 67993 - DNA, 1326 bp, Cannabis sativa
atgacttggaggttgagcagttagatgtcaaaactgctttcttaaatggatttctggatgaagagattcatggagcaaccacctagttttcaagtggaaaatggtaaaacagatttggtttgctttcttaaaagatcattgtatgggttgaaacaatcacccagacagtggaatcaaaggttcaatcagtttgttcaaagtattgggttttcaagatcaaaatttgactcttttctctactacatggaaatagggacacgtaaggttgtgtacctattactacatgttgatgatatgatgatcattagcaaagacaagactgaaattcgagccattaaaaacaaacttaactctaaatttgaaatgaaggacttaggagttgtcaagaaaattcttgggatagaagtcataagaagtaggtaagaagggaagatgacactaactcagacgagctacattgagaaagtaatcaagaagttcaatttggattcatccaatgccactggtgtgccacttgcagggcatttcaaattgtcaaatgaatattgtcctaaaatttaaacagggagagtaaacatgaaaagtgtaccctatgctatggctgttggatgcctaatgtatatcatggtcaatactaggccagatatagctcattctttgagtgtactaagcaggtttatggcaaaccctgggttagaacactggaatgcagtgaagtggctgattaaatacttaaaaggtacaatcaagtatggtctgatttatcaaagagacacatcaatttatcaaagagacacatcaaatgttcaaagagacacatcaaatgtgagattagacacatcaaatgtgagattagaaggctatgttgatgctgattatgcatcaaatatggataacagaaggtctactactgcttatgtgttcatggtcgacaaaagttggatatgttggaaatcacaacaaaccagtggtggcactgtcaactacaaaatctaaattcatggccaccactgaagcttttaaggaagttatttggttacaagggatactacaagagctacatctactcaaagacaaagggacagtctattctgatagtctgtcatcaattcaccgatgtaagcatcctgtatacaatgagaagagcaagcacattgacattagatgatacttcattcgagagaagattgaggagaattggaaaaggtgcacacaagtgacaaccatgcagacatgggaactaaggttctcactttcagcaaattgatgcattgtctcactttgctgaacattggtacttgctgaacatattgagatatcaacatc

SEQ ID NO: 67994 - DNA, 1020 bp, Cannabis sativa
aaagtgataataaatgcatgggccattcaaagagacccaaactcgtgggaccaaccagacgagttcataccagagagattcgagaatagccctgtagattattacaaagggggccaagagtacttccactttataccatttggttttggtagaagaaaatgccctgggatcatgtttggaactgtagcagttgagtatttgatggctaatctcttgtattggtttgattggaaactaaacacaaatgaagatgtcgacatgagtgaagcttatgggattactgttggtctaaaagttcctctttttcttgtaccgataccctactcgccttaattaattactcttaatcttaatgtactttttaaattaaatatgtcgattaatggtaggtagctattatctgtattaatgcatttctgttttatgcttgaaagaatattaatattattctccaataatgaatggaattattattattgctatcctgaatttttgttgatacacgtggtttcctagcaaacaaataggtgtcgagtggggtctagttgagaggtaactagtgactaattatgttggggctcaagaacatatagctctgggagaaagatatcctctcgtaacgtcgtaccggtcctatggagcatttggatataatttgaatatgattgaatctccgcgaagggtcaaaacctcccagatccccttatcgcatttggtcccaacttgtgcagcacattcctaggagtcgtactactgtttgtcccctccgtacaagtgaaaaaacaagtctaccaccaaaattaaatatttttgggcatttccccgactctttttctgacacacatccttctaagagattggcagacagctcacgccctcaactgtcccatccactgcagacatgcagggtcttgtctcacaaaacccctacattgggccttgataacaagcccgtgagggaggaaaactcccttgctaaggacactgttgggttttgtgccctaaataaaaccctttaca

SEQ ID NO: 67995 - DNA, 970 bp, Cannabis sativa
  modified_base (452)..(462): a, c, t, g, unknown or other
ttctaatactttatatgtttttatcaacatacttctgagtagatataagatcctggtaaaataatttccaacagaatattcatttaccttacataacttaagaagtgatgcataatttgtgttctctaatctggtttgatataggaatatatgaaactaggtgtgagaacttaacatgtgagttttggaaaattctcacaaatacatagggaatcttgttatctctggcaggaatggtgaggtaatgctgtagcaactggggaaaaaccagcataggagtaaatagctactcaagccacttttatcatattatattttcttccctttttgaaagcatttttctagcaacaatagcattaattttagcacgtttaattactatcactttaattttcaatccatgctcactcattttcatgttatttctttttattttaagttgtaattagttnnnnnnnnnnnatatttttgtttgcaatccttgtggagacgatcttacgtatcactctattacttgtttgactacgtatacttgtgtatataattgtcacaactagtttttggcgccattgctggggattgaaactaaaaattgtgtattatcaactattttgcaatttattttctggtttgagattctaatcctatttggtgcgcggaatttttcttttttaggtgtaaactagtgtatgaacaagcacgatgaagaccttgaacttgctcctattgaccccaaaattgaacgcgctttcaaaacaaagaagaaaggaacaaaaggctaaaaaacgctgcaatatggccgatgggtttaaagtggggggtgctcataatgatgccaatcctattgctttggccgatgatagagcccgagcaataagagagtatgcagccccatgttcaatgagctaaatccaggtattgtgagacccgaaatccaagcacctcattttgagctcaagcccgtcatgtt

SEQ ID NO: 67996 - DNA, 763 bp, Cannabis sativa
caccagtaacaaacaactaacaacttgaatatactagacaaaactaacttgtaacatcctaactaactcaatacataacaccttataacaaactaatcttgatagatttgtgaaaatagactaatttaaacttgcaacaaatgaccgcaacaccaaatattaaaccagaaaattagagccataattgcatatagactgtgtttcgatgttttggcagccaaaaggtactacaataatacttactatagacacaatatttatatgttctttattaattgctaccacttattgtagaggtagaaaacatctaattcaatctaattgaaccgaatcgatcaaattcaatccaattttttgtaattggatatccaattacaattgaattgaattggatgctaaatgttggattctaattggattgtatcagttatcatggatgtcaatttcaaaatccaattaaaaacagatccaatccaattacatttatatatgttaaaaatttatttatataacaaaaaataaaaaaaaaatataatatatatcaattatatttttattggatttttttgtgttaaacttgtaacagttggttgttttgtgtatttattttcatgatgttttgacttattttattatttaaaaatgttgttgttttaattatttgaaacttttagttgcattacattgtaatgatgatgtgtttatggaatattatacttaaataaatggtgatatttaatttttatgtatttttcttcatatt

SEQ ID NO: 67997 - DNA, 1800 bp, Cannabis sativa
gagattgaacaacttccagccttgtcttcattttttgcctgatcttgtaaccactacgaagtgtttcatggaaaggaacaaaaagttggaaatggctctgatagtttgcaagaacatctccaatgagattatgtaaaaattatactatatttgggcaaaaaaaaaaaaaaaaacaatctgatagtttcatcaatttttagcattatgctccaatgcacaattgcaaaatttgttgtaaaatttatttatttatttatttttgttatttttttagttatgaatgatctttatactatttttttaaaatattttttgtattattattgttatgtgacaccttaagtgcttaatactatactaatgtggtacctaataattggttagcaatttctcaaattattttttaagtaaaatttttggaagctgatattaaaatacaccaataacagtatgatacattttgtaatgtttgacatcttaatatgccccttgatgttattaatatgtacatatcttcattaactttgattagcattttaattttcttaattatgcataagtctctaatgtatttgataaattttaaaaaaaaaataaaaaatctcaagtatatatataaattttaattttttttaggtttatttttttcgaaaaaaaaaatatcaatctttttttttaatctcaattatatatatatatatatttattttttttttttaaaaaaaaaaaagaaaactcaccttttttgttgagtttttttactctatttttttaaaaaagaaatatcattttttttagttttttatgcattattttttttacctttttgtttcaattttgtttgaccatcttttttgttttttttttctttgtttttcctttttctaagaaaatctctcttctattatgtactttttttttttgagaataaaaacttgttattataaattaaacagataagtcatttacaataacagggttaaaagatggagaaaaagaatccatccaaaagcaagcttcatccaaccctaaagcatatctagctaaataatgagcagctttattagccgttcgtttagcatgtacaacagatacacccgggaaaaaggaaagtaagcaagatacatcattaataagatcatgaaaagcatagatacaattagatcggccatataaagcattagtaaccatcatagcatctgtttcaacttggcctagctgtaattccaattgactggcccaaagcaagctgtgaaatactgcctcagcctcaatttcatgtgatgcaaagtttccgaggagaggctttgagaaagcagcgattacagccccctggcagttgcggataatagcaccaatgcccatttggttattcgatgcattaatggcagcatccacattcattttgaggctaccggggtcaggtggtcgccaaggagagttcggaactggtgctggtggagggttctggtttgcaggaacttcaggaggtcgatacttagcttgagcatggtgataattggacaagtagttggtagcaaaggatgccaacagaacagcagacttagctttgttaccatgaatgatccagtttctctatgtccaaatggaccataaaatgcagataatgctttccatttcaagcttggaatgaatggtagacaaatatactaaataatcacccttattcatttgtacatcagcattccaatcaaaatgaaaacctgtagcccgccagacagcctttgcatacttacaaccaaagagagcatggcatatggattcccatgcttgtcgaca

SEQ ID NO: 67998 - DNA, 697 bp, Cannabis sativa
actatatcttaatattaaatttaattatttctaataaatttaaaggtatgatatagtgacgcgctagacaggttgggacatgttttcccaatatctctagacgtgactctatcgcaggggcgaatgtagtgacaaatttagggtggccctaacccccctgaattttacatcaatataattagcatatatactcttgttttctttcatgtattaaaataaataatagagaaaaagtgagttgaaaagtcaaactctcaaatttatatggacatagtaattaagtaaataaatggagatatatgtcatgtgaaatatatagtgttttaaaataaatactaaaaataagtttttttctaacaaaatgtgagttaatgttaattaatttttatagtaaatattatttgaatttttgtgggagaccttatgaattgttctagtaaatttttttatctgtttcgtcaacaaaaaaaatattttagtttaatttttttatgatgcatatattatagctatattttagttcaactattatacattattttagttttattttcatttttttttaatactattcataatattttagttttactatagttaaccagatgctatttttaattatgctaatcatttgttttaaatattaaaatgatataaaatattatctagtcaatataggttgataattagttactct

SEQ ID NO: 67999 - DNA, 768 bp, Cannabis sativa
ctcaaaacaatgtacttgtcatgtaaatgatgccattgttttatacttgatgggattgatttacagataaattatgttttatattctctaacagcaccaaatccatataaaatattataacctaaagaacataatatattaatgtgtaaaatttaaatttcatgttaacttttaaacattgcacgctaaacacttaattgagtaagaaagattactgaaaagttaaaatgattgaatcaatttagtctttctcaaaaaggagaaagcaaacaaatatcttttgaaaaatgctaaaaaaattcccttttgcattttcccataaaagttttggataaatgatattatatttgaaatattttatatttttaaattataaataaacaataaaagataattgtcatgcatagttaaaagaaaaaaaaaaaacagaattgttcctcccttatactttttttttttttttttgaatgggttcctcccttatacgtttagaaattaagcaaactgttaattattaataagaccaccattattgacatatctaacaattaggcttatacaatacacaatcaatttatcaatttgaaaatttatcataataatgcccaaaatttgaaaattgccaacagtgttaggcaagttcataatttgtttagaaaatattttttgataaaattacttatcaatttatcataataatgccaaagtaaaaaaaaaaaaaattaataataattgcaccacataaaatagtcaataaaattctaatag

SEQ ID NO: 68000 - DNA, 1221 bp, Cannabis sativa
aaccaatgatagttacaataaaaactttaaccattgagtagtcacccttaatttaaattattattattatttaaaaaattaatttgaattgattttatataggtatttatttttaaaaaataaatttatagaattatatttactaaaatttactatagtgtccattgatataatcaattccagtgattaaccctccatgtggtagttcataattagttttggtcaatttcttgaatattaatcaaaaattgcaaaaataattgagagagagggggtcagtttgagagaaagccaagaccagaaaatgatttttttccctttaatttcacaaaatgaaacactcaactcatttattgtaaaagatggttaaaacaccattatgcctttaaagccaaaattccacttataacataaacaaggacattcacataaatattctcatatatattatgttataacataattttattaattatgttataacataattaaacaataaaataattttagacctcgaacccattttaagacaaaaatacctaattgtgactatatcgcgctaacttgtcaaaaatcagtcgcagtaagacaatataaacatactacataataatattgtctattagcataatatatattaaaataataatttttcccttctcaggtcaaaattacaaaaatacccctaactcataaatgagatcttaaatgtaataattctcaaataattttatataattaataatataataatataattactaaattataataaattctttttaattagggatgctaattcatttactaatcctgggatattacagcgttgtagatggtggggcaatccactactacaaacgagtaatgtttaatgcagtgacattgtgttcctcttttaaggtgactgggagctggatttttcccaacatcattagggaatctcctttagagccttgtagttgtatcaaacatggtaacagatcaacttcaattagcccaattatttggaaggcaaacttgaataggatgttgacagagctgccattgtctactagaactctagagactcttttgttcgcgatatgggcttcgataacgaacaggtcattacggggaatgtggaggtacttggcatcctcctctgtgaagttgatatgaagattcatcattcttggatattggaaattattttaccaggattttaaatctactcacaag

SEQ ID NO: 68001 - DNA, 1795 bp, Cannabis sativa
  modified_base (27)..(29): a, c, t, g, unknown or other
actaatcagattgtaaagagttttatnnngggcataaaacccaacaatttataataatcgtgaaattgatttctccttattttttttttttaatttttagtgaacaaaatgtattttgtaattttaaaattttacaagcatacttttgtaaataaaaattttaaaccgtaaaattataaataaatatatataaaaaaaggtaattttgaaaattcctcaaaataatttctattgtattatataatagtaaacaggaaagagggagtgtaccaaaaaaatctaattttttattttaaaacattctctacatagcaccaaaaaaaaaaaagacaccaagaagtatatattatttttttcttctttttttagaatctttatcattcatttcatatttgaccaatgtgagagtttttttatgtaacgaaaaataatatttaaattaatatatggttataatttctagtaacgggtaaataatttcccatttattatataatagtaaacgaggaagggggattatatcaaaagaaaaaaaaatccaaaagtatttttacagattctatataaaacaacaaaaaatcctaccctaaaatttaaaaaaggaatcattattattcatttcatgtttgacctatatgacaagtgttttatgtaacggtattatatatatgtcataactttttagtaacgggtaaaaaatgactcatttattgtataataataaacgaggaaagaagaccatgccaaaagcttttctaaaaactttttttttttttcagattctatatagaaccaaaaaaatcctaccctaaaattttaaaaaggaattgttattatatatttcatatttgaccaatatgacaggtgttttatgtaacgttaaatttttcctccaaaatgaaaaaattgagtaggatacacgtgtttggtacactcaaagtagtcatgcttatcttacttattattctcactatataagtattctattgttattatcgaagcattattcattggtctttcctaagtatggatcctcactcattaccagttttcaaagaaaaacgaataaggagagatgaagaaaatgatgatggtgatgatacaagtggtgtcgatcatgttgatcgattctcacatatgcctgaacacatcgtccaccacatcatgaccatccttcccatcaaggatgcaacccacactagtgtcctttccaaacactttttgttcatttggcgttcttttcccaccctcaattttgattaccgattattctccacctacactaacaacgccactcagctcaggtttatggatagaatcaccacttctatagagaattaccacctagatggtgatttagaaagcctcaggattcgatttcctttaagcaaattattcaatggcggcaacaataacatcaatttctttcttagtgatttactaagttatgctttgatgaattctatcaaaaaattgattgtcgattgcacaattgattatatgaagttttttcgacccaaaaaacgacagacaccacctcttttaccagttgaagttttgtgggcgagatcaatcaaaacaatgaatttgtgcggtcttactttggtcagcgatgaagatgatttgatcattataaattgttcttcattggaggatttgactttcgagtggtgcactaccacagctaaggctgctagagtggtagtctcatgtcctaaactcagaaccgtaaagttcaaagattgtaaagatttttacattattcaggtgattgaagataagctcgaatcatttt

SEQ ID NO: 68002 - DNA, 755 bp, Cannabis sativa
agagcgcccaaccattcacaggcactgatcagattgcagtgggtactggtaagcatgcttcgatttctcattttggttctgctcatttgccagcatataattctgttatcaaattatctactgtttatcactctccttccctttccaaaaatctactcagtgtgtctaaattatgtgctgatagcaatgctttcgttgtattttatccccattgtttttatgtcaaaaatcaggtcagcaaacaaattcttctgaccggtcttcttgataatggcatttacaaagtcacgagtccatcctctacttcctctgtcactccatttcaactgtttcaaacctccacttctgatccgaatttatggcgctctcgtttgggacatccagcttcagatgttactaatcgtgttttaacttcttgtaatttttccatttctaagaatactaagctttctttctgtaatgcttgtcaacaagccaaatctcataggcttccttttccaatttctgtatctcgggctacaaagccttttgaattaatacacagtgacttctggggtccatctcctgtttcttcaattactggtgttcgatatttcatattgtttattgatgtttattcccgatttacttggttatatttactctcctccaaagatgaggccctacctgtatttcttacttctaaacaaatgattttgactcaatttgacactcccattaagcatgttcaaactgattggggcggtgaatttcgc

SEQ ID NO: 68003 - DNA, 800 bp, Cannabis sativa
actaccctaactaacaagtacagatacaaaaccagaagccctagatctatatatacctgcatccaaagctcagaccaatacggttgagtgatttcttcaagattcagggtttgaacacttgaagaaggaggaatagatgctcgtacatgcacaagaacaaggagaaagttagtacaattagagagagagggataaaacacattatatgtaattactaaagagattaccagtcaaaaccttacctgtgacttggaatctccatctttgtaaatatgaacaatctttgatagtggaatcgagctctcaaattcgaggagcagctcaaacggagacgtagccaatttattggtgaacttcgggaaaatctggtgtattctaacactactctttgtgattttgtgtgtgtggttgtgtatagatcagatcattctagatctgatctttggtttgtgtttgatctgggatttctggggttttctgggttgattaagaactagcttcgagtttctcagagagaaactctctgctagggtttcgaacaagacaaggctgaggtattgaataagaaggttctcgaattcctcattggttttgttcaaagacaaaacgaagtcgttttggtgtgctgactttgaaaagtcaaggaagagttaaagatctaaattgaccttggtaaattgattagtttattttgttggtgtagggcaaaagggtataaggaaatttaaatttcctacaatactatcaaatataaatgataaatcatccacataaaaaagtggactaactaaactcttaac

SEQ ID NO: 68004 - DNA, 583 bp, Cannabis sativa
ctttgtttgatggccactaagtctctcaaatctgcaagcatttgttggccagaaaagaattgggtgtagaacaacctttcgaactcatcccaggatgtgatctttcctgggagtaacttagtgaaccattactgtgttgtttatgttaaggttgcagggaatatacgacacctaaggtcgttctttatcccttgaagatctatttggatcttgaagttccacatatgggtgagggggtcttccttacccgtatatttacaggtaggcatcttgaacctcggtgggacgggaaggtcattgatagcttacgagaaggcaaaacctctccttctctccaactcaaagtcagttagctttggtgaggtgaggtctctgactaatcgtgttaacacgtccaaccgagcctggatcactggatctatgactgcttggggttaaaaaacattcattcctttattaacttgatttccttgaattgactcaggtggagctatgaggcttgaaccacgattatatttatttctatgagggcatcttgaaggtctccactcccttggggtcccatgcactcgaaaagttggca

SEQ ID NO: 68005 - DNA, 861 bp, Cannabis sativa
ttcattcagaacacaaccatggagttgctaaagtgccacctacatgggaatttcatggaaatcagattttcaacgaaagatcttttgaaagaggagaatcaggaactcgttccaaacacgagaagcaattaagagaactaaaaatgccaacatttgacgaggaaaattttgatggcgtggataataccgtctgtgacgaaaagaacattgttctacctgagtagatggtgctgtcgatgatgaaaactcagctggttggagcagtttgcaaggatggacaacaacagaacaatagagaagagacctcaaaggcactttcgaaaaaggagtcggttttaaggtggaattttttaagaaaaagcacttgtttattgcaagaaagacacatttattctgagccaaaacagcacctacacgatggacagttgctacctgaagagaagaagatgccactggtcatgctacagcatctaataagatatcagaccagacatagtatttgctgtaagtctagtaagttagtaaatgcataatccctgtcaaggacatctcaacacagtgttagaatattgagatatctaaaacaaactccaggataagggctaatcttgaagaagacaaatgagaaaagttgtagtttatacagatgctgattggacaagatcaattgatgataggaaatccacatcaggttattgtaccttattatggggaaatctagttacttggagaagtaaaaagcaaactgttgttgcaagaagcagtgcaaaagcagagtttagagttatggcccaaggggtatgtgaagttatgggtaaatggtggcaaaaccctcaaaactttcattttggtttcacttaa

SEQ ID NO: 68006 - DNA, 1313 bp, Cannabis sativa
  modified_base (166)..(167): a, c, t, g, unknown or other
tttaattttactatttcagtgattgtttatatactaaatcatacttttcaaactttaatatctactaaactatgacttttgaatttgatatatgctaaatcatgtcccctgaacttttatttatgttagaatttttttactaaaactagacaaaagtccttaaatnnaacaatcttaatagttcagaggaattttgaacggtaaaaaaaatttaaagatttaatttgatatatatcaaaattcaagaaaaaaaaaatgctaattagcctaataaaattatttatcatatctgtcactgtacggccaattgtattagtttctcgaaatatatgcagttgataaaatatagttcttcaaatgataataaacaaatagagaagtcatattttgcttaacatattactaggattagtattaccagaaatgcgtagcttacgaagctaacgataataagaggtgatgtattgttattgttataaattaatattacatctcataattaaatataatataaataatataaaaactagttaattaattgcaatttactatattattatagtgttgatcaccatattatacctaataagaatgctataaattagaagtgttcctgatgtaatttttgattatttttcaaatcaatctgcacatgtgatagtttttaatttcttaaactgcacttgtactgcaaaattaaaaaattgcaaaaccataccgtaaaaaaatagtgcggtacggtttttgtagtttctgcagtttggacaatcaccaataattaaactatcacaaatacaataaagcttgagtaacacttgtgaaaaataccataagatttgaaaataaatatgaaaaaaaaaattaagtttcaataatacaataattagtagtctttgggttggacattcaaatattgaacctaaataaatataaaaattaatatttttataatgtgcggtgcagtgtaatttgaactgcatattaacaattcaaaatcgcaaaccgcaccgcaccatgcaatttaaaaaattcaaaacgcaaccgcaccgcaaagaatttcaaaccattttttttttttttgcggtgtggtgcggtgcagacagtttgagttgtttgatgcatcactagctaacaccttattgtccgtttggtacacaggatttgactagattagacaagctaatttttccagtctagtgttttgttgaaagtctgaataactaatctagctaatctcatctatcttggattatcttggataaataatcccatgcaggtgaaggtttttttatcgtttttttttaatttttatt

SEQ ID NO: 68007 - DNA, 928 bp, Cannabis sativa
gatttttctaattcaatgatcgcacatattgtatctatttatgattacttataaattttcaaaaatttatgagaataatttacagaactgaaaataaagtttaaatagttaattattacacgtataataaataagagtcacgcgtgcagtagaatatttaaacattatttttgacattgtaaattattcaaaaaaatttaaaaacttacaggtgatcttatatagttgtaatgtacacacgatcatgaaaaaaagtgaattaaaaagttctcctaaatatcgaaacagatagagagttattcatataaaattagttacataatattatttctacaacatagtattaatgtactttaaaaacaaaagaaattattttatgtacatacataatattattaattattttgtagttgaataaatagttaaatatttgaatggtttaaaaaaagattaataaatttataatattatataattattttttaataatattatacaattattaaaaatattaaaaaatatatgttcagatgtgaaaaacaaaaagtctaatatttcaatattcagattcagagatgatatcttattatgcaaatatgcattcagattcagatgtctgaatcttaataaaaaataaatgcacctagacttagagttgttatcataaatattatttctattaaacactttatttttaatattaactaaaaaatacataaaagaaaaactatatgtgagttcttaggatttattttagagatttttttaattaggtagtagagtttatctaaaatttataaacaacaattaaaataaattttaaatattttttattatatatgaataaatataatatgtttttaatatgtattacatgtaactagattagatcgatttaaaattggatattaaaagtttcttccaataa

SEQ ID NO: 68008 - DNA, 505 bp, Cannabis sativa
acttctagaagttggccacactggccaatctaattatgtttctcttctccacagaaagagatacgatgtggttcgccctatccctcatctacaatttaaggatggagcacttgtaaaatgacacccgctagaactggtagtgtcagatcttttgaatatcccaagcaaaaaagtagttcctggcgtacccaccaacttttgacatggttttgctgttagtgtcacccaacctagctaaagtagaagtacccaatcttgttctactttggggtagacttcacatcgaaatagtatccaatctcataaggagtgggcggaggcctgcctagctccttatacaaaataaacatcgctgaaaggtagttgaaaggtacaaacatctctatgaaaccccccaccactactgaatttcgaccttaaggtaaacgaacctaaatttgagagtatgcaaaaattataccatgaagatgcgaatattcaaagtttatcataaaacccgcgagta

SEQ ID NO: 68009 - DNA, 625 bp, Cannabis sativa
aacagtcatttacattaaaatatattatggttggctgggtttgtcaaatcttctgaagctgatatggctaaaaaggttggtggtttcttaaactccaaataaatacctcatgagctgttttttccttttcatttcttataattatcaatatcttttttacattgttattgaacattagtggtcttagtatcaattagttaataatattttttaaaaattattattttaaattatataaaacttaaaatatgagagtgaggagagtacagagtgccttctaacatttctcatatttttttaacacttgggagggattgagcttggtaccactctttgggaggagaatttgtgaaactaataggtaggcagtgaaatatgattggatgcatctaaagatgagagagaaaaagagatacaacacgatagatattagatattggttcatcaataaaaaaacatattttggtataatatttttaaaattttgtatggttgaaacaaaatgggtttgacatttgctcagcattacgttgatttgtttgtttttttttttttttaatttttttaaataaaggaaatagtcctctctgaagaataaaaaaagttgatgaaagggactaatctt

SEQ ID NO: 68010 - DNA, 629 bp, Cannabis sativa
agttccaacccagccggacccggaccaacccgcacctgacccaaccaaactcgagacctgaaaacccgaccacacaaatgggtgggttcggattatagcttttgtacacccaaacccaaaacccaaaacccgttaaaatcacccgatgtgcactcctacaaagcggacaatatcataccaatgtggagatccatggtgtcttacgtgcgaactaaatttatgagtttggagggagaccctctcccttcctctctccctcttgccaaacaagggatttgttttacaaaacaaaacaacacaaattgtattattcaataaaggagaaataatacaaagtgcggagatggcaagaaaacaagcaaccaaaaaattaaaacaataaaataaaaaaatgagaaaatttctgccaacaaacaaacagaaaagaaaaggaaaggaaaggaaactggctgattctacattaacagaaggtaaatccattcaacagagaaatccataaaacaaaattacaaaatactctgccaattccgagcaagatcttagaaaaaaatgtctttgaactctttcactttgaggagccacataacaatccaaattctgataatctcccacaacaactccacgaattc

SEQ ID NO: 68011 - DNA, 1073 bp, Cannabis sativa
tttataatttttcaaaaattaataggtatctattataactacaatgtgttatttaaaaaaatattaaagaaaaaaaacttcataaaagttatttatcaataggaaaaaaataatgcccctaccaatgaagctcccatatttattagattattaaattaaaaaaaaatacatataatatattctttataaatatattaaattttaataaagtaacaaaaaaaaaataaggctgaaagcttaccagagaccaacagcaatgtaatgcacataaaacttatgataatgatagtattagaagaagtcatcttaatttattatttaatgaatgataattatattgataagatatactttgttgcatgtgctcttatatataaatatatatttgtgtaagtagaaaatatatatatttatatatatgaatttgattttattttatttaagtatgtatgtatttagatttttttttattgaatctatttagatttagtttttatttttaattatgtatgtttctttaattttaattttatgtatttggatttcattttgtttttatttctgctttataaagtatgcataggtatatatatatttggatttgctttctattttaaaaagatgcatgtatatctaggtgtatgtgtatgtatttgtactgtatttggtttatattttttaattccatattttctcaagtgtatgagtatatatttggatttagatttggtgtttattttttaagaatacatttctatttttgatttatatattcattattctctttaatatgaatttggtcatgtttttttaaaaaaataataatatatttacatatatgtttatgtatttattttttttaattatgtgttttttaaagtatatataagtttataattagattagacttttatttttaattatattttaagagaatatgtatatctatggattttgtttttgtggatttttttttttagttttaaataatttaattttgtatttagatttagtttgtaggactttatatatatatatatatatatataaattcatacatattatatatatat

SEQ ID NO: 68012 - DNA, 804 bp, Cannabis sativa
agtttgaccgagcacgtggaacccctttctcccccaaaattaatatcctggagttgccatacaagtttaagatgccaacctggaagatgtatactggtaaggaagatccattatctcaccttaagtattttgagatgcaaatggatctgcaaggagtacgaggagatgtatgctacagatttttcctgccaccctctcggaagccgcccaacaatggtatttcaagttggcacctggaaagttcaactcgtagaatgctttctcctcagagttccatgcacaattttcctcctctcgccaacttccattgcacctaggagatctggtcgatgtaaaacaacgactaggctagcctcttcaagcctacatcagcagattcataacggaggcgactaaggtttcacgggtaaccgaagacggaaagttattcgcgacactgggggcattgaagtccttggtgagctttggaaggacacaaggaagaacggtccagtagactttttcttgaccgtgcagcaaacttgaagaggctattcagtgggcaaaaggtcaacaaaaacctggcaagtcaaaagctctttctactggaacattcgcctagctcccccattacccaagcaattctagttcaaatggtaaacggtccagcaacaataataggcaagggaatggaaaaaagggaaagttcactggcaataccaaataggctccccgggagaatcctaccaagtatactacatttaccatcctgacagaggacatcgaaagttcactcactcactagccccgtataagaagcatgca

SEQ ID NO: 68013 - DNA, 1554 bp, Cannabis sativa
tctcatctagtctaactacacctggtttgtatctttaatctgatgagcttaaaaagatatgtgttttcataaaggtgaccaaattttaaggaacatgaacaaatcaaatgctgtcattatctgaagatacattcaactcaaaaaacatgttcccctgtttttgcaacaaaatagactatcttagtgtgtgtgtgtgtgtgtgtttatataaggatatctaaaataaaatacctgggcaagtcacaagagtcaggtttccaggcgtacttaagatactgtttatctggtctaccatacttttggcaatcaaactcaggatctataaagggacaagaagaatcgtagagaggataagaagggtcaaaaacccattttccttgaaacaaattacaaccattcaattgctttcttccattatatctactcacgttgtagaaaacatgctctgcttttgcttcttccacaaacaataccataacctcgagaagaaacagaagaaacagggcttgttggacccgcagccccattttggactttggaccccaaaaaaaccaaaacacttgtctaagacgagagaaacagcagtggtggtggaaaaagcttgtggtttatgtccatatttatactgcgtggaagtgagacaatgtacattgagagatagaaagagtgtgtgtgtgtgtgtgtgtaagagagagagagaaagagagtctttggcttggcgggctcacatggctaaactctacgagtctgtgataattattttaatacttttttattttttatttttacggtgaatggcgttacgttacaaaaaaatcctggatggattttgggttttatggtgaaatgtgtaaaaggaaaaagagaggaaaaaaaaaaacacaagatgtttaaaactccaatgcaatgtttgttttgatttttatttataatattttattaaaattgggtgagtatgatgttttcttgtttgttttgttgtgtcatggtcttgagtaaaaagttctcttacattcctgaaacggtggtcacggactcacggacatcgtataaagcttttcttgatttttacactattagaatataatcccaaaattggcgtctaactaattagttatacaattataaggaattatatttacaatttttaacttgtaattattttaagtttatatcatcgctatagactttttaaggcaataaaatctgaaagaggcccttaagtttggaacaacattttgtagggtaaagaattatttgatgggggacactttagagagtaggggataatagagatattgccatttatgaaaacaagtgggctagtttctgaatcttgcctcaaaatttatttgggatccctaatacgataaattttttgcgatctagttttggagattgggatgcgaatctgatccatagtttgttttctcctaatgaagctgtaagtgtcattattttgtgatagattattttaatagaatatctagtcatgtctggatttttagtctgttttatctgcacacttgcgtactgttaaattggtgtgagtct

SEQ ID NO: 68014 - DNA, 933 bp, Cannabis sativa
gttgtcttccgaagatcgtcacgacatgtacaatcatcatcagcgatgtaacgctctgaacctcagggacgccacgtgtgtgcttttacaatcttattatcactaacctattagtttaggaaaagtgtggtttaattaagatctttaattcaacttaaaataaaaactttctttaacaatactgtcgtaatttggggatcccctgctaataagatttctatataacaaatttcaaaatcattattatcaaaactaaagttacatttccaaacataaaagaaaagaagtcgatctagcttcccggaagccaagacaccatggctgatatgtacactgctagaagacatctggctcatggctgaacacaacttttaacctttttacctgcaccatgaagcacccgtgagtcacaatgactcaacaagaaaagctattaaatcaaaagcaataaaatgcaagtattcttatcataacataatatacttactcgtgattcattatctattcaacctgcatatatagtataatgtctatactaaccgtatattacacaatataaaaatatcataacatcctgccgtggatagctttatcattacactaatcaaatattcattcagccagactataacaaaatgtattcgattacaactcatcacctaataacatgcttagttcatttcacaacatcgtaatcacacaatcctgatactttataaagtacccttaccactcgttaaccacgagctacatatgtcactatcgttgcccgatacaacaaacgataagtaagaaacctattcgcggtttcaagaataatactcataacggtaatgacagttaccaatcctcatcactcgttatccacgagctgtgtatgtcactatcgttgcctggtatagcaaacgataagtaagaaacctatctgcggtt

SEQ ID NO: 68015 - DNA, 1438 bp, Cannabis sativa
aacagaattaatgtttcaaacaactctctcttatgtgccacatgtaataactccactttaaatgaactctctaaacaagttgttatggcactctctggcgggcaatatcccgattatctagtttctatccggtttcttttgatcttctggatcttatcctgtgttttcgcctttgtggtgtcgtattgaatctttgtctttctttctttctttgttgtgcctattgtgtttcccatctgtttgcattttcttacccttgtttctctgcattaattgttttccatttgttttgacttttcttctgcattgcttactcatttattactccttttcttcactctgtctcatttattactttagattttattgagtattgtagattttgtctcagtttttctttgcctttctcttccctctcttgctcgtgtcctgttctaccaattatggctaccatcgttttgaattgatctaagagggaggcgatgattatttctaccagctatggggtctgaatagggttatcaaaaggacggataagcatcttaactccaacttctacaataagtctttcatctccaggtgcacgtcccttttcttctatttaaggatttggatcctttggagatccttacttcttcaccttttgtatttagtttcctctgttaattctatatactttcgtttttccttattaaccatcatggattccttagcccttaatatttctgaaattctcaatcttactgataaagaagagattgttcatgaccttgttgaggatataagggggatagtcaatccaaaaggtctttttgtttagtctttagtgttttaaccctaagaaccataaagactaaatggttcgaggatgctatgtggaatgtcaggatcactcgtgcacccattaccttttctgtttatgggtctagaatgtttatggtggagtttgaatgtgagggagatatgagaagggttctagaaggccaaccattacctgtgttaatcctgagggccttgatattcttttacccaaccaacttcgatactcctccttctggattcaggttcattcgatcccatttggcatgaaatcttacaaaactggccaaaatgataggggatgaggttggagatttttcttggaggcggacaaagttactatcttccaagtctcttccttagagtcagggtccttgttaacgtttctaagcccatcactacgcgtattcttgttgatttcaaaagcattcatcgtgaaaaatggcttaactttaagtataattttttctcaacatttgctttcattgtgtaatgtttgacaacacactcactaagtgtattacttaccttaagaagtgtaatgatcatgcatttcctccctctcttccttataaaattcctctcaaggcccttgccaagtccaactttaaaagaaatc

SEQ ID NO: 68016 - DNA, 976 bp, Cannabis sativa
tgtcatcggtgctagagagagagagagggagaatattttttaccagtgatggtgggtccttcgtggttaaaacactatcggtgccaaggccatcgatgattgggctaagagagacatagaaagagggagaggaaaagaagaaagaaaaaaagaatacctttcatagagagagagagagagagagagagagagtatctttagagttaatagaattggggtgtttctttagggtttttaggatttctttatgcgtgaggcagttggagttttgttaggattttatagggatttgttagggtttttttatgggctgaagcccatctagaagttcgcaacccctatagaagcagttatttccaaataaccgtagctaaaggggttctagaatatttatttttctttttaattatgacaacattttttttaatgaatgaaaaaatctgtagctaaaagtcctttttgtagtagtgtgtttcttgaatatatttaatagctttaaaagattttaaataactatacaatattttagttttattttttctaaaatttaatttctttatttttttattatgtattcttttgaagaaaagagacgaattctttaaatcaataagcgcaaatatatacaaataaatctccaaaagaacgcctggccaaaaaaatttaaaagttattcacagtttcacacattagttatatattatttttgtataacatgttcataaaactatcgtgaaaaattgtactttatcaatatacaactgtccatttatggatttggaaatgatatacatatatgtaaggtttgttttggtaaatgatcgaattgtattgcacaagaactcaatttacagtcacccaagagttcaacaacttgacatcaaaaactctgtaagaaaattacaactaaagtacagaatcaaatgaactaaaacttagtcaaaagcaattaaaaaatgacaagattaacaaatca

SEQ ID NO: 68017 - DNA, 1227 bp, Cannabis sativa
aatttcttttgatcatgtactactcagtacttactatttttcccctctataaatttcacctcggccgatcttagataggtaaataataactcattactgattaattaataatactgcacctacataaaattactcaagtagatccatgaaaatatatatatatatattttgggttattatttttatattttaagagttttttttattatttttaccaaaaaaaatcacctaataattaattgaacaatttaaattgtaatacaaatttgtatataataattaatgaaacaatttaaatccacataaaattcataaaattattaaaataactctaactgtaaaaataaataagaaaattaaaaaataaaaaaattacttcatatactattttttttaattttttttttcaaatttaatgtgtgagtttttaaagtggtttctcctgtaatttttatgtgagttgttatacgattttttgttacgatttaaattgttcagtttgttaaagtaaagatttctacgtaaaatttcgtaaaaaaaaaatacaaaaaaaaattattttaaagtgtaaaaataaaattcttaaaaaatattatagaaggcaatttcttatttttttaacaaacaaaaagaagcaataattattaatacacaagtaggaggacaattacgtgcataaagtgatcgtaaacgaactttcgtagctcttttcttcttttgttctattataataataacatgtccattctctccatccttatccactctatatcaatttgatttatgtatacagacaaggctattatgctatatatggcgatcgataatcatgtttttttctgaatcgatcggtaatcatgtttattattaattactatactttactttttatctcttaattaagtgaagtaattcattatctgacagttaatttctataattgtttgatgacaactagataattttgtttttagaattttttacgtaagtatatatgctagaattatgaatttgtttatgtagcaattgcaaggctttttgtgatgcttttaagactcgttgtttttttttaacaaaaaaaaggacaacttaaaatattattttttattttttctagtctcattcatctacataaaatttgtcacatttacataaaaaaaaatacttcaataattaacaactttaacattaaaatttagttggaagaaataaaaacataacaacagt

SEQ ID NO: 68018 - DNA, 602 bp, Cannabis sativa
  modified_base (134)..(138): a, c, t, g, unknown or other
tttttgctcggcgacaatggaaaatgcgatggatgggtagtttgatcaaataggtaagtctagaaccttatattttagtgggatgtgtattgaaaaaaaacataaaatactgggattaagcggggttatggaannnnnccattttacccctagttttaagaaatgcctaggttataatcgaaagggtaatttagtaattttaatggtgatttggtggctgcctaggtgagtgacacatggccacttaatttcaaccaaggtttaatttaattaaaccattacttcattttagaaagaattaaagaaaattgaggaaataaaccaaaacataaaaagaaacctctcttcctccttctctctttcgaaccagccataaactaaggaatcggttgctgattcttagtgttttcaacaaagaatttcaagggaaatcaagccaaggtaagccttagcatctctatctcttagttctttaattttacgatttggttgagtagtgatttttgcaaattagtggctgttagggttaggttgtttgctagttcgaattctagggttcatttgagttgaatatagcttcttgtagctggttttggtgtatg

SEQ ID NO: 68019 - DNA, 2012 bp, Cannabis sativa
  modified_base (1054)..(1058): a, c, t, g, unknown or other
ttgcgagtttgaagagagaggcttgagggtggttcagatctgattgttgtcgacaaagaaagcaagagggactgagatgacgagaccaattgtggtttcggatcctttcgacagtgaacggagagacagtcgtgcaagaggaagaaggctagaggcgttttggggttcttagggcttttagggtttttgggctaaagagttgtgcagctgggtttttttggggtgcaacgtgaagaaggagaagaagaagtagtagtagtagaaagaggaaagaataattttttttttctaatttttaattttttaaattattaatattaagtggtccaataatattttgtcacgtgtacacttgtgtatacattgacaggtctatttgacacttaacaaccaaaaactaacagaaggagtgttgatcaaaacgattgtggaggttaagaagtttagccacaattttttcagtctaagggttaaaccgtgccaaacttcaaaattcagggagtttgcccgcaaattaattgtaataacaataggtatcgagcccaccatcatcctcaatcagacctgtatcgggcctaagttaaaatcactaaaatttaaggtagtatccgaccttaattacatcaattaatttttttacaagccatttttctccttttttcttctctagagccatcggataaccaccaccaccatctcaacccatttcttcaataaacccaacaacctccaccaaaatcaccactgcccaccactagccgcaccaaaatcaccaccaccatcacaccacaaccaccaccaccaccaccaccatcacaccacaaccaccacactattattaccacattcattatcatcaacatactaccatttaagggtgttcatcaaaccgcccacaccgtacggtactgtaaaaaaatacagtttgaatttttttacggtgcgattgcgatttgaattttttctaaaacgcgcagtgcagtgcggtttacaattttgaattgttaatatacggttcaaattgcacatcatattataaaaatactaatttttnnnnntatttaggtccaatatgtgaaggcatagtccaaagtccactaattattgtattcttaaaactttctcatatttattttcaagccttatggtatttttgcaagtgttgctcaagttttattgtatttatgatagtttaattatttggtgatagtccaaatcgcagaaactgcaccgcaccattttttgcggtgcaatttatgcgatttttaagtttcgcggtgtggatgcaatttgggaaattaaaaaaacgtatgtgcgagttggtttgaaaaaatggtcaaaaatttcaccacacgcaccacaaacaaccctactaccattaccattaccaccgaaaaaaattctccaaaatcaaataaaaaaagaaacagatccctaagaaaaaaaaatagatctagaggatctcgaggctccatcagatctgtaaccataagaccccatggagctccgtcgtgcatggtgggggttcttggtcaaaggaggtgcatggaggattgggacaaagattctcgaagcccttaacgaggtgaacacatttccatagcttgtttggcttaacgagaccaatgacataattggggccgaaaaaattcagctccgacgagagaaaagctaagaaatggaaatgtgtcatctctggacgtaattggaaccattaataatttttttttatatacattttaaattttattcaatttcattcctatttctatatttccatttctatttctttttttttgaggaaatttccatttctatttctattcttatattttcatttcttccaaccaaacgctaccttagtggctactgaaacttaatcccatgatagagttatgttaatcgagtaaatgctatatttgtgtgatttattttttttttctaagaaaagaaagaagaataaatataaatgcaattaaggaataaactttttttttttttttattaatttt

SEQ ID NO: 68020 - DNA, 691 bp, Cannabis sativa
aagatgaatgggctactcctcccattgccaattggtttatacgaattttgattgcgatttaaattgtttgatatagtgatttttatatggaatttctttcgtaaatatgcaaaaaattaatttaaagtgtaaaattgaaaaaatcctaatgaaaatttcattactattgggtagtattagtgtctagcacctttaaatatatttttttgggattcgctaacaatagtataatactcctttaaaattattatttaactgaacattttttttgataaactatttaattgaatattaatacataaaatgatggtagcatttcttaaatgaaaatggttagtaaatataggactgacacttctacgccttttcattgctacttggtatgtttactaattatttggaatattccattatttactaaaataagaaatgagataacttggttaattttttttgagtgtagcataatagtattttacaatcatatattagcttaatagtttaaaggtcttggttcgaacttatgacctctctttttttctcatgcctcccttaccactaagctagccttaggggtgggcatcatccaatctaatccaattgaattgaaacaaactgatccaatccaatccaatccaatctaattacaaaaagttggatatccaatcacaattggattggatgctaaaag

SEQ ID NO: 68021 - DNA, 767 bp, Cannabis sativa
tgtctctaaatattcagcctacattttcctagtcttctaatgttgaggcaagcttctgggcctagctgtagagcatcttgagttggttgatcattgtcacctaacactagtttctctaagtcaacaaataaaggcccctcaccgccggtgataatcttcacgaactattcctcatttttctagggacataacattgagtacactatcaactgaaaataaaaaccaatataatattagaaggaaatgaaaataaaataaatatgactaaatacaaagcgtaaaaaacttacattttttgcaaacaatcttataacttcatccttgccgagtgtggtattttccttaccctcccagttaaccattcttggaaagcgatgcaacatcctcactgcatattcattgcccaactccaagatggcctcataggcccaatactgcaacgtcgcagtatagtcgtatgatgagtattttgcctccttcttagaaacacccttctcaatcttcttatgcatccaattcttaacctctataaaatctttgttacaagtttccatcaacttgttgaaggagatctttccccatggatactcatagaagaattcaaggttatcaaccatccttatcacaaatggaggaacaacaatcttctcctccttaccagttgatggacaaattgtcattgaagtacttgacaatcaatcgatttgaacttcctttctcttcgatttcttgttttgtaggcctgggtaacaagttcaaccccatca

SEQ ID NO: 68022 - DNA, 1585 bp, Cannabis sativa
aacaaacaaaatgacttcatcaatgttgttcttttaactaattgaagactaattaaagggctaactctcaagacttgggctatctaagacacatacttcaactgctcaaataaaaagtacaagttctgctgtgatttcaagatattaaagtgaaaacgttcacacctagttgggaaaatgttcactaaaatgtaattgtttttactcaccgacataattgctgcttcattgacaagattcctaatatcagccccacaaaatctgactgtacggaatacaatcttaagagtacatttttctggtgaataactaaaaaggagcctgcacagacatatggcagaagaaagtgttatgtttggggtagatgacatcttgaagcttgaaaagccattgcttgacattgtcatctcgaagttgcttgtcctcagcatcttcagaatgggtttctttcctttgaacagctgtggtatgtctcgagaggccaatctcttattcatgggataggaactcttattcataagtatagtatatataagatgcaaccttgagagagagatcgatgcagacagaccatttaattgatacgttcccaatctacttccacttctgggaggtgttgaatcttaggccaatcttctcctttctctttctcacaccgttgctcaaccaaaggatattcatcaatttctaaatgagtaagagatgtaggcagcccttcttctggcaagcaccgcagcctttcacaatgagaaatctgtaagaaagtaagagacgtgagttgttgaaaggactttccgtttaaggtttcaagcttcctactctccataatacgaaacgccataatattttcataaatgatttcatggtaacgccatgatgtttcaagtgtcaccactacattgtttcaagactaaattattcgaaatgactcggtgatgtcatactattcgaaaagcatacggtaaaattctaaaataaaagcacattgtgaagttgaaaaagggaattaaggaaacatgtttgataactaacttacttaccactccaattacccttgacttctccaacagttccttgctaggttttcggtctctgcaatgtactgcatggaatatcaaatattgctaagctaaatatactcttcatcaaagaaagtatgtgaggaatatgcagccaccctacagacaaactacatggtttattttatttctcgtctcgccagaccggacaatgtaactgaaatgaaaattgtatgttggtttcactacaaactattcaaagggtaacattttaattaaaggtgtttcacaaaacactcaaaaaactcctaggcttgtgaacaggttataaaaagtaaactacttgtttgaatttctccatttcaaatcaaaacctgaatctgtcagcagagaacttatttacttccttaaaactaagtgtaacaggttataaaaactaaactaaaacaaagtgaatgcagaagtagttgatttttttggattgaattaatagcatttggtaaaacattcttcaacgtaccagacctacagagatcattgcaatgtcacttttttgatgtgttgaa

SEQ ID NO: 68023 - DNA, 683 bp, Cannabis sativa
gacttgatgattgtgggttgattttgaaaaaaatgaaacttaaactccattcttgggctaataagcatctttcttatgctggtcgagtccaattaatccaatctaaattgattggattaagaaattattggatgagagtcttccttcttcctcaaagtgtgataaaagagattgagaaattatgtaggggttttctttggggtttgaaagataatcgaactagaactcacttgataagttgggagagggtgtgcctcccaaaagcctttagaggtcttgggttcaaggatggaacaaatggaacaaagcttccttagctagatttttatgggacttgatgaataaaaaagatttgatttgggttaagtggattaactcaatttaactcaaagggagtgatatttggtcttataagttgagcatggatacaagttgcaattggaggaagctttgtaggcttcgaacaacttacaccaaaactgacattgttgttgtaggtggagaaaagtttaatgtgagcaggttgtaccgaagcatgctgcaccaggatgtgtactcggctgctagtgtaatatggtgcagaataaatgtgccaaaacatgctttccaactatggcaagctgctcaatccaaacttcttacaagggttatattgtgccgattgaacatacctatcccaaaca

SEQ ID NO: 68024 - DNA, 1109 bp, Cannabis sativa
tcaagattctatcgacaacccatcaataatcaattgatattcaagcgataataaataaaaaaaattacaattcatttctaatgcttcaactatcaagaacttgttaagaacatatcgataacacagactttaacatgtcaagaaccaaaagctaaatcttaatcgctaacctatcaacaactcgtcaataattaatcgatattcaataaaaaaaaaaactaaattacaatttttttggcaatgcttcaactatcgataacatatcggtaacccattgataatagctaaacttaatgactatcatcaaaagctaaatcttatcgacaactcgtcaataatcaattgacattcaaacgagaatcaataaaaaaacaaaattacaattttttttcaatgtttcaactatgaagaacatgtcgataacacatcgataatacctaaacttaatgactcccaccaaaacctgtcaataacctatcgagaatccgtcaataaataatcgagaacatacatcgtttttatttttcccgaccaacaccatcgaatcagaaaataccataaccaccattcaaaactgaccaaatattcagaagaatccatcaaaactaagtgtatttcaagataaacattaaacaatcattctaaatcaaccacaaaagtttgttagtaaaattgttaatatttctgaagaacctttcgagaacatatcgataacgcgtcgagaaaggtcttccctgaccttgggacatccgtgtcgagaacctatcgagaacatatcaagaaccagtcgagaagatcatccctaaccttgagacaatggtgtcaagaacccatcgagaaaaatacgaatagacaaatactccaaacaacgagatctcacgatttctgcaaaatttatatcaacaccaaaaaaaagcaaacacataaacaacaaccacatagatctaacgaaaatatactatacatggggcaaggaagtttacaaaacactttcaaaaaaaatgttttacaaaacacttaccgttaatccacaatgagacggaggtagggcggacgttcttcatggcggttggccgagtatcccaacggcggtaggtggcagctgtagg

SEQ ID NO: 68025 - DNA, 733 bp, Cannabis sativa
tcttctttctttcttttttggtttaataacttacaatggttattgatgctgagtgactgatcagcctagttgttcttgtcatcttatataaatatatataagcttctctcctctagcttctcaataatgcttctttctagttagcttctcattagtgcttcagctggtttttaggtatatgtaatggcattttgctttctgctactgataggccatgctttcccactacataaatatgggtttttcaattcacatcctcaagtcacatccttgagaccctttaagaattcactctccttggatttattgaaaaataaaaatatgtggtcttgtcttgttgctctaagaaactctttataacatggtggaaccacaaatcccttcttggggtgaagctccaataatttctgataataaatgtagcaagaaaaaaagaataacatgttctatttgaagaaaacttggtgagatgaggagcaatgcaagatgctcactgagaaagaactagaatgatgcatgcagtagtatttgtatgaaatatgacaagaagactaaattattaataaattacaaaactatccctgtgaatataaatatttattactttttagaaggataataattgtatttaacaaattttattgtctttttctacaattcttccaaaattggaaagattgaattttcaaagttccatcgttatcccttcactcttcatccctccatttctatg

SEQ ID NO: 68026 - DNA, 574 bp, Cannabis sativa
gcagttgattcattttgtattgtttggaataaggaattattggatgaatatcttcatccttcctcaaagcgtagtcaacgaaatacaaaagtattgcagactccttttatggggtcaaagcgagaacataagtaaaattcattcagctagctaggaaaaagtctgttgttctaagaagtttggaggccttggcctatagagcaatacttactaaatatttgtgggcaattatagaaaagcatgatgtcttgtgggtgaaatgggttaaaatgatctatctaaaaatggatgatttatggacatacaaccttacacaagacactagctagtactgaaggaagctatgcaatctgagatagactttcaatgagaacaagctaaaggttgtaggcagttcaggtaagtacaaagccactcttttgtctaataatatgctgaagtgtgatctggttctgaatactagagttgtttggtgcaaattaagcttgcctaagcatcgattcatattttatcaagtagtcaataggcatctgttaaccaaggatgtaatgaccgctctagtatatggattagt

SEQ ID NO: 68027 - DNA, 614 bp, Cannabis sativa
agaacatccatggctccaggcgaactgatcttgatttgcccttaagaaatttattagctactattttaactgctcgtccagtttcttcccaatgtaaacacactttgtgggatttcctcggtcaaaaacaacttcttccaattcttcaattggttttaacaagtttctttcatcttgaattcaaggatcaagatctttatccttctttttgctttcttctaccaagaccaccattaactgatgaccgacttttctatgatgtagctctatgcgatagcaatcacgagctagcatctgatcgcctcgcaccactcccacacccttttctgtttgaaacttcagggataggtgcttgatcgaactaactgcccttagtctgatcaatgctggacaacccaataatatattgtaagtcgatggcaggtcgacaaccagaaagtcttgcataattgtggcagataggggtgcctctcccaaggttaatgcaagctcgattatgccctaaatggcgatactatcgccagcaaaactgcacatatttaccatgcaaggcctcagtttggccttttcgagccccatcttcttcagcctttccttgtaaaggatgttcactg

SEQ ID NO: 68028 - DNA, 2542 bp, Cannabis sativa
taaaaaaaaattcaaattaaatgtcattattttatttactacgtaaaaaaacttaatagaatgatcagtttataacaatgtgaataactcatcatggactatttttaacaggctgaaaagttcaaagagtacaataatatataggtcataattcaagaataaaaattcttaatttaaaattatcaccaatattaagtgtgtaaatagtgttatacatcttaatttaaaattcttaaaagttataggagttatagttgttggagaatgaattttatactcatttattgtgggaggatatgagttagaattttaaatgataatatcctacacaatattgtgataaccaagttttctatcaacaaagcactttgttagaaatcctaaaaggtttgataattctcaaaactattttcatgagagttccccttagtaattttcaaaactattttcatgagagttcccttattgcttagagatagggtaaataggcttttgaacaaaggtgtaataccttgttcaagtcatggtgatccccactattctacactcaaaattatgagtgagtgtatatatatatatatcttaaatttttcacattatattatacatatattgtatattacatgtgatgtaattcatttcttctatatttttatatataatatatattttttttgaaaataaagcgttatatagataggaaaaattagatttcctaatcattacaaaggatagaaacatgtgtcgaggaaggttccataaaacctataattttccgagcgaatgcccatctagccacattataggcagtaaaaacaacccgaaataaacgaataattacaagataaaaagtttttagagagttgattacataaaaagacacaattatcaatattccatatgaatgtagaccattcagccctttgataaccatttttgagtcactctccaccaaaacaaaagttgtgacccctgagacataatatatatagtgtatatatatatatatattgtaacatttatgtaatcaaatttttattttaatcattgtcttaagtttacaattaaattatgatatattttaatttatcttctattgatatataaaatctctaaaaaaaaataaaaaaaaaacaaaaattatatttttattttcatgatttaaaaaatacaaaagtaacaattttgccaaactaaaaaaatgaataagtaaaataaaataaaataatcataataaagtttgtttgaacttccaaacaccagtacgtacctggatatatctccataaaataaatggcttatatatataatatccacctccggctcctatgctatggtatggtgttggagaaaactagcggaagaaacactgtgctggagccaacaatgatcagttgtgagtctatatatatacacttacaattaatatatatatatatatatatatatatatatatggctccagcaccagatgtttcatcggctaatttttccatatgtttattttgggtttagtttttatgagagaaagaattaagaaacagagtactattaaaatatgtatgttaagccagaactgaagaaatcgatgcaagttgagaacgtacgaagagaatgaagaagctatatatatatatccatttataataattatatgtatagtatctttgacgtgacatgcaaccatactaattaatgaaaatgttatatatagatatgagaaatactaaaaaaaaagtgctaatatcatattattattattagtgtaatcaaatattaggtctcatataattatttaagggtagcataacagtttcaacacagtaccagaacacgacacgaattttatgggttatgattgagaaaattagactcgggtcaaaaataagttgacacgacccacttaacacaaatttaatgcgcttgacatggttttttaaattaaataaaataataaattgttaataataatataattatataaaaaatatttatatttaatgacttaatattaagttaaaaacattaatttaattttcaaaagatattttaaaagttttaatttttattatatacataacagactacatatactatacaagttttgtaatagaacttaaatttattatttttttctctacaactccagctttaataatagcaaaacaagttaaagtgggttaacacaaacacgacataattttttacaggttggattatggttgagaaaattatacacgagtcaaaaaatagatcaacacgcctgacacgaaatataaaagcagaccacataaaatataacacgattacgacacgatgacacattttgtcacccttaatataataacttaagaaagtaattttagggaaatattgctaactaatcgtaagacatcacctatagaaggtgttgggcaccagtgctgttcaatagcaatgctcatatacagtggcggacccagaatttaaagtgaggggcggggggagcgtaaataaatttaaaaaaaaaaatataaagtgtagttagtggggtttgaacctt

SEQ ID NO: 68029 - DNA, 928 bp, Cannabis sativa
caatcgccccctctaattaaaaacaattgtgaatttttcttcttgattttttttctgctccacgagcaaagagtgaaagaactaagtgggttgcgttaatatcagaatttaatcctatttgtatctatttagtgactggtctactagtttcttttatctcatcatttggtattcctaatctatttgcttccaataattcaaccaatctagaaaaatttacggttgtgagaaattaattacaatggttagcgattttttatgataataattaaattaaaatatataaaattaaacgtttaattatatcaataataatatatggtgtctattttttaaaatgtagaatatagatagggatgcatacagggcagggagttggcagagagtgctccacccatccccatctccattaaggattttaatttccatccccgcttatctctattgaaaacagagcgagaaagggaatatcttaatatacaatcacatattataaaatattaagagcaatttgcggtgaaactccctatgttttaatttttatacacttatctcacttttttttttttttttgcggcaaaacctccttaagtttatttttgtttttgcaaatttaacacaccagtttaatattaccgttaaatatcaattggatgaccattgtatacacctatatatataacaataaaacctcaaaattaatacagtagtaatcaaattggtatttaacagtagtaacataagggagttttgccacaaattcttcaaatattaattaaaataataagcatctcttcagggagtatcatccacatctccatctaatataatattcggcgacaaaaaataattttcactcctgctttgttcctcattaagatagagaatttcggtaccattaggaacgggtcttcgcaggtccatgtaa

SEQ ID NO: 68030 - DNA, 1472 bp, Cannabis sativa
ttaaattgtggccaaaattaatatctaaaaaataggcacaaagttatttgtcaacattgttgagttcctgagatctcgttttgatacttttaaggtttttgaacttaaggatgagatttcttattctgtttttgaccatttcaaattcattagttgatcaaatttgacatttgaacaatcgaaagcagcgcaccagattgattgacaacctgggcgatgtgccttatttctaggagttcgggtttgtagttttctccctaaatttacttaaatctttattattttatatgatgaaaaaaatacccaaaatactttttcgagaacttgattggaaatagcctaggctgacatatgccaacctgggcgttgggcccagtgtcaggtgttaacctaagtgctgggtcccagttatgaccctttagaagttctgtttggtctccagaaataattaatcttaatattttatgaaaaacgcaaaagatgctcgaaagaattctcaaaaaacatcatcggaatcggctcaggttgacaaaatatcaacctgggcactgggccttgcttttggaacccacaaagtgatgtttcttccctgaaagtacttatttccccattttttatgaagacaaagaagataaaaaacttgaatcgtcgatctgatacatgaaaggcactcagattgacaaattgtcaacctgcatgttggggtgcccgggcaccgggtgctaaaaaataaacttactttgaatctaattccgatgcctcaaatttttctatggtatgtttagctgatgtcctaaagtaaagtttaatccattttcactaagacggtctcaaaaattgaaactctagttgggaatgtcaacttaggcgatgggtgaaaaacactaggtgcccagattgacttttgggttgcaggttcgtgtaatttcaactcatgggcttgtatttgattggtctatgtatttatggtacaaaatactgaaaaatagtggacaggattcaagttattaaagtcattaataaaaatagaaggagataataaaactgtagtttcaattggaagattgatactatatcgaagagttcaatttaatgatttgttttgcccttaaaaagattcatcacctatcattttaatttgtgaaagagcataaaatattgagtattgctattagatattggtgttaacaccaccatgacacgaggtgctcctttgtatatagttaatgatatttcataataattattaaattaaaatatatataatcaaatatttaattacgttaataacaatacaatattttgtgataatgttagacatcgctactacttttaacatttctcgataatattaagggtaaaggagagcattgataataagcactaatattactcacactatccttctaaagagcattgataaaactcgtaattaattacatcaataacgatatgaaaccgaacaataacag

SEQ ID NO: 68031 - DNA, 760 bp, Cannabis sativa
ctttgagataaggacttttgcagctatggaagcagaagctgtagctttaatggtggctttggattggactcttactattgggttacctattagttcgtttggatctgattctttagctttgattttagcttttgctagaagatcttcattctgtaatgaatttggctttattttagatgatattgttagtttactattcaattttcctgagacatctctaattcatgttcgtcgctcagccaatatggttgtacatgagttagcagttcatgtactcaaggtggataataaattagtttggatggatgattttcctctatttctctatgatatacgaaactctgattatattcaataaaagttcattgtagaaaaaaaaaaatctctagaattaacttattgtagatttagagaaaagatgacaagcccattgaatgagatcaacttcttttaggcccaaacaaattttagaaaagtagaagtaagaaaaaaggaatggggtatgcgtgagaaatgggttcgttttaagttgaattgtcataatttgcaggtggcattcttgactttgacaaaatatgtttattccactaactctgttcccaaagactccaaatttttcccaatacatattttcgttccttcaaaatgaaaacaaaataacacatatttcatctccctgtaaagtgtaatttccaaaattctataaagaagtttctataaccattaaagaagaaactatttgatttcaaaaaaaaaaaaa

SEQ ID NO: 68032 - DNA, 977 bp, Cannabis sativa
gccagccttctgtggtggatgccatccttcaaaggcagaggccagactttggaggtggaggccagccttctaggacggaggccaaccttcgatggcagaggtcagacttcctgttgctgacttgccttgctaggacgtctggtcatgcctcgctttaggagttttgatagaagagttaagcatacacacttattctccttcttccttggacttcatagcataaaaggattgttgaatttccctctcttgccattatgttgataagagccatcgttattgcgcttgcctccaccattcttgttgtttgagaatcgatatagattgtctgcactagtcggcatgctagacagtgtttggggcgctatgaggccctgtgtttgttcgtcattgtcctgccctcttgtttaggcttgccagacaacttcttctaactttatgaagccattagctcactcaacgagctcttccatattgctcattgagatcctcctgatatctttctagaagtcactcaacggtaggatgcctccgagtatggctgtatatcagccttcttctgtgaagcctatgaccttggtggccttggccatgaaccgtagaatatagtccttcaagggttcatcttgtctttgctttatttcgacaagatcctccaatcaagaaggtatttatcttgaagtagagaattgaagatagaactctcaggagagttcttccccaagaattaaatcttcctagggccaacttgaaataccattgttgggctatttcagctagagttgctgaaaaaaaaaattggtattgcacatctctaaatacttgtaggagatttgtttggatctcaaagtatttcaggtgtattagagggtcttcttttcttgtgtacataatccaagctggcatcttgaatttgggcaagggcaaggcattgatgtatgtcgagaatggtgatcccatatgttgggttttatgcccta

SEQ ID NO: 68033 - DNA, 1168 bp, Cannabis sativa
aaaaaaaaaaaaagaaagaaaagtgaatagtaaataaatctaagtgttgattccaacaatataaatctctcttgtctattgcattaagtgggaattgagataattttggaatgaaaagtgaggcccttgaaatgtaaaagcttatggtatagttaaacctaaaagacttttttatcaactcttacctaagcctaacgttataaccttttaaaatcttgttgatttcaaaacatttgttattgatattagtggagaaggttaagtgatgcaagcatatggaaaatttggttgtggaattgtttggtatgagttgagcatatatgatagaatttaaattattgtggtcaattgtgagtcatattagttatttccataattgaactttaaggttgtactttgaggctgaaaatttagtttaaaaaccacaattaagatttcatggaaagacaatgtagcatagatagcaatagtggcttactttttgtgtgtttgatgttttcttttccgttagtttaacttggcccttactcgaggaagaataaagtttcactttgagggaatttattaggtttatttttatgcatttttaagagtcaaatttagggtgtattttaatatttttattattttatttattaattaattaggttataagagtaagaaaacatctatgtagcttaataacacctgccttctcttagccatggtctttcttttactccaaataatgttacacgctttttttaagtgtttcaatgtcgctctatgcgtgagtgggaaagtcttctcacacgcgcattgagagacgctatagctaattagttttttttaataaaacaaaagtaatttaaaatttcagaatagttttagtgacacgcattgtgggttagcaatattaaatttttaaagtcctataatgcgggtcactaaaaattctctgaaatatattgtgacgtgcaccttttgtgtgggtcactatagagtgtcactaaaagtcaattttgtagtggcagtttcttcttgtcgacgatgcttgtttaggcacgagcggtagtgagtgccaggctatgacagactcatttgattaggtgacacaatacattagtgccatcactactacaaaaaccccctttagaggcggtttttaagccctttcagcgtcggtttt

SEQ ID NO: 68034 - DNA, 1005 bp, Cannabis sativa
  modified_base (523)..(523): a, c, t, g, unknown or other
  modified_base (611)..(622): a, c, t, g, unknown or other
acaacataaattttttgtaattaaatgtgacttttagtcacaacaaataattacttgtaactaaaacttagtatttagatacaagttgtcaccaatttagtttagtcacaatacttatttagtcacaacaaattgtaatttttgtgactaatacatttagccacaaattttttattagtcacaacataggaatgatgatttataattaggcaaataccattttggaccatgtattttgcaaaagttacatattagaccctctattttattaaatgacaaaataaaccctataatttccaaaaaaaaaagtaaaaaaagaaccctgagcttaatttttgacaacttttttttttttaaatataactaacctgaagacaattcctaacacaaacagatacagaaaatataaaaagttttgccataatacatttagatcggattattattaaattttatttttacaaaaaatcaatttaaggtcctatttgtactattttgaaaaatacaaggtctattttgtcanttaacaaaatagaggatccaattggtaaaacaggatccaaaatggtatttgccgtttataatttgtcacaacttttttacttttagtnnnnnnnnnnnntgtgactaaaagtaaaaaattttgtagtgaaataaaattatacaaatttaacaaatttgttactaattaatattattaaaataaatatatagaaaatattaaaattatcattaaatactaattacaaaaaatatcactaaacaaaatataaccgtacgcgaatacggattgttttctagttgttaaaatacaaaaataaataaagtaactaaataaaaatcaactaaactagcattatttgactgtgggaacctaatgttgccgtcaatttggcaaaaataaagttaaaagagtttgagaggaacaatttactaaaattaatataattcagagacttaaaaaaaaatatctattctgtataaaatgtggctatataactgaat

SEQ ID NO: 68035 - DNA, 623 bp, Cannabis sativa
aagttgcccctactagtataagtgtgaaaattcccgtccttgggcaatggataattttcaatttattaggggtgactttttgtcgcccataatagtaacttgtcacatctaatacttttaggggttattaggtaattgcataagctaatgtcacggcccgctgaggcagttaggcacttatgacagtttttaaaccctaattttgaaggaggagagttgttggacttttagacttttgggatacgaaattggaggcagaaagcgactggagagagtactacaattgtttatcatttgatgtttctaattagtttaattcaattgttcaccatgacaatgagtagctaaacttttaataagacgattaatggatattgtttgatatatatttcttgatggtttaatgcaattttaattcttctccaatttcttatgtgcctctattctattgtaaaatagatatagatttcgatattagacgaaaatacgttgtaattaggatttttatacttaatgcaaactatatgtgtaatttactatagaaatataggacttttattacatataatttaaattttatatatttagtaagaatatcgattgaaagagtttttttttttttt

SEQ ID NO: 68036 - DNA, 688 bp, Cannabis sativa
ggtaaaataattccaacagtctctagtcagcctgatacctttaatatcaccaacctcaatggccttttccaaaatccgcgagagaatgtcggcaacccagataaaaaggtacggagacaaggggtcaccttttcttaacccacactccggggtaagactgctaaccatacccccattcaggtggatattgagggtagcagtaatgcactgggtaacccactttcgaaaacggtctggaactttgaagctgctgagaacatggtcaatgaagttctagctaagtttatcataagctttcaccagatcaatcttgatggcaaagacaccttccttaccctttttacgtttaaaagagtggataatctcctagactaagacattattgtcattgatactacggcctggaacaaaggccgcctgagtggggcaaattaatctgggaagcacaggttttattctatttgcaatgatcttcgagatgaccttgtacactacattgcatagggagatagaactaaactcagagactttcttcagattattcacctttggaattaggataacattggtagcattaatgcctctgtctatggagccagaaaggaagaaatcttccaccgcttcacagaaatccttaccaaccaacttccaataattcttatagaaaagcacagacataccatcagga

SEQ ID NO: 68037 - DNA, 518 bp, Cannabis sativa
gccacaaacctagctttaaaggtccctaccttcccttcagcattattcctccttttgaaaatccacttagaccctatgggtatagtgtcctcaagatcttgttggtgcgcatggagtccatctctgaatccatcggattgttccatttgtctgagtcaaggtcatccattacttctttgtaagtcaatagatcattcttttctgtgttagaaacaagaacatgtgcttcatgtttgtagcggacaagctgtcttataaccttcccactacgatgatgtactggggtttccttttttttttttggaactgtggtaaccactatcagttcttcaactaatggtggtgaaatctttggttcaaaaatctcatttctaatttccttgataatcacttgactacgtgacttgtgacttttcatatagtcatattcaagaaaagtaacatttgttgacacatatactttattctcttgatgactatagaaaagacatctcgagtctcatctcaatatcctacaa

SEQ ID NO: 68038 - DNA, 1039 bp, Cannabis sativa
aagctctttgagagactttctttcctgttccaaactttcaagaggtttggtctctccaaaagagtaatctcccgataattcccagctagtttaaatgaggttgctacctctctatttataggcattggcctttaaaagacttgggtcacctaggcttacagttggaccaagagaactaaagcaatcaaaacactaagacaactcaatctatgtacatgaaaagactaattatttcatttattccttctgtgatacatttgataagtcttaggcttatcaatacttaccctgcattttacatttctaactgcttaaaagtctatcatttgttcaaattgattttctaacgatgcccttagtggttaattattgcatgattacttaactttcatgttcaggcctagggattggaatacatctcctgacgaatactttgtttggtgtgttcctaacagactcctttgtttgtaatttttctagacaataataacaatctagtatggttttttattagaaaattgttcagaagaatactaagtcggaccacaccaaacaatatgttcattggaaatcatgtacataaatttggaagaagaaaaaagttacctgcagtttatctggtgattgcacaatcttggaacgtaaatttgcattttcttgggcactttgtacaagagcgaattcagcactagatacctggacatggaaagaaggaagcataagtaaaactaactcacataaccaaaaccaatctgcataaacttgaaacaaaattattataaattattagaatcgcagtgcattatgcatgaaaatccaacatgacccaacccagatcatcatatactactaattgttcaaaagtattctcccttcaacaaaatattagttcacaatgagagtcaagtgaagaacttacataaataaagtattagttctaattaattaggacgtccgatacaggtatacatatacagtctagttgaatataatagaagtactagcctatagagaaaaaagagttaaatcattatacgaa

SEQ ID NO: 68039 - DNA, 871 bp, Cannabis sativa
aattgaagcataaagaaagacgtcttcaactcggatccccctttttttaagatcccaaatgaacttcacccagtcccaaacacgaataccattatcacacacatggtagattccccaaggtgaagatcgccaacaatgaagcgccacctcacaagtaagaaacaaatgttcaattgattcatccctcaacccacacaaaggacaacttgtgtcctcaatctaaaatcgtctcccaatctcatacctaatcgggagtgcgttagacagaatacaccaccaaaggaccttgtggtgctccaaaattttgctattccaaagcttgttccaaagtgacggtgcaattgggagtgcactatttattacacttacaatattatttttgtaaagttttaaaaaatttattacgtttttttatcacggtaaactaaaatattaaaaaatctgttactactgaaaattttataaaaatttatagaaaagaggcatggagagtagtttggttatgtttcatgcaagtagaacacacataattaggaataaccattcaatatctagttatattaggataagaatgaatatctcaaaatacagttgagaatgtattttaattgaaagattataactaaataatattacactaaaaaaaattaaaataccaaaaaatattaatctaataataataaacttttattaacactatatcataatattttttgagtaaatataatacatatatatatgtattatataaatattaattaattatatgtatatattttattaagctataattatttttgtataaagatatattttttaatctgcgatataaaaaatgtataattaatcataatttaaaaattatttttat

SEQ ID NO: 68040 - DNA, 854 bp, Cannabis sativa
  modified_base (396)..(402): a, c, t, g, unknown or other
ggatactcatcaactttagaaggactcctcaaattagtgctaaagccgggggtgtcagccctcttcagcttcttcgaaggctctggctcggtgacgacacccttacgcttcctgtcaagacgaagaactactacttcttcttcttcgtctataaggaccacctcctggttcccgagagcttcgacagtaggtctgctcagagttacacttaccctggggtgctttggcatatctggctcggggctgtaggtttgggcaagggcatctaaaagatcttccattggtttctctgtgtaaagtaaacaagaaatcagaatgacacccaaaaagcacatatgcaagtatagtacaataagactagtcctaccctggtgatctaattctgccctagcaaannnnnnnattaaaaggttggtgtcgtcatcccctaaaaagctatccgaggaaggaaccaactcgaaatcatataggaggaatgatccaaaagaattagtacaacaggactagagcccatctgggaccgacccaagtaatgacttaaattggaaaaataaaaacttttggcattatcaccccaccgagaatggggcatccgaaaactatataatctattattaaattccactagcctcaagtcagcatagtcttggatagaaggaacgaagtgaatgttcaaatgagacttacaggctcaggaggtacttgcagcgagggctccagagttaggaactgggaatggaaatttgggttggactggagttttcttttttcctgcctcctctcaggagacccttctggaggtagcttgcacctgagtgaatgcgagctcctgctctcttttgtatctgtacctg

SEQ ID NO: 68041 - DNA, 1189 bp, Cannabis sativa
  modified_base (26)..(46): a, c, t, g, unknown or other
ttagggtgttaatcaatatacttgtnnnnnnnnnnnnnnnnnnnnnaaaataatttccaacagtacttagatcacaaagccgaaaatgagcaagaagtggagggaagttgataactctatgaaaatagagttatttatatctttttgtgcattaatttagctttattctcaagcatttttagtaaatttagtgacttttaattagtttgctttagtttttaataaatattaattttgaaatgatttagttttctacctataattattaatctaaattttatgtatttttaggagcttaaattcaaatattaaaattaaaggagattaaagaataattgaggcctcattcaaagactatgtgttcaccaaaagtccaaattgattagtggttattttaattggacacatttctaattagattggactcatgtttaatgggctttatttgtttaaatcaaaaaaaagaagaaaaaaaagggaaaggagataaatgatattgggcttagactttttggttaaagaaccaatgaagaaatggaagaagcccacgtgatttaagggctaagataaggcatatgtataggcatatatacaaaaatgcatatatgtgatgaaaaaaaaagcatgcggctggtggagtcctgacgccgacagcaaagaaaaaaattaagaaaaagaaaaagagaaaaaaaagagagttttatttgaatgctatttaggattttagtttagtatttttattttgagattggaaaaaattaagaggaagaagaagaagattttgacaaagaaaacttggagtattgtgacaaactccataatggtctttctctatctcttcacttttaaactttgtaatttttgcataatctattatgagttaatttttattttgctagaattattttgttgacttaaattgtgatttggtattttgttgctatgtttagtgaattgattttgttcattcaacagcattttctgtaattgcttacttttgcttacttttgcttgatcagcattagaaagttacaaactaatcttgattttagaaaaataagattagtggaattacttgaatgatgcatgaatatcaccttggaaaagtataatttgtaaatggcataggaatgtgttatttaccttgtatgacttgaaggaattgtgcttaaattggtattcttaaaat

SEQ ID NO: 68042 - DNA, 2309 bp, Cannabis sativa
agatcctggtaaaataatttccaacagtaggaaccactattgaatagtagtgttttgtacaagtgggttactggtagtactttttgagatgttctccattctaatacctttgtaggagaaccaatttcatcatctcattgtacctgccaagtttgtaagcacctttacttgtaatttccgtcacttggtacagtccttcccagttaggtccaaacactcctactgcagaattattagaattcaagaatactcttcgtagcactaagtatcctatgaataatttcctctccttgacttacttattaaagtacctggtaactttttgctagtaggcatgtagttttaagttagtttggtctcttctttcttctatttcatcaagggattctgctaacaaggtgtggtttgttctttggtcataggttgtcctcttgtaagacggtggttctaactcaatgggaaacattgctttatagccataggctaatgcaaagggtgtttgtccgatggttgtcttctcggtggtcttgtgtgactaaagtacctctagaaggaggtggtgccaactaccttttgcctcttctagatgatttttcatagtgtccttgagggtcttgtttacagcctttacctatccattttcttgagggtgtgcaactacgaagaacttttaataatgtcgtgcctattgcagaagttggtgaatatgccgctatcaaattatttttcattgtctgatacaattttttgagggggtccaaaacgacatatgatgttcttgacaataaagtcaagaactttctttgaagtcatagttgccaatggttcagtttctgtccacttactgaaatagtcaactgctactacaacatatcgtactcctccttttcctttaggaagttgctcgatcaagtctatcccccatatagtaaagggccaaagagactgcatttgtgtgagctcgtttggtggagctctcaggatctttaagaatctttggcacttgtcacattttttgacataatccattgaatcctcgatcatggtaggccaaaagtacccttgtctaagtaattttttttatttgctttggtgatttccgcagaaacctttatgcacttcaatttatagtcgttcaacttcttccttggtgacatgtctcaaaagtggcattgagaagccacgtctatacataaccccgtcaaggatgaggtaccgggcaactttcctcctcatttttcttgcttcgtttttgtcctttgggaggactctctttctctatcttctgtgagttattcttgttgatcaaaccacaactctcatccattataggaatttactaatgtatctctacacaattcacacacacacacattagtgcacaatgtcattttttacatttcttttgattctgaaatgtggatacacaattgacacattttgtttctatttgtttctttatgtttcctttacttttgactttactaattttgttactagtgaggaacatcacagcaacaacacacttaagaattaggacaaaaatcaaaatagaataacacaagctcaagaatttgagctaattcaaagaaaaaaaaatgttgaaacaaaacagagcaaagagatgagaacaaacataggaattgtacaaggttcaccaccaaatgttggggttacatccatggtgagctgcttcaaagaaagctcagatcaaatccactatcaagatcgaagattacacaagacttcaagggttccaagtcacattcatcaattggtacccttctctttacaattaggtatgaatctctcctttttttacactttgttctctttggatcaaactgatcccttaactttctctttctaactctcttcttttattttttctgaactcgagaatttttctctttgggttcacaccaagatctcaattcttctgacttctagaaagatttttctaaagttgtaagtcttactgctcttctcctcttctatgtatatagttgtgaagtgagttagttaaaaaaattaacaaactgttttgttggtcttgatttacgagtatgttaaatttgttaggatttggtcttaactgttttctttgtatatattggacaagtcaacttatatgggaatgaatttcgacagtggaacccgagttccccaaataaatatatatgtataatttaagtgtgtcattttttgaatgaatggacgtctattaataagaaaagaaactagacctcatggtcattacaaaataaatgtttcggtatttgagagataggtaaccgaccaaatcgatt

SEQ ID NO: 68043 - DNA, 5822 bp, Cannabis sativa
gcaaggcagagagaagacgaagcagagacggtgaggtttcgagttgttccttcagcgtcgtcttggtttggattcgacgagaggaagaaaacgatgggaaagagagaaaacccttcgtcgtctgggttgggaagtcggtggcgccgcctgggttggtaagtcagtggcgcctcctgggttgggaagtcggtggcgccgcttgggttgggaagccagctagctgtcgagatcgagaaaggagaaagaaagagaggttgtgtttttttttcttttttgctgaacttttttttttttttttgctgaacaaaagaggggattggtttggtcagagagaaagtgtgaaaagggttttgattttggaaccctattctctttttgattttattatttttttaaattgattttattgcttttttttaaatcaaacttttaaaattctgaaatcaatccctgtaaaaaaataaaaagaaaaataaaaaaagtaaagaattaataaaatagtggagccaactttatttaaaaaaaaaataaataaataataaaaataattaagtttagaatatagtgacgcgccatgcgagtagggacacgtttatccattcacgctagcagtgtcactaaaggtcagtgtttttataaaaaataaaaataaaaatacgaaaataactctttagtgacacttcatatttttagtgactctgattctaagacactaacactgcatttttagagtctttatgtgagtgtcactaaaactcatctctaattcttcagtgacccacaaaaaaaagcgagtcactaaagtgtgtcactaaaaggtaaatttgtagtagtgttaagttaatcttcatgatgaatctcaatgaaatgttcttcctattgtagccttttaacaagtcttgaaagatcagaatgttatgatcaagtaacctatttttaataaatgcaccctgattactatgaaccaggaaaggaagaacaccatataatctttagcggagcatttttttaaataaacttgtaaagtgtattacaacaagctataggtctgtagtcactggctacttttgggttcttaatttttggaattaaggatatcactgtttcattcagagacttaagcagatgaccattctgaaaaaaatataagactgcataagaaatattgtcaacaatatgatcccataaaccattaaagaaggaaaaaccaaaatcatgtaaaccagggctctttgaagaatgaatgctaaataaagcctctctcacatctttcttatgaaaatgtcttataagctgaacttgttgatctaaattcagaatgttcccctagtcaatagaccctatatcaatctccttcttagccaagattttacgtcccataaagttcttaaaatgagtgagaaaatgatccaccactttccaataatcatctcccactttgtctccctctgtaaaagtggtgatcatgttatctactctcctcttcctcatactatcatgaaagtaactagagtttttatcattttatttcatccaagggattttactcagctgtttaagaactagtatagcacgacagcaaagttaagtaattcacctgtatttgacagtcctgttgttgtaaaaaaagatcagcatgatttgaagctaatacctgttaatctttaatataattttcttttgcctggttatactccttaacaacattacccacttcttctctactaaatcttcttagaacatgtttgatccttaaaagattctgcataattcctgtgagccctcctagatttgaaacacttttccatcttcccataaaaacttttgaacccatgatagagcatccagtggttacagagcctataatgttattaccccacattaccagcataatggcttttgataatagttgttatttaaaacataatcccatttaaagcacacctcaattttaggaaaagcattcaaccaactgttattggtgaatgcacgatctagtttggaaaaatcctatctccaatatcatgcatattagacaaagtataatgagctcccgaacacttgaactcatcaacttttccacaagaaagccaatttgagcatcctcaatatccttatctgaaacttgcttacctctaattctgtcatgaaagttaaacatcgcattgaagccaccaaaaataatccaaggatccttaaggtggcctaagctagacatcttattcaagagctcctttctatctcccatagagttataaccataaatcaaagtagcaaaaaaatcttgttgcaggccactcaccttgattctacaatgaactagttgtgggtcctcaacatgggctgtaacctttacaaactcattttgccaaagcattagaagtctacccaatataatgtctctagaaaagaaatcccaattacggaagttattttcaaatatttcagaaactttcacatgattcaatttagtctcaaaaagtgcaccaaatcaaaccttattctccctacacacatccagaatcgcttttggtttttctttcttattcatccccctagcattccaacccaaaataatacaaacttccatttatcttttgggataaaaacaaaaatcgaattcccctcaccagcttcctatagaacaacatatccattactcattatggctttctaagaaacaacaacaacctatttagtccatttccttctcggagtgacccaattattaatgttattcacattgccatccagttgagaactagaatcatcttaaacattaacaacccttttcttaggattaacaacttccctctcttcaactacactatcgtcgtgttcttcaatcgaactagattgttgttctttaatcggttcattttgctgtaactcactctgtaattcatcaactgctataaaatccttagtattaagattcaccttagttgttgccaccccagttgctaccattatcttcccttcttcccatatcattatttccaataatgggtttctttttccatgggaccccattttccttgttgaaattggcaactgtgtgtcccaagaaaccacatgacgcacatttaggaggaagccatttgtacacaatcaattgtttaactaactgtttatgttatgattttcagaggctaaagtgatatttctatgtctaccaaaatatgagcaaattttactattgatctactctgtgtcaccttgttaaccaaaatttccttgcccatagtacttatcatcgtaccaaggttattctttcccaatattgcaatcctagcccattcaacctgatccaaattagcactaattgcaccaaaaaaatgagtccaagtctgtagtccatgggcgaagaaccataggtttcttgtcaaactgaataacaccagtctccaatatcaagtcgctagttgcttcatctctgaaattcacctaggtaaacccagaatgcatcctcactatcttttcaatatctagatttccccaaactattttaatgaatagtacaaacaccctaaaagggggattagctcccaatacaatacaaacatagcattcttctaataagaagcttcaatttccactctttcaaatctaacctagccacaatctgatccccgaccttaagaggtatagtaaaattccaaagagtagagggagtcattacctaatttgctttgaatctactccaaacatccttcgcataggattggaaagccatcttctccacctcctccacccaacttacaaactttgggaaatttcaattacaaattcaacatcacaaacctctataataccttgatcaatctctaggtcttcacacgggtcatggaattcctctacgggaagctcaacatccttaatttggatcaaagagatattctctgcccccacatgaacgttggagatatattctattagctttcaaaccacccttttcttatttgccatgggagagaaagaagaggtcacacatgcctcggtaaaaaaattctataattaagaaaagtaaaacctagtttttctctctctcccttcattttggcataaggaaactagatgaaattcatgggtttttttttttgtgtttcttggtgaaattttgttggatttgtgggcttagatatgcggtaaagctctttaaacctttccctttaagttttggaagttagttttgggttcaagcataaaagtcatagtttaggttcagtccaagttattaatgcttaggttttgttttttgaagttcttttgagttgtttggattgtaattggagttattttaaggtttgattgtgatgttgagaaagcttgaattaaaaaactcaaacttatctcaacaatgattaattttgttattttgagctgtttttgtttatgttgcttggtttaggtctattagaccttaaataggtgttttggaaagttatggttgatttggggacaatttgaggttgttttaaggtttggttattttttgcagcagaaaaaggcagaccgtttcctcaaaaacgatctattgtttttactgggaagaacctaaaaaatggtatgctatttttacagagacagcctgtcattttttagacaatttttccaaaatctcatttttttcgtgttttctcgatatttagggtattcccgtattatttatcgatgaggagacttctagttttgggtttaggtccccaaaaaggtcttagcaagttgtttacctattttatgtggttgtgacatcgggcctccgttcagcgcgtgagtttccattcaggctgactgacacacatgaattagtaaatgaggtaagattagactaaaatttgtatacgtatatatgtatatgtgttatatgcacgctttattatgtgatttgcatactaccaatactagtacgataatggtacaaagtgcattggtacaatataatatgtttaatgggtatgacacagtattactgacagtagtacgagacgagtacaaagtgcatgtggtacaacactcagtggtactcgagttgtcgttcagccctaccaacgctaacactagacgagtacttagtgcatgtggtacagaggttgtacttatgttaaaaatgttcttgattcatcttaagccttgtaaataggtgtatgggcgcctagatagaagttggtattatgttatatgttttgtgcttttcttactgagtttgtaaactcacagttactttttgcatgtgtaggtaaaggaaaggtaaaaacttagcaccagtgagtccagggcttaaagatgattgtacatatcaggatggctagacatggagagttcagtctctagataacatgcgcctttattttatttatgtatggagcgacatgtttataaaatatattttggatatgattgtaaacttttacgataggatcccagcttttatgtatggttataaatttataaaagtttagagtttaattaaaagattaaatttgacacaattttcaagaaaccctttgattaacaaacacgtgcacagtaattagaaaattattttagcgtgcctaagaaaatagggcgttaaaattatgtatcagagttgccaggttgtttaccgaagaccgtcaagatatgtacaatcatcgttagagacaagcttgactcatgatttagtaagtctttaattgtttagtaatttatttggttaaaaatttagataggaaacatgttagtaatatcttagttgtttaatacgttccttaaaaatccatgtatgcggtatttaggttatatatgattgatgtatgacctacctaacttatgggttcgca

SEQ ID NO: 68044 - DNA, 962 bp, Cannabis sativa
  modified_base (912)..(915): a, c, t, g, unknown or other
tagtacgattcattgatgctcgttcttcgtgcaagtaatcttagttcagattacggatgtggtataacatcaaagtgaaggtgttatatataataagattatgaataaagttttctttattaacatgtcgtttatcataaagacctggttcatatcataaagatgatcaatagtagatcaacctaaatcttgagttttcgtggactcctattcatgttgttagtttcttttatgcactcgttaaagtttctcaaagagaatgattcctacaacttctattttgggaatctaataatgtggatggctgggaacatgatttacaattatagaatcctgattttcctaacaaatcaaatgttggttccctttaagtgttaattctagaactggaatgttgtgcacaaatttagatggaatctaaattatacttccactagtgaattaatggtactaaaggataaagaattaattagaagggtaaaacagtaatttgaccaaaacttattatgaaccaacacatggagggataatcattggaattgattatatcaatggacacaacagttaaacttagtaattataattctataattactaagatttcaagtccatatttatagtggagtaatcataaaattaataaacattgattatttggttgatgagactcaataaataatctagtttattggagcttagaattataggtccatgtccccgaatcgccaccttaaaacactctcaaggtaaggataaagagtagtataatgatgtttcgaaaaatttattttgaattggcaaaatagtaattatttatttttgtagtaaaaaaataattttttcaaatcaattaaatagggaaaaaaaaaagataatatctgttaaaacaaaagtttgttgggttttatgccnnnnataaaactctttacaatctgattcgttatcaatataagaaatttgaa

SEQ ID NO: 68045 - DNA, 507 bp, Cannabis sativa
agcgtccggctagatgacgataaagacagcgctcttgggaggcaacccaagtgttttctttaattcttcagacttttgaattatgtttttagtttatgtgttagtatttttagtattttaaattttttggtaaagtaccagacattaaatttttccagttgaatcgtgaaaaacgtgcaaaaaaaagaaaaaaaatatatatattttttgggaccgggaacccagtggtcgcgaccaccaggtttttgggtcgccaccctttttggtagtcgcaaccctggtcgcgacctggacattacagaaaccacgagaaaaaaattggttccaatggtcgcaaccagggttcgagctagtcgcgaccctttttcacggtcgcgaccatggtcgcgaccacgcacttttccagaagctttgaatttttcaaattcaagctagtcgcgaccaggctatgagctagtcacaaccagctttcaaaatttctataaaaaccaattccccccccccccc

SEQ ID NO: 68046 - DNA, 693 bp, Cannabis sativa
aaaatataaaaaatataataattcatatatagcatatataatacacctagatttcaataaaatctccataattgagaaattatttctcaaacacttatttgtgttaataggtcccattttgtactaataggcatatactcataagtattaatttaatcactattaagctgttaattatctgctaattttcatgtataattatgcgatcattataaagctagtgtcacatagcgtgtttttcctactgggcttcacatctcactccttatgtttccatgtgtagagaaataatattttaaatgtttggtaacaaattgaacttaggcagtatggggtacatctcgtaggatcatgaaatgtgtatggtctttgtgcaaaagtgcaacatgaaactaaaagataacatagttaaaacgtaattaaaaaatatataattacattttaaaatgttattaaatttgtataacataaattataacatttaaataacataataaataaattataatagactatttaataacatgttaaaaatgtaattaaaagacaacttttaattacatgcactgaataataacatgtaaataatgttattatttaaattatataatactgaaataatatagtaatctatagggtaaatattattttggaccctttgttttacaaaagttaccaattggaccctgtgtt

SEQ ID NO: 68047 - DNA, 800 bp, Cannabis sativa
aattaataaataaataaaaaatcaatatttatttaataaaaaaaaatttctttaaaaaattaagtgacacctcacccgccaagctcggctcggtcggacggcggcggcgcacgtgtgtggtggtccagtgtgtgagtcctcacccatgtgcacaaaactaggtaccccttggggctcatacctaattctcaaacatgcactatttatacacttctaatgaagtgttcctatcccatgtgggactccaatcattcacacacttcacttttcaatttttatataatttcataaaagttccaacaagaaccatgaagattttgtagctgtacgtttattaaagtcagtacaatgatatttcaggtgggaagagatgacaggaaaggctctttttcaagacctcatttatagagtctgattacccatattgaaactcatatttgcctgtttccattgttttacctattgttattgcttttcatattaagagaaatgttaatcgagttgtgcatgttttagcaaaatatattttaaagttggatggagatatttgttaaatgggagaatttcctcatactttctaatttataataacagtgaatttctccaaaaaaaaaaaaaaaccttaaaatttgttattttttagtttatttagtttaatttgttgttggagacaatgataatttgttttattttattttggagaattgaaaaaaaaaatattatatttttaatatttaatattcaactaattttagtgatttgaaaatatatatattaataaattcattcttcaaaaatca

SEQ ID NO: 68048 - DNA, 703 bp, Cannabis sativa
  modified_base (136)..(137): a, c, t, g, unknown or other
  modified_base (652)..(673): a, c, t, g, unknown or other
ttaaattaaatatatataattatacatatttaaaccttaattaaattaacttaaattatttatatatataattaaattaaattaaaattttaaaaatatataattaataattttatttatataaaatatctacatnntttttatttttaaatatatataataatattataaaattaatgaataatattttgataattagtttgaatattctattaaagatgatgtagaaaattaaaaaattctgttaaattaaaaattctattacataaacacattttatatttatcaataaaatgtttttcatttgttaaaaaaaaaatgtttttcatgtagctactaatgagggaacgtatgttatgaaaaggaggcgttatgtaattatatcaattattatttaattgatgattaatttactttgaccttttccaccatggcgacatatagcatgttttgactacagcgatcaaacactacttaaactaattaatcacaattaatctccacttcatcaccaatctctaaaaaggtgaattgtattaactaattgtattataatttctactagagaaatgctaaagggcattagtagtgtctaacactctcttatgtatcagtatcgctatcaaactaagtatcgagtcccatataattnnnnnnnnnnnnnnnnnnnnnntatcgctaaccaatcgcaacgtgacatgtc

SEQ ID NO: 68049 - DNA, 653 bp, Cannabis sativa
cgggtatagataatgttttgccggcgcacaatatggcgccgacaaaagtaaacccaaaaaaaaattgaaattccatatatttgtttgtgtcgacaacttttgccgacgcatgtcacgaaatgcgccggcaaaaagcccttttcttgtagtgttttttccttcatctttctcgttctaaccgcattaattgttgcattaattgctttgacgaagattatcttcgatatctccttccagatgacattttcaaccaaattaattacactttgccctttcgatatctccagaagctgtgttctctgtcccctaaattaatttctccctcgactaaatctaaccatcaaatcaaaagctagatcaaagatcctctcctccctctaaaaatggcggtaagacgaagagtttgtgatgatggagcttggaagatcgtaataatcgtgatgtctaaggagtctacagcaggggctatggtcagaagcaagccaagagtcatccttcgaagcctggtatttttcctttataaaacacaattataattttattttgggatacgtgttattttctgtatttctttacctgttcaattagtctttagcattagtttcaatatggatgaactaggttttaactctcttcaacccatggttctaact

SEQ ID NO: 68050 - DNA, 692 bp, Cannabis sativa
aataataaaaaatataaaatttggtgtaatttttagtattagtggttagaattgaaagaaaattagtatttaatagtaattttttgatgttgatttaacactaaatttaagtttctccattgcagatgctcttagccgcccattctttaaatctttgtatattagtgtatcttaccttatatatttttattagttgtttgttttaaaaaattattaaattttatttgtcaattagttttttttttttaatcaagaagaactttattaattaccaaaaaacactccaaatcagagagcaacaaacacctcaacacacattaattacaaaacaaatattgtaaaaaagcaatttcctctatacatcttttcctattctttatcatatacactctatattcaacctcttttttaattttgagaactatagaaattgaaaaagagtaataagagcaaaatggaattatgtccaacttacaagacgaggacacagaaccatgtatgaaaagaatcatagaagcacaactactgtcacacttcagaatgccgcagatggagttgtattaaagaaaaatagaccccaaagacctaggccgatgcaagactgcacataggatgtcaacctaggcgcccaactctgaagttggacccaaattgagcccttggatgttcatgtgacatccttagcttcatgg

SEQ ID NO: 68051 - DNA, 516 bp, Cannabis sativa
  modified_base (449)..(449): a, c, t, g, unknown or other
atatatttatatttatattttcttaaaaaacacaatttgtttcatcaacaacaaaaaaaaaaagaaaaaaaaaactatttgctttataaatattttaacttttaattatttatttttaataattagtctgatattgttgatgaaacgagacaatgataagcagtactactttagtaactcattctgattttgtgaagagagatttcttgtaaatcgatcggagtatcccaactagttgtttattgaacatgttttcgtgtttattcagtcaaagcaagtaagcatgtgtatgttaaatgaattgccatataatgttgtgaatagttattattgtgttactaatatttagtacttaaccacttggggctagctcaagtggccataagtgggtgtagagtgttggaggtcctgggttcgagtcccaaataaaacatgttgtaatatataancgcttaaataaaaaaaaaaatactaatatttagtacttattcaaaatttcacaaactttgcacaaaa

SEQ ID NO: 68052 - DNA, 1610 bp, Cannabis sativa
aaagagctctctatgctcaccattcaaatgccttttttttcatcagcaactacattgccgagcaaagagataatatggtatcctcaataatcagagtcttagtaccatacaacattaattgcatcagacttaccagtcacttcctaaaagttcaattcaaagtagccattgctaaaaacaattaaagttcaagtttaggataaaaacttaacaattatcctgaattgaggggtatatgggacaaaattacaagaattcgttacgatgtcctaacatcttaaaaccttgggcaaattaatacaaaagaattactttttcaggaaacgtttcagaaaatatcttcagattgagacaacactactttccccaccactaaatagaaataactaaagagatcataagaaaaaaagtgacacatacctggagtacacacatcccaaaagtgttacccagaattttttctgaatccttgtacagacaatatgtcaatcctgcagtttcaagaaaaagggaaagagaatctgccttctcagcgtcctgcaacccactctgcattagccgcttcagctgctttgcacgttttttcttgtgactgcattatcaagtattaactatattaattaagcttggaagtaaagagatattgctaactttcagtgcggctagcaactatttcttggcaatatagttcaaaagtcacataggagcctacccttgatgtcctttttattctttgcattgataaaattttagtttcttcaccacaaacaatcttctgcatatgaactaatagtaacataacaatttacaacctctaaggcgagcctaaaaataattgatcatattatgaacttctgctaggtttcttaatacacactcctttcactttcaagccatctctttttaatgttacacaaacattgacacaagagataattaaacaaaacaaaagtcttagctaaacaaccaacctgctgatctcaagcttgttcttgtaacaccacaacacagaaggcctcgactttacagctgccttagtcagtatgtagtgaagattcttaacctgaacaaaaatcaacagttcagctaaacctcaaattcttgctttcaacctataagatagggttccaaaactttaaagtatagtgaacgagagagatagagagataaccgtgtcaaggtacttgtcgccgacgacgacgaacatgctgcggtgtctggtcttgacgccattctcgattagggttctgatgcggtcgtctaccttgagcttcattctccaaaatattaacagaacagagcttcttcttcttcctattcttgctcgtgattttgaagcctattctgttctgcctctcgctttcaaagtgttccttagggtttatgagcaaggtttttggaatgaaataataatttatttatttatttatttatgtttggagaaaagcgtacttcattaatagaatacagtcattacataatatatttaacgggatggtagatatcggaatatcaccaaataatttgtgggtaaacgcccacttagctacattatgggcaacaaaattacaagtcctgctaatatgagagaaaatacaactcgaaaataa

SEQ ID NO: 68053 - DNA, 570 bp, Cannabis sativa
  modified_base (203)..(205): a, c, t, g, unknown or other
attaaattaaaataataacctacctaaacattttacatttgtgtagtcactctcccacgcataatcaagattacctttgaaaattggtgtttcataatgtaaaaaataaatgagaaatgctaaagggcactagtggtgtctagcacccttctatgtgttagtattgctattggtccaactaagtattgggtcccatataattnnntataatagcttttagggagtatcgttagccaatcacaacaaaacatgtcgcaaaagtgctaggcacactggtaactaatagtaatgctctaaataaatctaaatgtgccaactcaactaactacttttcttaaatactattaactatgtagacagttttgttttccttaaaataatcttaaacaaattgatgtgtcatatttagattagtttaatacattatgatataccattttttaacagaagatctttattcctctcaggcacatcattcattcttaaccgtcccataaaaaaaaaagatagttaaaaacatactagttataattatataatataaattgcttttacaatacattcgattga

SEQ ID NO: 68054 - DNA, 937 bp, Cannabis sativa
ggaaatgaagtaagatattgaattatgcacatagagtatagcacggtggcacaattatatattatgtgattagttagatgaaagcatgaattagggtcattaccctaagttaatatgtgtcgtgaattagggtcattaccctaagtatttatattgtggattagggttactaccctaagtaattatggtattgtgaattaaaggttaccaccctatgtttatatatatggtgaattagagttattatcctaaatgtgtattatcttgagcatgctataatgtattatataagtgaatgattagttatgaaagttagggttattaccctaaaacttcatatagtaaagtatatattgaatgtattgtatgcatatatatatgtcaagagttatgtgtataagacataattgggttagacctgataaacatcatcaggatatatcactgtaagagcataatgtatggattatatatatgagtagagttatgcgggtaatgtataactaggttagactagtaactataaccaggacaaaccctagtaaggccttaaatgtaaaggagatgtgtgagcgtaacgcgtacgtctatgctacatatatattaattatagtgagattattgtatggaataatgtaatccagtgcgttggcacaatatgtatgcagtagcgtactgtatgaagtgtgttgttggaggaattcggacaacaccaaatagaaaataaataataaatatttaacagaaaagtaacgagtactcaacttagaatagcgagtattcgatcaagactgcccagttaatagaacaaaaatagaaaatacaatgaacacaaagatgtatagcgattcagtcagatcacggtcttcttagtccactattgcaacaaattctgtctccgtttattcatgtcgaatcactcctttatacacaaagc

SEQ ID NO: 68055 - DNA, 787 bp, Cannabis sativa
  modified_base (226)..(237): a, c, t, g, unknown or other
cacgtaccaaatcatgccccctaaacttttttgaccgttaaaaatttctcctgaactattgagattgttaaatttaaagacttttgtttaatttcattcaatcgtactgtttcagtgattatttatgtattaaaccatgctcccaagaatttgatatctaccaaattatgcccctcaaactttaatatgtactaaatcatatcctctgaactttcatccatgttannnnnnnnnnnntaaaattagataaaagtccttaagttttacaatctcaatagtttggggggaatttataatgaccaaaatagtttaggggacatgatttagaacatgtcaaagttcgaaggaaaaaaaatcttaattaacctctatctaatgcatgtgtaaagaaaaaaagagaaataattaatttaataaaaattaataataattttaaaaaaattgtaggtattgaatttttaatattttaaattcaacaaaataaaaatagaaattattttggaataatttaaaaaaaaacacaaaataacaaaaattttataaaaatacggtctgtacgaagtttttagtatttttacggttttttaaattttatttatataaaatagagtctttttgtatatttttatgttgtatccttgttattttttttgttatttatacattattttgatttttttttttgtatttttgtagaataccttataaatttttttaaaaaatctaaatgtaaaaatataattttcttacaaaaaattgattgattattttttatttaatcaagaaa

SEQ ID NO: 68056 - DNA, 777 bp, Cannabis sativa
tgtaaaagtattgagttatatatactccactcatcaccaattggttttgagatggaatctcatgattctcatcatatggtatcagagtcatatccttagcgggctttcgatccacacccgtctagatagtgcaaagatacttgagatctgaataaaattaagcgagcaaatggttgattcaagattggtgagcaaaaatagccactatcttgaggagggatattggagaatattgtcccacataattaaatgtaaaagtattgaactatatataagaacatgtaccatttatcaccaattaattttgagataaaacctatgattctcaaaaggacttctcgtcttattatcgctatgctgatgagctgattaattaataatgactaaatcacattgaaccatcatctttgcccactttccccataaaaaataaaaatgagagatatatataccaacaaaaacttggcccatctatctagtacaattcttgttttccattttataagatctagacaaaatgtactatatagtgtccaatattattgttgatatgtggagcatacactaaatggttaattaattaaatttaaaatcgaattaatataatctttaagagttttatagggtttgccctcaaaaatataaaagtttttaagttttttttccaactaggggtttgtcttttgtctttacctagaactaattttatacttttattagatttaatatatatatatagtcttacatatttttttattgagattcgaaatttgaatt

SEQ ID NO: 68057 - DNA, 790 bp, Cannabis sativa
gatgagagattgtttgctcttatttaattttaagtgtcgatgttagttgaatggtataaaagtgtgtcgtcgccagtgatattgtatatattttttgcagataatagctacttatattttaaagccaccaatgtcaaagctttgaatgttttgaagcttcttcataaatttgctttaggacaaaagataaaaaggagaaaataaaataataataattatttttgaatggattgtaattgtatacaaagagaaatatgacatatccaaatccaacgctactcttgctccttcatgaatcatgcattcgtgcgaagaattagaaaagttggtatacagttataatgtgcgttactcttacactcaaaatagtgtgaatatattctcttcttcttttaacaaccaaaagaaaacactatattagactagtaatatctacgagaatatgaagacatctctctttttcttttttctatacttttttcaattttcccactatcctaatataatcttattaacttattgatattggttaatctttttagttatatttctaaaattagtttttcttttttttttattaataaaagtagcattagtgtaaacacatgtagcccgctctacctaatatttatgagaaatggtttggggagcatcttaaaatacaaaacgtgacatatatcgctattagttcattttgatatcgagttctatacattttaatttaataaataatataaaaaaccgctaactaattataagatgtctatcaatatagtattaaacaccttaa

SEQ ID NO: 68058 - DNA, 700 bp, Cannabis sativa
tatttattttaagttaattcaactcttatattaattttaagtaatttaaatatatataaatattaatatattatttataatattataatttttttattgttatttttaatattaggagtatgttttcttcaaatttttatccttaaatatttttaaaaaaaaaacacaaaattaaaaaatttattaatttcttttaatttataaaattttaaaactacccataacaaaaataaaaactaaaaatataacgtgcagtacacatttaataataacctaatatatgtatatatacatatatcaataatcaatattttaaagatatgtctctctctaatcagagttaaaaaaatcctccactccacaattcattattttcttactttctttcaataatgttagaatctcaccgtaatatactaatatatatatacaaaattagtttaaattattagttgatactttttaattatatttcaatattattttttatagactacattttatgttttataaattttatatttaactctaaatattttatcccaaaaaaataacaataaaaattaataattattttatgatatatattccagttgcctatcaaggttattgttcccctgtgcgctgtctcaactaactatataaaagtgttgttcaaagaaaaaaaaaactatacataacccaaaagtaaatatgggga

SEQ ID NO: 68059 - DNA, 796 bp, Cannabis sativa
atttttgtgctggcaaaaagttagtattgcgctagtaaaataaaatttacttttaatatgttggtaaaaagggttggcaaatcaacgttgacattagaatttttgtcagcacaaaatagaaagtgctggcaaaaataacttttcacagcgcgtaaatacgctagtaaaagttagattttagccactgcaattgtgtgctggtaaaactttaacttttttgccagcacaatttacaaaatgcgttgataaaagttacttctaccaacgcagtaacgaactgtgctggtaaaagtgacatttcttgtagtaaatattgagtgaatattattaaaacattatttcaaaagtaaataatacttctctatgtaaaaaaagaatatagttttcttcaatatttaagataaataaaatatttattataattacaataataccagtccaataaacatttgtaaattttatggaataagagttcacaacttaataatttacataacacccgatcataatatgtttcattcacttacaaaacaagcaataagactttagcttcccttccatcctttatctatatctctttccttcaatcattatcttcacatttctacataataactatatagtatatacattaatcttaattagattaagggttatatatctatttaccataaaatttccaaatcttcttatcttaatcaattaggttaatttttgggaaagtgatgggtggaccttgactaagtctataagcatcccacatggccgacacatcttccccacaatcttttatgtg

SEQ ID NO: 68060 - DNA, 634 bp, Cannabis sativa
gccccaagattatcaatgcatccaatattatttgtcggtttatggatgacatagcggaacacaaggtacgtacgtacaccatccaaaccatacattgcacgtatatactaagttatattcttaatttttattttagttatatatatttttagttgtataattagtttttttttttatgtgtggatgttatatattcatgataaaaacaattaatttttattaaaaaatatttaatttaaatgttatttataaaaagagaacataataatattcaaaatttgttgtgttaatcatatagttaactacataataaatatttattgtgtcaagtgtatacaaaaatgtaagaattaatgcaaaaaacttgtgccaaaggaacatatttatagatttgattaaagaaaaagtatgagttcataattatatcaattactttgattttaacagttcgagaaagagaaatatgaagaactatctgcagtggaatgttatatgaagcaatatggagtttcagaagaagaagcatatgatgaactcaataagagggttttcaatgcatggaaagaaataaacgaagactacttccttaagccaacttaattatgtagcgtcacctatattagatcgtgctctt

SEQ ID NO: 68061 - DNA, 1681 bp, Cannabis sativa
aatgtaaagttttctaaactcttatgtgttcaatttcattattttagagatattcatatttaggatattcattcaacatacttgtgtaataaatctagatcctcgtaagatattcccaacattagcctctcttggcaaatgtacatgagattacaagatggttacagtaagggctactctacttctattcgagagagagttttcttggaatttttgtggagtgactgtaagtaaaagaattgttctccccttgcctaaagaaaaataggactatttgtacgcacacatggggcaaagggcataccttttacccacctagggcttcgtactccatacgctactaaggtcagtactgtaaaaggacaatttgaccgttggctggtaagaaccttcttcatcgtgtggtgtacaactacttgtgaggacttttgtacaatcttggacacatgccgcgcaaacgtctctcctttgcaaaataccttctaactaggttgttggacaaaaagtatgtttgagggtgcgtccgcgcactaccatgatctagcaggggggacaaaatctgatcctgtttcaaaaaaaggtgtaaccgtctatggagtgatatttgcaagatgctgacatggccaacgtctttaaaacctacatcgccttccgagttctttactaaaggaagttactctcagaggccatcgcctctcgttgccttccatgtctaggagacattcattttcttggttaccttgaataattcttgttgtgactgtatttttccctctgatcaatgcacgtgtcttgttgatgaaatgttggataacatttacccccaaggtttcgagatcctttggatcagaggagcttgctattgttcccaatgttgaccgtggacatgtgctgtagatttaggctacagatacacccccgcatgagttgtaatctactgagggtacataagttattttcttcctcttgcgtggaaaccacgcaacatttcaggaagtgtctcttgcctcttttagtctgtggcaaagtgcctttaacaaaaaaggtgcagtgcaactggcggctgaataacgtgcagaaagggacctcgacacttttgtgggccccaggctgatcgtacgggacttctcatctccctagctgttgggtctattgcaaaatttttgaaccattgatctttcataggcctgtcttcttttggaaatataatctgcctttcgtggtgtcctttttactacatttacttaaagctccatattttctctacaacttctttttctcttccagctatcttttgcatgcaagaagcgctagaagatttgatttagcgattgctcgtcatccgcaaagaactttttttaaacaccgctccccttctattggaccagcaaagttctttcgtaggggaaacatttgatttttgcggttaactgcgaccactgcattaactggctctagagcttttagataggctttcatgacaagccactcaccccttctgattcgacaagtaagtgcactaaccccctatctgaatttttggcatttcacatttagagcaagaggtttttgcttacgttggggctaggactgttcatgtaacaccctaactagcataggcatattacgtgattttttaaacatactgtgcaactcattggtaatcaacgaggtttatgga

SEQ ID NO: 68062 - DNA, 944 bp, Cannabis sativa
aaattacgattttacccttctcgggtcaaaattacgaaaaaatgcccatggctcaccaatggggtcttaacatgtcatttctcagtataattcacacatatatatattaaattatatagtaatataattccacattaatacacatttaactagttagggtttgctaatccgattcttaatcttagggtattacatgttatgtatgaccaaagtacctctcgtagttcctccagccaaattacccttggcttctctgagccattttttcatggtgtctttcaatgtcttgttcactgctttgacttgtccatttgtttgtttgtggcttctctgaccaaagaatgttttatgatttcatgtgtcgtacagaagtttgtgaacatttggctattgaattgtttcctattatttgaaacaatatttgtggaagtccgtaccgacatatgatatttttttaccacaaagtccaaaacattcttggatgttattgttgacaatagttcacttccgtccacttggtgaaataatcaacaaccacaactttgtattgtactccaccttttcttttgggcaattgtccgattaggtctattccccaaatggcaaagggccacagactttgcatctgtattaactcatttggaggtgcttggaggattttggaaaatctttagcatttgtcacattgtttacatgggcctttgaatccgcaatcattgttggcctgaagtaaccttgccttaatattttttttagataaactttttcccccagtatgattgccacaaaagccttcatgaattttagacaagagtcgtgcaacttcttcttttgtcacgcacctccataatggcatggagaaacctcttctatacattacaccatccactattatgtattgtgcaatctttctcttcattttttgagcttcatttctattgctt

SEQ ID NO: 68063 - DNA, 895 bp, Cannabis sativa
gttcggtttcaattttttgaacccgaaacccgtgaacccgaaacttgccaacccgaaacccggtaaacccgcccgatgttcagccctagttcttattagcaaaaaaatcataattgtctggctttcccatccttcgttggagtttcgtgaagagaaatattaaaacgcaccagtagtgccaatcaccttcttacgtgtcaatatcgctattgatctaatttagtatcgggtcccatatagtttaatataataactaatatcgctattgatctaatttagtatcgggtcccatatagtttaatataataacttttaggaagtatcgctagtcaatcacaaagtgacatgtctcaagggtgttaggcactactgatgcccaataacaatgctcttttgtgaaatatgggtaacccacattgtggcaggcttccaaaaagtgccattgactgttgtgagctgatgaagattcaaattaaagttagagtcatctattctagagttagacgagttatgctaagaattgtatttgggtttgttcagaaatgtttattttttttcttattatttggatttcactttctctcattaatggatatatatatatatatatatatatatatattatataatttaagattcaaattggtcttgtaagcttggtgtttgtaatattaaatttcaaaataattatatactgtagatatgtatagggcaagattatggtaagacttagcataagttttctaccgatagggaagcttttttgaccattgattttagatcatgtggtcattaaaatataaagtgtatatttttacgataggactgcttgtatacaataaaaactttatacatattataataatatttaattatatttattttaaaaaataaa

SEQ ID NO: 68064 - DNA, 709 bp, Cannabis sativa
catgcctttaaggccactcggccaacacgcatgcaagcttctcggcaaagcatgcaccttaagcttctcgacaatgctcttctcgatgacacatccatgcttaatgaaatcttccaaagtgttgaggacaaaagcagatgagttacgatcacaaggatgagtcatgcatgcaaaggacgaggtgtacatgctaggggagtacaaccatgcctcctggaagttctattgtggagagggtacgagtagtggaggcaccacgcttggaagccctgacatcacaaccaagggcatacaatggctaccacctctgcaactcaggcccacctgacaccaaacaaaggtacaaaggcacaataccacctctgcacctaaagctcgcaacaccaaaatgtcagcttgtcctttggagaccacaagtgtatcccaggccattagagcctataaataccctattctcagatgtgagaggagttgaaaaatcattataataatttaccccaagatataggaaaaattatttttctccattattgctcaaaacatttctttcagttatcatattgtcatctttattctaagtcttgtgtttgagtttttatttttcagccgtaatttggttgaccagatttcatcgtcaacattcttcgttgtcaactgcttagggagattagttgtgttgaactcaaggggagttatttgtgttgggttt

SEQ ID NO: 68065 - DNA, 680 bp, Cannabis sativa
aaattatatgcttcattgatttatcctagattaatctatctccataatcttaaaattttatctaagttaaataaattacatgcttcgtggatttactggttcggtaaaagagttaataattgagcgcttcatcttgattaaatgtaataagaagattgagataattaactgtttcagctttatctgcgggattaatagtttaattggaaattaaaattacattcatgaataggaattaggaatgattgttgagggtggagaataaccttttactagttatctcatagcgtagtctcacatttaattttttttaatgctattttattctaaacatcgaaacccccaattttctaattcttgtcactaatttgtgaataattgaataaacacaatcctcgtgggatcgacccttacttacaattatactaaaataattggaggtattggaaataaatattggtaaatttgttgtgacttaggacacgcatcaatatttggttggtggtcttgttttggagcttctaagaagcatgcaaattttttatatgagttttggtatttgtaatgtaactgatttttttgttaagaaactagtttttaattgggaaatttaatattatatgcttaaaattaatttatccactaaaaatatgctagcatattttgcatcatgcaaaata

SEQ ID NO: 68066 - DNA, 666 bp, Cannabis sativa
tgttattgagttatgtttttgtcagtttcaatcgtacataagcaaacattcgacttacatgacacttttttgaactacatcactacctagtgtaatttaattgaaaagttatttataagttatataaatttattttaaaatgaattaaaataaataaataaactaaaaattaattttaattgtatttatatatgatgttgacgtaacaatgctacattagcattcatagtgtcaactaaattttttgttggtcacgtaagattgaaactgatagagtgggcataacttagaaacatgaatagtttgaaagaaatttttaacaattaaaaaagttcggaagacatgatttgaaaattgtagtatttcaagagtaaaaattatatttaaattagttattccttagaaaattaagagaactcatttaaatttcatattaatatttgtaaattaccttttataagggttaatagttaaggattgattaattttctttgttattattaagagtcaaattagttttattttgccttgtactttttggtcttgctacattgtcatagtcatcatttggtaattatcttttcctaattccaatatcgtgggaatacccttaggttgctagaatttgttataggcagaccacgtattatattcttgttacaatgc

SEQ ID NO: 68067 - DNA, 1803 bp, Cannabis sativa
  modified_base (63)..(66): a, c, t, g, unknown or other
  modified_base (376)..(377): a, c, t, g, unknown or other
aattgttcggtatttgtataattatttattgaattctaaatattttaatttaataattactannnngtgattttataatgcaccccttaaaagggatgtactgatgcacccttgacttgtttcggcatccagaataattttttaatctaatttttttttttcatattcatgtacgttatagttatttaagataacttataaaattttgagaaattcagattatttacaatatagaaaacaatgttcaaacagtctatttacacgcgtataaaataaaatagtcacgcgtgcaacacactgtttgaacgtattttttggcgtgttaaacttttccaaattttttaaaattttgccggatgtcttaaataactataanntacatgaccatgagaaaaaatttaattaaaaattatttcgggtactaaaatagataaggatgcatcaatatattcattttaaagcggtgcattgtagaatttcccattgctttaaatatattattaaccatattcataagacaataacttctaaattaagaaaatagtaaaaacagaattatatggtgtgtttattacttatggaattagtgaaatatgtgggtcccacgttaatttgggattgaggaatgggattattggctaagttggtgggattggtactcacattcttttaaaattatgaaatgtaacttttactatttttaattaaaaaatattcaaataaaattttaataaaggataatctactccgattctaaagtaatatatacacatcaataagagaataccgcttattctaattctaattctaattctaattcctacaagtcaagtaaataacttattctgattccaatcatcaatcgattaagggtcaggctccttgcacataggtgggctaagctgtgcttaaggcctacctaatcaggggccaccgattttgaattgccactttattaatcatgtgtagcatattttttctctaaataaggattcaaatatatatatattttttttggtatgatacactaaatttcaaaacctgttctatgaagagtgaatcgattcagtttcagttaatgttttactaagtcgaattaaagataacaaataaaaaatcgtttcgatgatattgataaactctatattggatttataaagatatatatattattttaataatatttataacagaattaaaaaaaaacgcatatatatatacacacatgcatgtatataatatgcgtgtttgtacaccaatcaaagttcagatggatagatgcaagcgtttctatgcatatatctcatttaattaactcatcatatatcatcctcttagttcttttgactctattaatgacctaaattatttatttattaggatctcagtcgttttcttcaaccataaacatacgttatatattatatatatatcgatcgacctatcatcaatacatgcacattaattaacaagcacactaaatatgacgtgtatatattacagaaaatcttggtaattaaattatacatatatatgaaattaacaggtagtgacattgtttttataatcactaatatatgtattctagtagtttcacttcttcagtacatgaactgtattttgtttttcttactacacataattattttgatttttatatatacacatacgtataagataggggttttttcattaatgtataacaaaaattaatatattacaaaaaatgtgcaaaaaaacttaattataaaaactcatacattttaataacatatttactaatatttaaatcattcaatataa

SEQ ID NO: 68068 - DNA, 693 bp, Cannabis sativa
caagtggttgtcttgggcggaatattggtataacactagttttcattcctccttgggatgtacacctttcaaggtgctctatggccgagatcctcctcccttggtgcgctaccccttgggtggttcggcggtcttgacggtggaccaaatgttggaggaccgggactccttccttgatgatctcaaaatgcatctccttcgtgctcaacaccgcatgaagaccacagctgattcccaccgtcgtgaggtccgttttgaggttggtgacttggtgtttgtcaaactccggccctaccgccagaagactttggctgtccgtcgtaatgagaagttggcagcccgctactatgggccatttcgagtcttgagccgcgttggtgaagtggcctacaagctggaccttcctcctagtacagcagtacaccccgtcttccatgtctctcagctccgagccgtcattggggcagcctcctcttcttccacctttcctccccaacttactccggagttggaactgcaagtggagcccgaggaagtactgaatgtgcgccatggcactagtggtcccggtgatgaacttgatgttttgatccgttggaagaatttacccttgtttgaagcctcatgggagaagtttgagaccatccgccaacaattccctgttttcaaccttgaggacaaggttcgagatat

SEQ ID NO: 68069 - DNA, 641 bp, Cannabis sativa
attgtattttggtaatatagttacttttttggtatatacttgaaagaatatcaaaaatcaatcataaaatccactgatttcacaatgttttccttataattttaactacggctaatctgttaaactgaatttgatttataattattttgactttgggattaatgttgctttatattttatttactattgcttatgtttttcttagtaataatgtgtagtttgatacacatttatgtggaatttttttcaccaaccatcattatttaatataattttaactatggtttgtaaaaaaatagaaaatgttaatatgcagaaatgtatggttgaggaagtaggaataagttagcagttacttgaggttctatctcaaaatcaattgacaatgagatgagtattccatgcatcttatgtgtggtatttagttttcacacattatcaatgtgggactctctatcatctttccttaagatagtggctattttttgctcaccaatcttgcacgactcaatcacaagtaactttttagctcacaacggctctttttggctcattattcccgagtcacaagtgactcttttgactcttccttgtagactagtttttggatttatattagatactcgttagagtttagtttg

SEQ ID NO: 68070 - DNA, 880 bp, Cannabis sativa
cttcctctctctgtgcagaaaatgtatgtttatgagtatggaggaatggaaaagaatgaagataaccactcaaaaaaaaagagtacaataaataaattgaaatgatagaaaaattccgttggctcacatgtgttcaaatgattccagaactgaaaaacattttcttataaataaaggagaagaaaaagaaggaaagtaaaatttcttgagatgacatatatagtcaaattaacagaacatatagatgaaaaagctaaatttccaaaagaaatgaacttacagcataaagacttggcagtccaaagtcttcaacaatgcttctgggaatgggatcaacatttgctggcaaagcttgtaaagcactgtcacgaaagaggtgggcggcagaaagaaatttaaaaaattacagaaaataagtgcaacaaattaccaactagtcatttcttaagtggaccaaaacaacaaagagggtagaactcataaaacaagaaagtaggccactaatactactgaccaaataatcctaaaatgtctttaatcatgtacttatttagtgtcaaataaattgggaccttatccagaaataaataaactatatgaaaaaatacagtcaaatagtcagccgacactgttgaagagtgcagaccttcaaaggtaggtgatcaaatcatactgaaacaatgaggagatcaaatcattcttagtaagttaatgctacaattcttgacagtagtaaacaaatttgagccacacatctaaaatgacattaacaacttcatttttacatcccaccttgcaggacaggattcagccatcatttatgcaatgatggcccttcaacttaaatgcatttatagaagttacccatatttgataccat

SEQ ID NO: 68071 - DNA, 916 bp, Cannabis sativa
ttttatccatctccaagagaggaaactcccccctcccttgttaacaatctcatgcccttgtttcttcatctcacctatttggtcattatccattcctttatctagctgctacaacacctgaaaagagttactattgcttgctgcacctgattcctcccccttatccttagttttccagccctttacaactggccggaacccatctgcatcaagttttatctctgctttgtcctgtttctgagcattcttaacaatccactcttgctttctttccattttctttccatttggttgtggctaaaaagttgttactaaatgtagctattttttgtagtgtagactaaaactttttttattagtttataatatatttatacaacttttttttgagatatatacataaaattttttgtatattatgtgtttatttataatttaataaaataatataataataaagaatataattttagtgtaaattttagtattataattggaatagaaaaaaaatttagtatcataattttatcttttatgtgttgatttaataccaaatttaacatttatccttgaaggagttgcccttaactttattacattctacaaaatattatgagttggattaggggtgttcataaaatagctgatccaacagaatctatacaatctaatccaattaaatccgcaaaatgcggatatccgcacttgtacggattggataggaaaatttaaaatccacacttgtgtggattagatgttgattaatatgtaaaataaccgatccaatccaattcacacatatttataacaaaaattaaaaagttatacatacaattaacattttaatgtaaaaaaaatagtaattaaaagtctaatacatatagtacaattattttcaaaacttaatagatcaaat

SEQ ID NO: 68072 - DNA, 927 bp, Cannabis sativa
gatattgacttgtactaatagataatataaaattataaattctttacaataaacttgacctcaaccccgatcgcagtttggactcgaatctggacccgaaccctaactcagacctccggactcgaactagaaccgagacctggaccccaaactcaaacccagacccagacctgaactcaaacctggagcccaggcttgcactgtgacccgaactccgaacccaaacttcgacccaaacctcagaccctagaactaaatcgagacttggacccaaactctagacccagacccgaacctaaacttggagtgcagttttgggtttgggacccgggtccgaggtctgggtttgaggtctagctcccagttttagttttggggtttggcttcgagttcaaggttcggggtcggggtctggaatttaggtctgagtctgggtctaggtccgggtccatggttagggtatcggtccgggtccaaggtccgtggccgggggtgaccacagaccctttgtaaacattataatgcaagctaatacgggtcatttgttatgtattaaataatacgactcacattgtattaataattatacttgtgataattaatacattgtaatgttttatccaaataaagtgttatttattatttaatacaatatgagtcttatacgacctaccaaacgagtcctaaagtccaaaaaaaaatatgaacttttttaaagataccattttttatattttatttacaaatttttagcttaaaatttttatttacaaaaatacacttgtaaaattttgaaattacaaaaatgtactttgcatagcaaaaagtaagaaaacaactaaaaaacaacgagaaatcaatctcacgacaactataaataaattataaatactaaaaataaccagaaaaacaatctcatgacaacta

SEQ ID NO: 68073 - DNA, 870 bp, Cannabis sativa
cccttttgatacccataacataattggtcatttaattttgtatcacactttataatagcatatacattatacatatgtacccacatagaatttttaatccaacaatatggtgttgacaagaagatatctttgtttgttttttttttttagataatatattttatgatgaattttgaatgatataaatttatttttctaagttgtgtcaaaaaaaaaaaaatttctaagtaagataaaataaaagtttaataaaatagttctcatatgattttttttaaaaaaaaaaatatatcaacaatattaaaattaaaaatataatataattttatgatttaattatcactaaacgaaatacaaccgcacgcgaagcgtgatttgtttcctatttatttataaattttaaatttctatttctatattcaaatacaataaaaattattaactataaaatttagggtataaatacaattttggactctgtattttgcaaaaattatcaattggaccttctgttttgttaaatgaaaatgaaccctgtattttctaaaattgtacaaataggaccctgaactgactttttgtcaaaataaaacttaataataatccgatctagagatattttggtaaatatagttatatttttttgtatatgttcatgttataaattgtcttcaagatagttttattaaaatagaaattgtcagaaattgatcgctcagagttctatttttgctatttgaaaaatacagtatccattttttcatttgacaaaacagaaagtccaataagtaattttgtaaaacacagggtccaaagggatatgtaccctaaaatttaaaatttaatttaaacactataaaatttaaactt

SEQ ID NO: 68074 - DNA, 652 bp, Cannabis sativa
tatgaccaaaatatatatactaatagtaataatattatcaacgacggccggcgtgaccgagcagtcgtctttagtcatctgagagtggttcaagagtggttcggttcaatcgtacttgaatgttctacccatgccacatgatctctatggtggctatttgattcaatcactcttgataaaaaaaaaacatacatggattgcagtttctattacgagccagaaacttagtttttgaatcctctattttagttttttgtttcatttattgatttactattattaggttaattccaattagtgtttttatggggttagaattataaggagtacattatttaattagttttaatgcagtgattgtgtttatgtgttgaaacttaatttagtttttccattagtcttttcttttgacatggttctttagtcttttccctttagttttttctggttcgattcttgttggttcttgttttctttttttgctttcgggattctgctggttgtggtatgattattgaagacggtacaggggtgcatattcctattgaggaggaggacaatatcttgtcttatgatgctagtgctacggttggtaatgactatgatataggtggtgtattgttggaaggttcttgactgaaagacaaattga

SEQ ID NO: 68075 - DNA, 1239 bp, Cannabis sativa
gtgggtattttaaatatttatttttagtaatgtagattttttttttatcttaatcatttattaattttattttatatttattgagttattattaattattgaaaataatagaattaccataacagaattggaggaggaccataatgatgacaactaatcattgtttgtcaaatagcacacttttctattatttgattctcttggatatttgtattgtgaatattcctttttattctcttctagaattatcctttctgtactataaatatcagtacacattcttgtaatcgtatccgttgagcaatatagtaatatagcagtaaaagctttctctgccattatctttgcttttattctctttttaacttggtatcagagctagctttccatggctgctcctgctgattccactgctaccacaggaggttctgcaactcctgctgctccggttccatcagcacaacaaactgctggtgccatatccatctttcaaagtcttgcccctttaactcttaagcttgaccgaggcaactacacattctggaaatcccaagctctaccagcactgcgcgcgcatgatcttgaaggttttgtgctaggaactcagatctgtccacctcagtttgttgacaacaccatcggaggcactgttccaggagaaacccgtcaactgaatgttggttacgctctctggcgaagaacagatcaagccataatgagttggttgctcaactccatctccgagaccatgtttggtcatgtggtaaggtgcacaacctcttttgaggtttgacacactcttgaactcttgtttaccactcattcaaaagctaggactctacaaattagatttcaacttcaatccctcaaaaagggaaatctatctatacatgactatatgatgaagatgacaagccttgctgaaaatctttctgcatctggtcaacttatttctgatgaagagttaattctctacgtactcggaggcttaggtcatgattatgaccctgtagttatcactttaacatctcgtactgattctattactatacaggaagttcaattcctcttgcaaagtcaagagatgcgattggagcaaatgaatgcccccatttcggacgacttaagcaatcccagtgctaattttgctgctcagtttcgaagaaacatcaacacaggtggcaacccaaatggcttcagtaaccctcagggaagaggctaatccccccgaggtcgagg

SEQ ID NO: 68076 - DNA, 768 bp, Cannabis sativa
  modified_base (42)..(63): a, c, t, g, unknown or other
taaatattgggatccattattaaataaattcacaaataatannnnnnnnnnnnnnnnnnnnnntaattgcctttactaatccttatactagagcggtcattacactgggtaagtgtgaaaatgtttaagggatgtactttgagatgcctaagtgatattttgacattactttgtctatttttgtattttggcgaagctggtcaccagttcttacgaaaatgagagactcaaaactcttcctttccgagtgagtttcccatgttggaaatgagaaatacgaagttgtgaatttgatttctcaaacttcatggatcttagttattttaaaaaaatagacggaaggtcgaaacgaaaccagaatcagataagcagaatccagcgcactaggccatttgtcaacttgggtgctgggtactcattcccaagctctctggatctcgttttgatacttccaatgttcttaaacttgaggcgaggtctcctaccccatttttgaccatttaggattcattggtcaaatcaaatttggcatttaagcaatcgtaagcagtgcactaggttgattgtccccagtacatgtcaacttgggcgttgggtgcccaggcactgggtgctcctggtgctcaaaaatgaatttgctctgaattatattctaatacctcaaatatgtctgtggtatgtctagttgatgtgccaatgcaaagtttgatctattttcactaagacggtcccggaaatcgcaatcctacttggtaatgtcaacctagg

SEQ ID NO: 68077 - DNA, 815 bp, Cannabis sativa
gtatgctttttgctgaggacagattcaaggtaaaactttaatatcggtcgttttaatccctaacagtgactcatattcatcattgtaaatgaactctaccttattatatatcattggaagacttatcttctataaaactatttttctataaatttatatttaggactttattaaattttaagttgtgtaaaatatggtgattgaattatgtattgtattccatagagtagtacttatttactataaaactatttttctataaatttatatttaggactttattaaatcttaagttgtgtaaaatacggtgattgaattatgtgttgtgttccatagaataaaatatatttatatacaaaggtaggagactaaatagaaaattgctaaatacaatttaccttaatttttacaattaatatacaactaatattctaacactcctcctcaagctaatcatgcctaacttgttacaaaataatcaacccacaccccattcaaaacttttgtaaaaatatttcctaattgttcttcgatcttcacatatcctgtggagataaggcctttttgaattttctgacgaacaaaatggcaattaatctcaatgtgcttagttcgctcgtggaacacagaatttgaaacaatatgaagagtagtttgattatcacaccacaattttgctggaatagaaatcttaaacccgaattcagtcaaaagctgataaattcatattatctcacacagactgtgccatagctttatattttgattcaacactggatctaaacacattatttgtttcttaatcttccaagaga

SEQ ID NO: 68078 - DNA, 5498 bp, Cannabis sativa
ttaaggtacgattctgttattcatattttttttctccttgaatcaataaagatattacttaaacctatatttatacatttataattatatgtaatatattattggtaaaattgaatcttattattacatatttgtataagtaataaaagaattataacatcttatcctaatataatattctatgtattagaatataaaattttccaacaataaatgttgtattagtgtctgaattattcactttccacttgttgaattacactttgtaaattaaactcattaaaacttgtttgattaataagaatttaattaatttgataatataattaagagtgccctaacacagtaaaaataacaaaagcatatgttcccataattaagtattaaacaaggaataatccgaaaaacaaaatacaaatactaattttgctttacctgctatccacgtaagtttgtttttggcatgttatgcacttgtaataataataataataatagaaaatggttttggataatcccacactgaactgactgtgtagtacctctctttctcactctctctcctaagtcaaaagagatgagattgaagaagtggaaataccgcgtatccggacaaagcaggagacaacaggataataaagctctcatatcatatctggacccaattaattccgctacatcttattccacgcgctcattcactcactctcctctactaacacgtaactatcttctattcacgtggtacggtactacttctacatctactacaacaatctactacatactcaactattacccacctaagtctctctctttctcttaaatataaccaaaaaccaaaaatcttcgagttcaagaactatcacagaaaataacaatccaaaggaacacaggaaaactttatacataaataaaaatacctaaagcattacctcttcagagagcgagttttagccacggcagcgttaagcgcgtagcagaaaatggcgataatggccatcgccgccgccacaatcaacgacctaccggaggttattctttcggttatcttctccttcatttctgacgtccggagccgaaaccgcctctccttggtctgccgaagattccgggcattggaaagagccacgcgcacctccctcgcgctccgtggtaacgcgcgcgaccttcacctgatccctcgctgtttcagctccgtcacccacctcgatctctccctcctctcgccgtggggtcacgcgttgctttctccagtcgcgtcctccatcgacccgaatctcctggcgcgtcgcctagaagtggcgttccctttggtgacctcactcgccgtctacgcgcgatcagcaagcacgctacaggttttgatacctcaatggcctggattgcgccacgtcaagctggtccggtggcatcaacggccgcaatcacagcccggcgacgacttcgtcccgttatttgagcattgtcattcgctaacgactgtggacttgtcggagttctattactggacggaggacctccctccggctctacaagcctctcaaaccgtagccaaatccctcaccaagctagatcttctgacgacgtcgtttacggaagggttcaaggatgacgagattcgtgtgatcacggaggcttgccctaacctcaaacagttcctcgtcgcttgcaggttcgatcccaggctgattggttttgtcggcgatgaggttctcctcaccatagccgccaattgtcccaacctttcgcttcttcacgtggcagatacttcatcgttctggaacacgcgtggcaatcccgaggacgatgggtttaccgcggaggacgccagaattagccgcgctggcttggttgatttcttctcggggcttcaatttattgaggagttgtttctggatgtttgccagaatgtcagggacagtggattagctctggaagttcttgctcggagatgccctaggttaaaggttctgaagctcggccaattccatgggttgtgtgcaacggttggatcgcagctggatggaattgctctttgccaagggctggagtcgctatggatcaagaactcggcggacttgacggacatggggctaattgagatagctagaggttgttgtaggttgaagaagcttcatatctatgggtgcaaggggattacagtaaaagggttgagaacactggcttgcttgctccggcggaccctcgttgacgtttccatctcttgttgtaagaacctcgacgccaaggggtcgttgcaagctctggagccaatttgcgatcggattcagcggctccacatcgattgcatctgggaaaatttgaacgattctgatggagggtattataattttgatttaattgactctatcgaacataataagggcattgactacgacgagtacgagcagagaagcaaaagatgcaagttggatggagacgccatggccaatagctcctatgacggcgatgggttttggtgcagcaagagctgggatcgtctagagtatctctctctatggatagccgtgggagagcaactatcgccactaacaatggtgggtctggaggactgtccaaacttggaggagattaggataaagattgagggagattgccggagaagagccagaccaaatcaagaattcgggttgagctccctcactatttatccaaagctaactaaactaattttggattgtagggacaccataggctacgctttgactgcgccagccggtcaaatggatctaagcctttgggagaggttttttcttaatggaattgagatacttagtcttgacgaacttgattactggccgcctcaggaccaggatgtgaaccagcgcagcctctctctaccagctgctgggttgctcgctgagtgtatcacgttgaggaaactcttcatccatggaacgatccatgagcatttcatgaatttctttctcaagataccaaacctcagggatgcgcagctcagaggaacttactatcctgcgcccgaaaacgatacaagtacggagatgagagttgattcttgttgtcgttttgaagatgcactcaatagtcgtgtcattgaagactgacaaagaaaactaataacaaatccttgaaagttttgccgggaaactaatgaatgtgcaatgtaataagttttgagaaattttcacaatacgatatattattatatcttttttttagttgtcgagttcacacgtactaaatccaattacaatgaagctggctaaaaattgcatgtaaatttcttttttcccttgtggggttaaggaaaatactcgtggagcttgagaaagtgtggaaaagaaattgaattcaactttgcatataaatttctcttctttaatactaaaaaagaaaatactcgtgaaaaagaaatggaattcaactcaactcttcttgctcattcaacaaactctgatttgattgcacaaaaaaggatggatgggtttgcaccattggaaaggggaaatgaaacaaaaaagacaacactttatgattgtacaatggtaagaaaactcatgacagtgtacaactgaagccgagaatacaagacagtacctccctacccaaggttttctatacaaacaacaggctctatcagcaaagagaatactcgcagtccagcaatcgggtgagtatctcctcacagtttggcctttgatctggttctacccaacaatctgttcagtaaaggaaaataaaatggttttaatttttatatactgaacacataaaatgagagtaatttaagcaccaactccatttaaagttaaattatccatctctaacctgaaatcagcctgcctagtggaccttcaggaatctccagcctggacccctcattagcaacagcataaactacctgtagaacggtagatcatgctcaattcaccactcaacaattcgaatatagttcttgaagaataagaaaagtaatgtgttataatcaaaataattgaatggacagtatatactgctggcatataccctttctggtggtacaccttcccacggtctgctcagagtacagagttcccacattatgacccctagactgaatatatcacatttttcactgaagggttcatttcgaattagttcaggtgccatccattctggagttcctgcagacgaggagtccttaatgggactctcagtcattattcttgatagcccaaaatcacagatcttgactgtccaatgcttattcacaagacaatttgcactttttaggtcccgatgaactatcttcattcggtgtatgcacatcaaccccctgttcagaagatattagtcagcacacggtagcattccttgtcaattagaaaatgaatgaaagagaaaaagctcataaattagcaagttcattttaagtagtcggtaaacaacagatgatatcaattatcatctgaactagacgtagcatcgcctgcacccgactaatttcatgcaatacaagaagattcaaaaaaaactaataacttccaatgatatgtctaggaacaataattactaaaaaagggaagaggaaaaaaagagtacacaaagagagaaaataaataaaataaaaggtaccaaaggttcaaggaaacgaggcaattacatgcatgaaattgtaaagttaaaaaaagtacagcagatttaaaagaaacacagcccagattcttggaccgttcaaaacctacaaactatatacccaacgtgggaggaaaaaaaaagtaggacgctggacagacctgcaaatgtctcgcaacatttttaaccttctacgccagctaagcttcttcttttgaccactagagtgaataagataatacaaggatcctgtctccatgtactcagtaaccattgacagacgtggaggcttcgtacacgcacccagaaataagataactgcagataccaacaccctccatcacaaattgttgaaaacaatgtgaactagatcaactaggtatgctacatccaacaatttaaataacatatagagattaaaaacttgaaaaatagagccgtcaggtaagtaccatttggatgtcgaagtcggcttgataaccacacataccaacataaagagcaggatgttagaaacaagatagtaaacaaaatataccaaagaacataacatataagataaaaattaagaacgctataagaataagtgtgctcagtgaatacctaagaatggatatctcattgcagaaatcttccatgttttcggcagttaaatcttgctctaagaaaaccttaattgctacatctgttccattccaaatgccgcggaagacttctccaaagaaacctagatgtgaaaaatatacaaacatcaacaaaatgaaaagacttgaccttgagtaactcctttatatgaaaaggagaaaacaaagtatgttgccccaagatggatgaactgtttttgtcatgtcattgtatataatgtttgggtacatatttaggatgtacatatcatt

SEQ ID NO: 68079 - DNA, 853 bp, Cannabis sativa
ttgaagcaaaagtatgggttattctagttgactaaagcctttgatgagtaggcctagtcttattagggttatgtagctaagtccttttcccaactctatgaatacatattgtctcatcataattatatatttttgataattaaataaataaaactatcttttgatttagaaacttagagagaaagactgttcatagtattgcactatcaaattattataatttttataaatcaatcaagtacgtatatatatttaattattatttaattattactgtgttctaaatgtaaattagtattatattattattaatttttttttaaaatttataactttattttactggaagcgttttaagttcattatctcaataacatagtaagtataatattgaaactaaataaataaaaaatttctcatatttaactaatgttatttgcataacatcgaaaattgtttatatatatatatatataaatatttaatttcatttaaaaaatttgtcaacaacaattagcactatactattctcaacaatctaatggagtaatttaaatgatgtttgattggaggtaataaaatagaatgaaatagaaaggaaacatttttcattccattattttatttagttgcattttaaattattagaatatgacattccaatagaatactttttccactattttgctagaatgactattccattttaaaaaagaatgaaatatcattctaatataacaagagagaaaatttaatttttttattgattttttgtattcattttaaaatttattgcattccattcctattcctattactattcccattgctatttctattcctatattttcat

SEQ ID NO: 68080 - DNA, 1117 bp, Cannabis sativa
ggcaaatatcgcctccaccccttcttgagcacctagataaaacgtccgtagccttcacctgcgatctggtcgagataaaaatggtgttgcacttaaggttttggagaaggtgtatgttcgctgcttatctcccagtcttcaaagcttgagttggaaagaccgtcatttgatgaggatgggctggcataaagacgatgatgatcctcgtacaaaagttgtagaaggtcctggtcgatatgatgttcgccttcccaaaactcaccagggttcatatacaaaagtaggacacaagatgagtatttggttgggatatcgaacaaaaacaaattcaatataccgactaggtccgatcgaaggattaaaaaaggggatttcgcatgatattaggtttataatccagaatttcaaaacttcgaattaagggttaattttcactaaaccatgaatgggtaagtgaaactgaatatcgtggaatcaaaattagaatgcaatcacagttaagccacatggttaagcatagtcaaaatctcatattcctaaacatagattttttataattttcctagaacaagttcaagaactatcaaattttctacagtggaaaccctagaaatcacatatttaagcataaaagatgaaagagatgaagaacttactcactgtttgaagctttcgagttgttcggatgacactgatcagcacttcctggagattcttcgaagaatttgagaggaaaagctttcttgctctaaaatcttcaataataaaaaatgctaaaagtattttattagggatttataccctatttataatctaattagtggggaagtgcaatcatttcaaaaattaaatacctcagtttccccccaaaagtaaatgttaggcattcaattacctgaagggcaactgtcaaagcgtgctattttttgggagtaattcgaggtacaagtcagtcagcattaatgagccaaatattgaagagacccttggtcagaatcacgttggatcaccaacagatgctccgaacacatgccacctgttcaactggtatccatataaagtgaagtccccatccgacttcagaagtcatgcgcagacttggggggcaaatggtatc

SEQ ID NO: 68081 - DNA, 1247 bp, Cannabis sativa
tcgatctcttagaaaactgccaactgaccaacggtgtctaaatttcaattcttgattccctttttgttaggtccaatctcaatctgagttttcagaagatgagctactttccgttgttatcatgaaggtaccattttccacctctttttgaaatgcttaattatgattgttttgtaccacatttccttttttgtgtttttttagatatacaatgtttaacattcttccttggttgccattttaacggataagcgattgcaatagaaaatttgatctggtcttaattacgattgaaattagaaacaaagaagataaattgaacattggaatgcatagaccttcaccctgtgtactgagttatttaagtggctttgttttgacagaatggtcgaaaagttgtttgtggatcacaaaccggaacactcttactgtactcttggggatattttaaggattgcaggtattcatattgaagatgtattactaatttttgtttttaaagagatcattagtgttgtaagctgtgtgtgtcctgtactcttttaatactaaataacctttctcttggtagtgatcgttttgttgatctctctccgaactcggttgatgctttgctaaaggtatgtatactactatcaaatttgtttctctccttctctcgccagctttatcgctcatagtttatgcacttctggtgttgtagcttgatgaagatagaattattactggatcagagaatggactcatcaagtaagggtttgttttagaatttgatttgatttctcttaattttttcttatcttatacatatacttacataatttcaatgtgtctatatcagcctggtaaacatattacccaacagaattgttcaaccaattgcagaacattcagagtaccctgttgagcgcctcggtaaatatcatctggctgacattttgtgatagcaataggtttcatattttcttttttctatgtttaattaacattgttgtggtttggttttgtagctttttcccatgatagaaagtttcttggaagtatagcacatgatccggtgatgaaggttcactttctctttctctctctttcctatagtaatgttggtgtggtgatcttgaattatgacaatatttttagctattaatctctgcatgtgcatatttttaaacagatatgggatttggaagatatattacaaggttcggaaaataatacagggagtcaagccgctgccgcagcagaca

SEQ ID NO: 68082 - DNA, 1083 bp, Cannabis sativa
tagactttttttactaaaattagacaaaattctttaaatctaacaatctcaatagtttatggagaatttttaacgactgaaaaaatttaggaaatatgatttgacacatgtgaaagttcgggaggcaaaaatcctaattaaccaaatgaattattatcactattattaaattcataataacttggatgtaatcctcaagccatcataaaattaaaaaaattatatgtatggtttgctcactttaatctagttagcacatattaactctaaatttcaatcatggtcatacttagtctaatggctgatggtatcatacctccctaattttaatatttgacattttcattcatctctttctctaaatggcttctacagtaactaaattaatcttaataacttaagtctacttatgtccagtattgtatttgtatttggtatttgctgtttcaaaagtagtttttcaatagaagaattcaaatttcttccatagcaaagtaaatgtgtataaccattctttgctgatacaagtataatatgtttaactgtaaaactaattaatatcattcaaaactataattctaaacattaagatctgtacaatattaataagattcacaaaatgaagtatatgttaatcatggccctctaaataaaggcaggcaagtatttacagaaaagtaaacaatatattcaattcccaagtttttcttcagagtgatctatctttatcaagagaggctggttgagatcagtattaggttcagctgaaatgggcaagtcttcaggtgactctaaaatgctgtcaatgtcctcattttcagccaaggctttatccagtgcagctttagctactcttgtcacacagatcatcagaaccactgcacaaaccccataaatgtttcaaattcaacactcaaaaaacagattattctctcactcttctctccccattttctgaatatcaatatatgtttctcttggttgttcaacttcagtcgataaaagagatcaataattttctcccattgattaatacaatcgttattggagattgtaactaattactattattattattttact

SEQ ID NO: 68083 - DNA, 1207 bp, Cannabis sativa
aacttacacagcttttttttttttccccaatttatgggtcatgttatgttaaaaaagaaattaatggaacagaatataattgttttcttttttttgctatataatttatctaaaatcttataatctcattatggtggaataaattccttctaagaagtgaaagaaatgtttcaaattaaacatttaaatatggaccaagatttttgatacaatataagtttagtacaagcttaaaaattatgagcacaatatcataacaaaaaaaattataaatttaggtttgacacaatacaatatttgtgagtcgtgttggaccagatgttttgacaatataagttgagtacaagcttagaaacaaggagcttgctctggaaacttcctaggggttcctccctcttcatctggtgttcatcttccagtccgtttaatccactatctttcctcattttaatccttctcttctctttctttcctgcgcatttattgttgatgccattatcatctctctttagcagtcttttttatcttttagtgttgatttgagagacaaagatgatctattaattagcattaaattttggatgctaattcctcttttctcgagttctatttattgctgcaggttataatctttggtttaaatcctctccaccatcctatcagacattaaataccagtcgatccttcttcttgtgggatttttgcagcaaaagatcctcttttccaggtgtagagctagggctaggaaggcctgatctggtttctcctaggttcgtaatgaagcctcttttatccagatatttatcttattttgtctatttaaggttaatcttttatgagctctctgcaatacctttctactctctgctatccttctttttctatattgttgtttttccctaccaacctttagccatgagtctttcctctcatccccatgaacaaagtattaacctcactgatgaggaagctttagtttatgaatttgataacattttggttcaccctgatgcttcccctcaatctttctgccttattgccaaaatcttgtcccctaaaactatcaaagctgattgggttgccaaggctatgaaggatgcttggatagttcgttgccctttctccttctctgactatcactctggtatgtttcttgtgcgttttggcaatgaaggtgataggggacgtgttatggaaggacaaccgt

SEQ ID NO: 68084 - DNA, 952 bp, Cannabis sativa
ataattaaatatatgtacattgcatataatattaactaggggttctcaaagtatagaccaacccaacccattttttttttttgtagtaatgagttatgttaagagtaagtcatggctcaatggactgaaaagtgataagtcataaaattatgagttggacacactttaactctatataacccaacccaacctattttttgagagacgtttcaaatttgagacaactttcatacataaaatatattttacattcacaaaatatatacagacatattttacgttttcataaataaattatattgtaataaccttagaaagtgaattaaccaaaacacatttgtagcacgtagttcatagttactctactacttctaccaccaagcctaatgtaagaatcaatcactattattaactttgctacccacataatgatatcactaccactttagcttttttttttaaagcattatatttacatacacacatatatttataggtctcattttttttttgtgtatgcactaggttaaataattttattattaaagcctaaaatatttatctcaacctaatgaacacaacccaactcaccccttaatttttttttttgatgaatcaagtatgtctattgctcaaaagcaatttatacaacctaatatcattctccaagcaagagaatctaaatatttataaaactttacaaggtaacaaactattctttctcacttttggttgctttttttggccatatacatgtaattctttttttcactatatttttcacttttataattacaatctctacatttgtattgaaattttaccaaaaaatattgtttcttgtgagccatatttcgtaaacaagagctgctatgacatcaactaagattgacttctttaccttgcttatttttgccctccttaaccaccttataattctttccaaggtagt

SEQ ID NO: 68085 - DNA, 1334 bp, Cannabis sativa
accttcacgagcacttgaatcgaaggtagcctgatctttgtgagtgactaaatcagaatgcacctgacttataccatcaacttgatgcaaaccagcgacaagtggatcctatccagttacaaatcattgagttggaggacaagttcaatcaggatggggaacatgggaaattacctggttatgactcggatgaagaatctgagtcgtttcctcctgatattttgaatttttgaattccctcagggattcaaaaacccacatgtatcacagtatgataggactacagattcagtcgcttatcttgaataatttgtgttgcatcttattcccgacttgcttaactagagaagcgagtatttggttcgacaaaattacccatcattcaataacatcttgggaacaactgtccaaagattttaagaaacagtttcaagctactagagacaggcaactaaagcatcatccctaactaacatatagcagcaaccagacgagtcacttaaggctttcctaaggtgctttagcatagccgctgcaaaagttagaaacttaaatgacagttttcagcttactgctctacacgaagggattacaaccgatctttcaattgttagaggcaagttgtgggatgacctacagggtcgcccagttaggaacattaatgaattcaatgagagagcgcaagtatttgtgtgcaaagaagaagcaaggggcatgatttatctcaagttttgatttaggtttttggattttgggttcaaaaggaagagctaattttttaggacattttatttataggaaatatggagttgaagtttgttaggctatttttagcctatgtctcgggtcttatagatcaacattttctcaattattgttgtcttttggagaggttttacgcttcattttccttgtttcaggttcttggggtgttagagttcaaattcagtcaatcaacgaaaagacggggcaaactggtgaaaaatcagccaaagctgcttaatgggaatcagtagtcgtgacccttttatttggtcgcgactatggtcgcaacttggcagaaactcggttttttgagttttgcctgtggtcgcgaccaggtacgaaaatgaaaattttgacctaattctgatttttttccaattagaggcacacttgtcattcgtaatataagggatacgattcagaaggccaaggcaagcagaaagtggccttaaaagtgaatgaaggaagagaggaagcaatcttgaagacccggagcgatatcaccatctggtttctttcttttaccctctatttctcttttatgtctatttttgtttcagaattaatca

SEQ ID NO: 68086 - DNA, 607 bp, Cannabis sativa
  modified_base (473)..(477): a, c, t, g, unknown or other
actcagaaggattgcccagctgccaattttccaaaccccaaagtccggtcgccggattcctcgcgcgtgtggctcacgcgccgctcgtttcttctgccacctaccgttggggtgtgtaaccggttcgttttttttgctccccttaagcctacttgcatctgtctcaggttgtagtttggtatttctccctacttcgtattatggtagagacataactagattcaaaaccactagttgttttcgatgtggttctcgtgatgtctaaaagcacgaaccataaattgattggttcactttttggaatggagtaagacaatttgactatatctaaggagtattgacaaagatgatcacttgactgatgatcctccaaaaaaaagacgattcaaagaaagtgtggctccgtgaggatgctcgcttgtttcttcaaattcgaaattctattgaccaatgaggtaactagtttgattaannnnngtgaattgattaaagaactaatggattacttggagtttttatatgctggcaaagacaacatatctcgcatatatgatgtttgcaaagccttttatcgcgcaaagaaacaagatcagcctcttatgactta

SEQ ID NO: 68087 - DNA, 1077 bp, Cannabis sativa
aataatagtaaattaataaatgaaaacaaaaatctgaaacggaggacatcgttgagccaaaccgaatcactctcagacgactgctcctgaacccctcacagaagaagacgttgatgtggaagttctcctctcatgtctttgttctgatcgcatcgtggagcaagtcagtagattctcaatcgactaacactacgcagcgtggagaaatcatcaatcttccaaaaaagcaagattagcaaaagaagaaaagtggaaaatcaaaggcactaattgataaacagagcggctagggctattgtttctaagatgaaaaaaaaaatattaaatatcttgaatctatcttaatcctaccaataaaacgcaaaattactaaaaaatgataaatttagtaacttcttaagatattaaaataagtaatttaaagtttatgacacacataagttcatgatatagtaatttactaatttataaaaaaaattgtaataaaaacttatatcattgaaaaaaaaaattgcattagagagggagattcgaacttgggacctccactttgtaaaaaaaatgtagaactactagactttgcttataaccacatatcattaaaattaggttattgttacgtgcattgcacgtatccttagttatattttttgttttgatttttaggagaattaccttatatattattttttaactttttttttttcaaatttacggtttagattgctgtgatggtttctccggtggcttctatgtgggttgttatgtgaattttagttgcgatttaggttacttcgttagttgctataggagtttttgtgtagaattccgtagaaatgcaagaaaaaaatttgttttgaagtgtaaaaataaaaaaaaatcccttattgtcgttatgtgtattttaacatttataaattaaaaagaaatcacttattaattttttaatatttcaaaaaaaaaaaattaaagttttaaaatttaaagaaaaaaaatataaaatttaagaatattaaattgaacatactcctaatattaaaaataataataaaaaaaataatatattaatattatata

SEQ ID NO: 68088 - DNA, 1835 bp, Cannabis sativa
taattaattactaagatgtatatacctaacaaaaaaaattactaagatgtatgtaaataaattttgaaagtaaccaaaatatatcttaaattatataatacaaaaatgaaattttttacgtaaaagtaattaattagttttttttatcaatactattagtaactaaaaaattatttttaaaaatataagaagataataattaaaaaaacgtcaaatttagctgacgtgacacattagtaataaaaaatatatattattgtaaatttttctaattttttggtaacccatcattggggacttcatcatcttctccaccgaaggtgttgttttgtgctttcgttgttgctcagagccgctacattggtgggtgatggcctgagtttttagggctttttgggtgctttgatggttggtgctcgaaaggttagatccaaatgcgaaggggacatttctcttttgttgctgatggatgggtatatggggctggttattggtggctttagtaaggattggggtgccttttaagttcaaatttatagtgtggttttttatttacttttatagcattttattttatttttattagtttttgggtgtgattttgctgtgataatcaaattttgtaactttagcttgtagtgccgaaatcaacccttaaagagtaattgttattagttttaaatctttattaataaaagaaaaactcataatataaatcattgcatatttttttcaaataacgaaaaacttcaagcatacgcataaaaatcttaattaattataatcatttgagccttaaccgattaaagtgtgtatttcttttagggttaattatggtaaaatctttaaaattatcactttgcttgcacttaacttttaaattttaaattttagcggcaaaactttcaaaactcgtattttgttaacaatttactattttcatccatattcgagggttaaatgtgttggaccgtcgtgtgtacacaatatattgtttatgtggacacagagtacacatgacataattttattagtacacgtaaataaatattaaaaaataaaaaaaaaattatagtaaattaatttaaaataaaattaattaattaataaaaataaaaataaatgataataattaaaaatacatttttttcaattttcttctttatttttcttcaaaaatatcatcacacccaccaccatcataccatccacaacaaccgccagcctaaagcacaaccacccaccaccaccaccacggcaccaccacctctattttagatccaaaataaataccactacctccacccccacgaccactacgatcatgacaccaccacctccaaaatcacacaaaaatatgaataaaaatgaaaccaaagttagatctaacaaaacaaactcacacatataacgaaactctcagattcaaactccaaacctaaaatctatttctaaaagagtaagaaagggaaaatcgtgactgaaagagagagattccgatgagaaacttatagcagcaaaatacggacgaaattttttgtttgggggttttgggaggtcccgagttcgatgatggtggccgaagaaggcacaatcgcatttctctaagagatcgtgagtggagaaatacagaagatgatcttcacggggaggagtagagttcaaggggtttttgtggtggagaaggagaggggcggtgggtggagagaagaccagatctagattttcgtggtggagcagaggtcaaatgagttttaaatttggtttgattttttttctgcattaccggtggttattgtgatggtggtgggtgatgggtggcagcggtggtggtg

SEQ ID NO: 68089 - DNA, 557 bp, Cannabis sativa
aaaaaaaaaaaattgaagaaataagcgttaaaatttcttccaacaaatgttgttgttggaaagcattaggctctactacaaacaatgttgaaggtacgtttactgcctgatttcaatatggtctaactaactggattagagatgaaattgagtttatctaatcaatgttgtgttggacaaataattttatatggaataatattcaaccatcaatagacaaataattttagggattgggaacttacccattcagtgactttggcgctggacgttcccaaaatagatactatcgggtcgggtgaattcaataatagacgcctattgagaggcccaatcttgagtgaaataaataccactacttttatttttttcaataacatcatcacatagtaatatttacacttttatatgttaatttggctattatataaaaaaatacatgttaaaacaaaactataaatacgtgcatattggactggtccgactcgtatattgaaaaacctataaaaatacgggtcatgatgtacataccataaaaaatacaagtcatgttgtgt

SEQ ID NO: 68090 - DNA, 826 bp, Cannabis sativa
acttgaagaagcctgaccttcgtcgacgactcggtccaaagcaaaagaattcactccatttgcaaatggacgagttggagaataagttcaaaaggcatcaagtcacgaaacctagcagacagctggggcatgatactgttggagaacttaattcagaagcctcaggatcaaagagaaaagacgattccaaaaggctacttaaggataagaaacccaacaaatatatccctctttattttgaatataccgagctcagtgaaactcgagaaaatatatacctcgcacatgtacagtaagtcgtttttagcaagctaaaaactatgaaacatgcgaggcgcaaaagggatccaactaaatggtgtgaatatcatggagatattggtcatgccacagaggagtgtcgtcagttgaaagatgagatagaaggtctcatatcacaaggacactttcaacgatatataaaggggcaggacgatgtccatgatcagctcgatctgcccaataactcgagcgacccgagattataaccctcctctgtaagaggaagggacacctcggttatctcgagagggagagagtcacaagaatataaggggcaattacttcggtgaagcaattttgtaaaagaattgcgacgtgagtaaatatcggcccactatggttgccacaccaagctgccacgtggaaagctggacgttaaccaatagcagacaaacaactaaaaaccaggattactttacctggaactccgggatatgttagggattgaccctggatattgaaacgattgtgggagtatgttagggattgaccctaaacatcaaaa

SEQ ID NO: 68091 - DNA, 905 bp, Cannabis sativa
ctatgctagttagggtgttgcattaaagtccccgaaaagtgttttaacgtgtctctcatcgaaatttcgaatactgtggtttagggccgtgtaaagcgtcaagctgtaatttcactcaggctgaccgaaacacctgaacacagaaacgaggtaagatagcataaaatatatatgtgaatgtatgcttgttattaattgaatacactactaataccaatgaaaatgtagttttaatggtgttagtacagtgtagagttttacagtagttatggtgttaccaatacgagtacataattgttactctagtgcatgtggtacaacactcgataactcccaggagtacaaattggccctaccaacacgagtacgaagtcggtactctagtgcatatggtacaatggtcggccctaccaacacgagtacagagtcagtcctctagggtgtacggtacaacagtcgtacttccattaagaacattcttaaccatttgctaagttcagttgttgggcttaggacggcttaagcataaagctggtctaacatagcttatatatatatgttatgtatatcttactgagtttgtttactcatcagtttgctaccttgtgtaggtaagggaaaagctaagctgaagtaacagtgagttggagcttggcagtgattgtacatatcgcggtagtgtagcctggagggtttcggtctttcaatattttgagttgtattatatatatgcttgtcgtttgtaaaaaacaataataatattacgagattttatattagtaactgtaattttaactatattttaaaactcgggatcctaacccataagtctatataaatataataagattaatttttggtttagcgagttttcaaatacgcgcgttacaatttggtatcagagc

SEQ ID NO: 68092 - DNA, 817 bp, Cannabis sativa
taaattaattatcactattaatatttggttgtattttctttattacattgatttaatttctcattcttttagttatttttacataaataggaattcatcctattaaaataaacaactcagaaattctcattcagtttctctttctttcttcattatattctcctttttttatatatatatattttatattactttataacacgttatcaacacgagtttatgcctaagtcccaatgtaaatattttgttaaagttcttgaattttttcaggtcacgatatactaaatatatatttatctgactgaaataatttcaagaacctttttttttttcttttttgtctatatatctatatattatatatgtatgtatatatttttatatgtttattattgaatttatatatattgtatgttcttattgtttatctacgatatgatagagaaaatctatataaattatgcatatatccaaatgactatgtatcctcgataaagtattgcatatatattgaagattatgcgtcctcaataaaatcttgcatatatcccgaaaattatacaaatataatactcatcatataactgtctgaaatataataaaagagaggaatacatattcatatatatatatattcttgtattctttgaggacaatgaaaaatcgtctaatatcgatataaattttggcaaatattttatatttgtaaaaaaaaatattatatttatgtgaatacaaccaaagaatcattaaaatgattataattgatgcaaatttatagtggactttgaatacccaaaaagaatgttaagaaaat

SEQ ID NO: 68093 - DNA, 544 bp, Cannabis sativa
  modified_base (305)..(320): a, c, t, g, unknown or other
ttctcttattaatatctatctccctaataaccatacattttaattccaacaatttatttgtacaataactcttttattacacttgaattgtgataaacaaaaagaattacaaataataacaaatttcacataatttatttactatacatttaatatatattatttttttttaataattttgcatacacttaatatatattatttatataataatattaattaacacatattaatattaaattatagaagtgtatattattgacgaatacggaactttaataaaatgcttttattattattattannnnnnnnnnnnnnnntattattattattagagtaatttatggtgaaatctctttatgtttgaatttttatacgcttaattcctttattttttttttggcaaaactcccttatgttttaatttttatacacttaaccttcttatttttttttggtggtaaattccccttaagtttacttttctttgcaaatttaaagtttgagttagatattattataccgttaaatactaactgaatta

SEQ ID NO: 68094 - DNA, 1998 bp, Cannabis sativa
tagagatgtcccactccccgttgttaaggagtaaatttacaactttcttcgaaccatcagggggatgattaataggctttggatagaagttatggccatgaataacctacagatcatcccaggtatttatttccttgccatctgatataaacttgcaatcacctttttttagaatatattaagttctcacaacattcttctaaaaccaagaatccaagttcttaaaggaaccctccaagaacggcctacccttcaggtatttggcacttaacactttacagcacaacgattgttcctcaataagaagggaccaaccccacttagccagcaatgcctgattcatttccaaagacttttgaaagcctaggccaccccaaaatttggaaagacataggtgatcccaagcctttaagtaaagaccatggttcccttgctcacaaccccactaaaagtctttggccataccatcaatcttagaagcaagtttattagaaagcttcgttgtttgcatagtgtaaattggtaaggtgagcccaaccgatttaatcaaagtagtacgtccagctttagatcgagtttttcagtttccacccatggagttttgaaacaagattgtctaaaataaagttgaaattagcatccttctgacgagacctaaataacgagagtctcaagtagttaatgttactcatcgcattattgaacccaagttcctgcatgatggctcttctcatactctcactagtgttactactgaagaaaatgaaggtttttagtttattaatctgttgtccagaccagttgcgaaacttctcaagacattgccaaaagcccctagcttcaattaaattcgctctacccacaaggatcagatcatctgcaaagaaaaggtgagagagtgtaggaccattcctactgaacttgattcccctaatagctccagtatccagggcattttcaaagatgcacgagagaatatcatcagtcgatatgaagaggtaaggagacagaggatccccctgcctaatgccgtactcagggatgatgctactaaccttgcagccattgaggcatacattaaaggaagttgttgaaacacattgccggacccaattacaaaacttataaagggccttaaagctccggagcacatgatcaataaattgccaacttaatttatcataacctttgatcaagtcaattttgatagcaaacaactcttcattccattttttgagtttatacgagtggatagtctcttgaactaaaacattattatattgaatattctatccggggacaaaagctgcttaagtaggacatatccgtcgaggaagaattggtctaattctattagcaatgatttttgaaattaccttgtagaccgccttgcaaaatgaaataggtctgaactgggatacttttttcgagttaggcaccttaggaatgagagtcacattcgtagtattaagacccctatgtatagcccccgattgaaaaaaaatccaccactgcctaaatagtgaaattttttatattcacttgttcaattaatagatagttaggaacttgatttacaatattcatatcctctctaatgttcaataagaattaatggaatatctctttcttcatttaataaaaacaacaacaaaaaattacaaaaatataattttacataattttaaatatttttataattttatgattttatttatagaaactatgatattttgatgtatttttattagtttttttgttgaatttttatttttttttatttaaatgttatttttataaaatattgtaaaaatatatataaaaaaaattaaacataaaattataaaaaaaaattacaaaaaataatactttatataaatatcctcaataaaatatataaatttttacatgaaaaatcacttttgcacaatttattacctaaatactcctacacgcctatatctacttttttacttataaagtttgttttattacaca

SEQ ID NO: 68095 - DNA, 803 bp, Cannabis sativa
ggggatagagcgtttgaagaatggaacccaccgaaacttgtagtgtccaatcctacaaaggccataagcaatgaagtacttcttggcgtacccaccaacttttgacatggctgtactattagtgtcacccaaccattggtgaccgatctgattgaagtaatagtacccagtcctattctgcttcaggtcagactttaaatcaaaatagcactcgatctcatagggagtaggatgaggctagcctagctccctatataagacaaacattgctgaaaggtacttgatgctttttggggtgagttgtgtcgaacacatctcgaagtatgcaacaatgtctaggagatgtgaatgaagcggtaacactgccccacgatcaatatgatgctctgaccatgccaaccaacccaggggaagccggtgtgcccaataatttccatgagttatctcacaatggaaacccttcactaagccactaccaagtatcttgctaaaagcctcatcagaaagggtagaggtgggagaggcccaagtgtcttcctatgatatagcatcgagtatctcaggctcaaaagactgatccaagacataatccaatccaagcactacaggctcaccaagcctgttcaatgggttgccattgacatcgtaacgacataagggatagtcagggaggacagtacaagtcatgtacctcctactcctaacttgtgttgcctcctcaagatcagactcaacagcgggactctcaaccccctggtcaatctcttgatcagcatcaacatggggctaagtaacctcctcta

SEQ ID NO: 68096 - DNA, 1245 bp, Cannabis sativa
atataacaaataattaggatatatgtaatcgtttagtgtttttttgggtgttaatttggtattacaaaatcacaccatgcatgatactatggtaattaagtaaaatataacatgtatttgttgaacctttgaaaagcatgatgatattttctttctttattattactcaaatcaatcgatgtccttatgatgatagaaataaataaaataatacatcaaaaataagaaagaacaaaaattactaaagagcacttaaatagtagaatgaaattgtttgtctcaattttcttttttcatgtctcggtaatatatgtaggactaatggacatctcgcgtgtagtgcatagaaattacatatttacattatacaagactcaaaaaaaccatttggactgtatattttgtaaagttataaagttctgaattttgcaaataacaatcaaaatagtccttgaattgaatttaatttttatcaaaataatttcaaatatatatactgtctttgctcctttggcagccttcttgatatgtattgaataaattgaattgaccttctagagttattgtctgtcctattttggggtccaattttctgtcccttgaacaaatatcatcctttagtaatttgatttttttttttttcatgaaaaacatatctaataccttgtgttttcaataatacttcattgccattacatattttcaaattatacataatttagtactctaaagtaaatttaatcaatacaattttatcaatttaaccaaacagatcttagttatatagaatcaaataattaaatttgaattgaaaattcataaaattttcgacattatcaaatatgtatgatttaattagaatgcagtatactaaataaatattattgaaaatacaagatacttacaacttgtatatcttataacttgtatttaaataaagtacagggtaccaaatgtgtgtacactcatcctttttatataaaattatcacgacttttctatattttttacccactaaaacatgtttggaaaaataaagtaaaattggaattatggactttttttttctttattctggcgacagcatagaaaaaaaaaagtttaaaagaataaaactctataggagtcatgaacattttctgtttaaagcttggtatcaccaaaacccaaaaaaatatatgtaactcttaatatagctattgaaataggtcactttagaaataggcggggtcacaaaatagtatt

SEQ ID NO: 68097 - DNA, 560 bp, Cannabis sativa
gtcgcctgcaatcaggagagagcaatcaaaatagctttagcttcagcaacttcaaggggaactattcccacaatgggaacaatcaaaccggcctttatattgtcacaatcatccctgaccactattcccagactatatttctttgcagtgttgctaataccagcatcaatattaattttctagcatccagacagaggagaggatacctgttcatcacctactgaagcacaaatatcgattttacaataaccagtgttagaagcatgctcatattcccataaataattagcggcttcatcataaagttaccaagaaggcaaaaaaaatttattatgaaggagacaattcttctaattccataaacaaggcagaataaaacaactacattatatttgtcatagagttaactttatagtttcttaatttttaattttttaaaagattaacctaaattgaatagaaataggatttggttgtcaaatttgtatagagatacacaaattttctaattaagtttaattaataatagaatgaatgattaattaatatgattttttttt

SEQ ID NO: 68098 - DNA, 761 bp, Cannabis sativa
agtcctcaaggtaaccatctttcgagtaatctagattgttggtgactttccccttccccaacacgagaggctacttcttcctctggacactcttgaggattagatagcagacattgttctttgtttctggtcaccaccatcgcaacgaaagaatttctggtgaaagctttgtacaacattcaatgaaagcaccataatgttgactaagatttttgataactatttaatcttattttgagaaaattaattatgtgtatagaatgatatttttgcgtggttcatgtgttaattaaccttagtccatgagtaacttgagtttatgggtgtaatattgttattacaatcgagtctttctttttgttacaaagttggctctgtctgaattaattgtttcttgaccccatattttatctcttacatttttcctctatttgtaggccagaatggggaagcatatcagggttacgagtgcatcgtccctttcccctaggctttccctagtcttctactaggtataggaaatgatttctagtaatggttgtatcaagtaggatctgaagtaggagtttgatgagacaagactagacatatttgcggttgatgggagagtacaacaggaaagttgtcaataagagtttatgggaaaacataatgtcagaaagtaagggttaaatctcaaaaacatcttttttttttttttatgtcctaatccattttggtgcctgcacggaaggagtaatctacagtgctttgccttggga

SEQ ID NO: 68099 - DNA, 531 bp, Cannabis sativa
agtatttgagccaagtaaagaggattaaaggaaatcgtcaaaaagacttaccccttgtgaattccttcaagactactcccatcagcagctccagagaagagtcattgtcagcaccggccaactgctcactaacctcaggaacaaactggttcatatagtgggcgagcatctccttgcctttcttgggctctagaagcactcgcaaaggtggagtagggttccgcatcagctcagaacctctcggtgggtcagacatgtccgaactccctcctcaagactccttagacttggcgacttttggagtagaggggtttgcaaccgttagctcctcagaaagatcaatgacctcctcgacatgcatcttttccttagaagaggtctcttcaccgcctctagacttcttggccggaggagatgtgctagagcttccaccaatccacttcttcagagcattaagcatcttctgcgacatgtctgcacggaacaaaaacaacatggttagaggaaacagacatcagaaacataaagcat

SEQ ID NO: 68100 - DNA, 1093 bp, Cannabis sativa
aatccccaatatcaacaatggaaatgaaatgaccaattgcttctatcttgacttcaatcctccatgtcagaaagtgttcttggatatgttcctcatttcaccaatatctactatgtttgaaaagctttagagtaacatttttccaatcaatctcaagctcaattacttcagctcaaagggtcaatgtttccatgttcagaaaggttctttatcaatttctgactatgttgacaaagtaccaagcatcaccgatgttattggagttgttggatccgccatacgcacgcaagatgtcatcctccaacttctcaatggtctaggctctgattatgattctgtggtgtctggaattatttcaataagtgatctgcttagtcttaaagaagtccaggcgctcccaatggctccaacaggtcatatcaggctcttggtctatgtacagctgctaattttcaaaatcaaaagcaaggtcgtggaactggaaaaggtttctctaactctcatttaatttgataggtctatctcaaaacaggacacattatgactatgtgtcattacaaatttaacaaaaattggattactcccaagttcgggacttttacacctcatgcctttcttgttgaggatgacactaatcaagattgtcaataatatactttcttagttcttccaaattttggtgatgactctttttggtttgcgaacactagtgctacatatcatgtcaccaacaccttgaaaaatcttgattcaacaatgcaattcactggccatgaaactcttgttgttggtgatggtaagaaactccatatctctcatattggtttaacatgtttaccatgatctactaattatcttttacatttaaaatctgttcttgaagttccttttattattaataatctagttagtgtgtccaaactaactgaagacaatgatgtctttcttgaatttcacaaacactattgttttattaaggataaggactctagacaacttctgctcaaagtgaatgttaaagatggcttatacatgcttatagatggctctaccttaaaacctaaaacaacactgcaatgtcaacttttttcta

SEQ ID NO: 68101 - DNA, 605 bp, Cannabis sativa
  modified_base (138)..(143): a, c, t, g, unknown or other
atttcttaaaattttgcaggatgtgttaaataaatataacgtacatgactatgaaaaaatttagaataaaaaattcttatggataccaaaatatttaagtttcgtttggtacaccgtattgtattgtattagtattannnnnnacaatactatatttggtattgacttttattaataaattgtgtaaagttataatatatttttcaatacatttgactccaataccagctatgggtctgagtcacgagtccaggtccgggtcccagcccgagtcccgagtcacggattcgggtctgggtcctggttcgaattcgagtccgggttcgggtctggggtctgagtccgtgtgcgggtcccgagtctgggtacgggtctcaatctgggtctcaagttcggtcccaagttcgggtctgggtctgggtcagggtccaggtccaagtcccaggtccgagtatggggtctaggttcgagtccgagtttgggtccgggtccagggtccaagttcgggtcccgggtcgaagattggtgttgaccccgaatcatttgtaaaaaatataatacaagctaatacagactatttattatgtattaaataatacaacata

SEQ ID NO: 68102 - DNA, 852 bp, Cannabis sativa
gaaaaagttaaaaaagtaggtaaattatttcatctattgtttttatataatttatatggtaatatattatttataaattaataatagcttgtcaattactatataaaaagaaaataataattagagtggaaaataaaattaagtgtgttatttttaaattttaaaaaataaatttacagtacatttcaaaaagttatttaaatatactttttatctcttataatattttaaaaaaaaattaatccaatttttttattatcatatatattataattatttaaaataatttgtaaatttttaaaataatttatattattaaaaataaaatttaaatattttgttatacaagtgattatttttttttttgacgtagaattgtactttaattttaaaactataaactacttaaaattttttaaaattttataggtgattataattatttataacgtacatgaacataaaaaaataaattaaaaactctcataaataacaaaataaattagaagtatattgaaacaccctttttgaaaagtatacatattatattcttatcctattattttaattaattaattaagtgtcttaagaatgtaattaagtagaatatccctaataaaaactcttactttatttttttaattttcacttataattttgatcatttgttgattatactgttttgaaaactcttttagatttatttgaataaatcttttatctaaaatgccaacttttattactgaaacaaatgtcatttttttttttcttcaatacttatcttttaataattagccctttaatcctgtctcagtattataaaatataacaatttaattatttttgttgtaa

SEQ ID NO: 68103 - DNA, 1446 bp, Cannabis sativa
ttgtaatctataataaactattttctgtatttcatgtacaataaataacactgtgctcgagtaattgttgaaaatgcaattgttcctattgatccacaagctgtatatcgatcacatctgccataactgctgtgtgcactctttgcttcatgttttccttgtttagtactaaccaattcctccatccatggaattcagtcggccaagcttttgaacccagccatttgaagatcagatcagctaccctttgggagaaacagcagtcgaaaaaaagatggtggtttgtttctgctgttactccacaaacctggcacataatgcaatctaaagcaatgtgaaattgcataaattgatcacgagttaacagttgggcattgacagcttgccaaagaataaaacggtgcttcgacatgtttaaggagctccaaataccctttctgaattcgaactgaacttgaggcaaccggctattatataaccaatttgtcttgaatcttcccacaacccctgcctttatgattttagtgctagcaaatttgtctctcaagtggcataatttttttcaataccaactcgaatcatttttgagttcataggaccaaatggagttattctttaagtaaatattgttgatccatttcactcaaagtaagtcacttttggatgaaatagcccaaatatatttagcaagaatagcttgattttatttaatcccatctttgaaacctaattctccataggttttgggaggcaaactttctcccaggctaccacatgtaacttgcttatgttcccattccaccctagagaaatcctgtgcaaagtttttttatttccttagtgacactatgaggaagaatgaagatgctcatctagtaaatacgcagaccaagtaaaactgagtgaataagttgagctcttcctgcaaaagaaaggtgtctactagcccaattgtgaaacctttattttattttcttaataatcactctacaatcttcagctctccatttggtgggtctcaaagaaactctcaaatattttagagggaaatttccttccaagagggccatctctctcaagattaactatttttttgcttctccaacccctccaaagtaaagctgagatttattagtattaatagcaagccctatggtagcactgaattcatctaggatttccttgagcacttgaatcgactgtatatttcctttgctaaacaacatcagatcatcaacaaaacggagatttataatttttaggctcttacacataggatggagcctattcgtagattggcaggcagccaattgcagcctccttgttaggtactccatgatcaaaacaaataagagagggaaaaggggatcaccttgtctcaaacctttcttgcctttgaaacttccttgtactcttccattcatcacaataaagtaggatgtagct

SEQ ID NO: 68104 - DNA, 967 bp, Cannabis sativa
aagaaatgagcctcctagatcgctaatcttgagttccctgagtctgaaacccaggatccgattcctccttcgttttttgcaagtaccgctgagcctttccctaaagtgactcaagcctctgcctccttgagccaagccattgaaacactacctgtcgaggccagcaagactggcccagagtttaccacagagtttggagctgcgtattggcatcagttcaaggctctccttccccatgattgggatttaaccaaccatgaggatttggagggagtgctcagaaggagtttatctcacaggctcttggtaagtttctttatccttatttgttcacttcttttattcattttctccttctttttctttttactcatacatctttgtttgtggatttccaggcttctttcatctcttttgccgcttagtggcgaggcttggaaaaggtaaaatacttggagagtgaggtccaaaaattaataggtcaacgcgaggttgtggccaagaaatggactgatgcccaattggagattactttccttaccaaagaagctgagaaggtgaagaagaatcttgaagctgacgggaaggagacaaaggacaaaaccgatgaatgcaagaaactaaaaggggaacttgaagctgacaaggtgacacttggggaaagaggctgaaacacaagagcgatgtaacgtcattggccttcgtaccatttatcaagcttggatggaaaatcgaatatggatacaagtttcttggaagagtctgaagaggaaattctgcttactgcgagaagaccaagaaggaggaggaagaagccgatgcaggagaagaagaagatccgtcaaagtctcccactaggtaggcttgttatttatttattttttattttgtttaggaaaatggccttaaggccaagactttcctcttgtggcatttttgtaaggacaaatttgcaaggttggatggc

SEQ ID NO: 68105 - DNA, 2514 bp, Cannabis sativa
gcaccgttaatggttggtggtgggctgtaatggggatggtggtgccgttaatgatgatggtgtgtctgtcattaatgtcaattcgaaggaaacaaaaaatctaaaattgattttttttccaatttataatattacttttgtaattttaaaataatttaaaaattactaaaataataaagttattaaaataattaaaattgtttgtaccaataaaaacatgccatctgtatttatgtacacagtgacaatacaagttggcgtggcatttaacattgaaatttaactgatacattgaatttgcaaacagaagctaagttaagggggttttgccaccaaaaataaaggggttaagtgtatactaattgaaacttaaaggggtttggccacaaatttctctaaaaaaaaactaacttttaaacacggaaaccagttatttagtacgactaactaagacattgaacataaaaagacacataaaaaaaccagcttcctattagaaaaacaagtttcaaaaactataaataaacaactgaaaaattaaactgatacaagacacctaaaaaaatagtttcatgcaaatacatcaataaaactatgagaagataaatgaaaagaaacgaacatacttcaaaaagaaaacaacaatgtaccaaatatgaatccttaaaacttggatcaatttactttttttttcttcttgatatgaaggaagtttcttctcagagtcatcaattgaaatctttaccaacatcttccattgtatttttactagaggaattagattccatctgaacaaaaacataaaaaataaatcgaaactagtttcatcatacaaccacaatgaatattatgaaaccaaacaaaaactagtttcgtcatacaacaacagtcaagattatgaaaacaaaacataaataatatacaatgaaaataataaaaaacaattttatcagttaactaaatagaaaaaaaatactcacaaatataataaaaaaaatacacaatgcacaacaataatgttaaaataaaatataagtgtgaaaactaatttttaacctagaaacaaaataataaaaaaaaacttaaaataaaaaatatacaataacatcataaaatggggtaaccccatcacagaacctacatgagaaactaatttcgaacttatgaaccctgtgaaaccaatttcctaaaataacaaaaaacaattaaaactcagttacatagaacaactaaccaactattaaacacatcaacaaaaaaaactattaaacacatgttacctaaagacacttaaacaataaaaataattaagacataaaaatgagttattcaataataaagaataaataaaattgagacacaaaaattaattatctaataatatatataaataatttattaaattaaattaaaaaacattatttaaaaaattaatttaaaggtctgagatataaatgtcaattgttttttcacaaagtaaaaaaccaattaaatatctaacatgaaaaaatcgattatgcaaagtaattttgaattgattagtaatgtcaacaaaaaccagttacttaaaaaaaattcatatactatacataaattcttaacaaataatttataaaattaaatttgagaaaccaattaaataactaattaaaaatcaaacaagaagaaactattttcataaaataaataaattaaaaactcataataactaattacttgaaacaatataaaagtttttatcatgtagtttcaaatcattaaaccacacttaaattgattgaattgtcataaaattatatgaagaaaataataaaagattatggtaaataagcgtattatagtaccatcttagctttgaaagaaagacaaaacacattaaaataataaatcaaaataaagcattgaaactagttttatcaaacaccataaacgtaattaatcaaaaagataacattaaatttagtttctacaaaaatacaacacaatacatgctctagttcgtcatgcttattccttaatgcgactataataattttagttgatcaatgttatctctaatatttacatatttagtaagaaccagtttttatatgctaaaaaaatacacacacacaaaatacaaaaagaaaaaaaaaaacacacacacacacacaatttctgtcactatcttcttatcctttaactctaattgtttagatttttttttattattaggtcaaacgagcttgagattcattgtagtagtatattctacattgatactgatccccaatatcgctaccctatcacatattaatattacttttcaatctcactacttcgctatacccattctcaaactcgtcaagcatatgaactgaaatactaaaagactttctaagcccacgaaacaatcaaatcatatattcgtatgggtactcagtaagatattacaaataaagatcaaattcaaagcaatcgaaaaaatattgtaagccctcgttccaatacatgatctctctctctctctctctc

SEQ ID NO: 68106 - DNA, 2301 bp, Cannabis sativa
attcattgctgcattccatttcttggagtgtttgctgttgattacttcttggtagtttctaggcacatatcgtttgattctttagctactacaagtgcataggcaatcatgtctgcttctccatatctggcagggggctttatttctctgcataggcacatatcgtttggttgtcttcctcaatgtcctaatcagtgccatcttgaacttgcaggtatgtacttgtatgttgtagtggctccacctaaatttgcaccttggactgagaactgtcacctaaaacattaggtaaaatacctttcacatttcctttaaaagggaaatcattctcattaaaaataacatctccactgatcaaaattttattagtttcaattgataacaatctatagcctttgacaccaatttggtagctaagaaaaacacatttaatggacctttttcctagcttgtcctccactgtttgtgcatatgcagcacaaccaaaagatcttaagtgcattagagaaggaggcttaccactccacaattcttcaggggttttgagatcaatagctctactaggacttctattttattaagtaacatgaagtgtacaaagcttctccccaatatttcttgggcaaaccagagtcaagtagaacacatctcaccttgtttagaagtgttattcatcctttcagtaaccccattctgttgagggtttttgacaacagttatatgccttctaatatctgtttctacacatagctcatcaaactcatcaataataaactcaagaccattaccagttcttaaagatttgacccatttatcaatttggttttcaacaaaagttttccaaattctaaacttgttaagaaaatcattttttttttgtttcaataggaaaacccatacctttcttctataatcatctataacagataagaaatattaatttccactaggtattttgaccctgcttgcaccccaaagatcagtatgtaggtattctagcaattgttttgctctaaaattgctccttgaaaatttgattttgtgttgttttccttgcacacagatctcaaaaaagggtaagtttgcatgagtatagtttaagagtaaaacttgtttagacaactccaccaatccttgctcactgatatggcccaatttggcatgccaaagcttggaatcgatcttgcctttggtgactgttgcagcttgtgcaagggtcattgtttttctatccaggaagtacaagccatgtttcttgatacctctcatgacaagtaatgaacctttagtgatcctcatagtccccttatcagttttgtactcaaacccttcatcatcaagagtgccaagagaaatcaaatctcttcagatcaggattgtgtctaacatttatgagagttttgatagtgccatcatagcttctgatggcaatggtgccaatacaaacaactttgcacttgtgatcattccccatcatgacttttccaccatcaatcttggagtagtcagtaaaccactccttttttggacttatgtggtaggtacaaccactgtcaagaatccattaatcattgtccctgtgatctgaactggtacatgcatctcctgagtttgaagcttcaccttgttccttgattattacaaaaacatcaccatctgaactatagtgatcatcaattgcaacatttgaatcattttctttctcctcttcatctttgttttgctttttcttgtccctaagttcccaacatttgaactatattgccacagtgatggcatttccttgtttcctttggtcttgatttcaatcttgtgttccccctaggccttgaattgttcttgaatttagattgatccctgaatgttgaatttcctcttcttggttgtcttcctcgaatcatcaaggcttcatcatttctgatttcttgctttgcagccttttgccaattgagttctgcatctcttgatctgagagtgctcattacatcttcaagggtgagagtgtctctgctatacattataacagttctcatttctttgaactgatctggcaaaccattcaatatgctcacaacttggtcttcctccttgattgtttctcccatgctagttaaagacaaaacaatcctgttgagatcatccaagttatgttccaatggaatagtggcattcatcttgaatccataaaaaaatcttggtattgttagaaaaattaataataaacccaagatcaattggtatataacatggaacacaataataatatataataattaggtatacgtacctgattgatccata

SEQ ID NO: 68107 - DNA, 758 bp, Cannabis sativa
aactaaattcagttactaatatttatgagagaatatctcaactacttgagaaaatatctcaacaaccttaaaatatctataatcacttttcaaattggatagtttttttttatgcaaaaattggatagttacctaattgaatcaattaaataattaattaacccaaaagacaaactatagggacagtaacatgctatagacgcctacttttgtctttaagacaatgttggtgtcttttgtcatgacatctttggtcctgaccaatattgtcttaataatttttgtcttctccatatttaatcaatttgaaatattatttatttattacaaaaataaataattttctattcaaaatagatttttccgaacatcattatacaactctttatccttacccttgacagtatttcaatgtggcgattcgaggaccatggacctataattctaagctatgacaaaatagattatttattgagtctcatcaactaaataatcatttattattaattccatgattactatactataaatatagaattgaactcttagtaattataaaattatatttaccgagtttaactgcaatgtccattgatataatcaatttcagtgatgagccctccatgtgttggttcataattagttttggtcaaattattattttaccattctaattacttctttatcctttagtaccattaattcactagtgcaagtataattcaagatatctgaatttgtggcacaacattctagtt

SEQ ID NO: 68108 - DNA, 1458 bp, Cannabis sativa
gagattgttcactcttgaagtgacttctctcagtgtgagatttgtttgtaattttcagtttcgtgattggtgatctcaaagttgtatcatttctctctttcagatttccattataatgttattaagacatatttgattcattcaacttgattaaactcatctcttgttaactttcttatttctggttttctatttgtttgttattgttgtcattgtgattgttgtccttgaatctttgttatggtaatcttgatcaggttctctaatccgcaacatatatcccaaccatcagagacatcgcccaacaatgaaactttgcttaattcacccagccgatgtggagtagatagaaaagatgttggcattgagggaatccaattatcagaataaatagcaatatcattaacattccccactcgccaaacaacccctaaatcaaaaggttctttaccccacaatatttttccaaacaaaaaatatactttttgatttccgcaaagaatttattcctgaagtatagtctctttaaaacacgattggccaacgaagaatggacattgtaaatacgagaagctatattagcaaggacagattggttaaatagacgtaagtctcagaaacccattcaactatcttccttgtgtaagctaaatttgtcccaattacaccaatgcatttttttacattattaccaccctaccaaaaacaaatacatattcgatgaacattttaaacaaatatttttggaagcttgaaaaggttcttcttagtagtatgtttaacaaacagattcatagtattcgatgaatagactcattttcaagaaacattttttacattataattatttatttattttaaaaactgaaatgtagttggaaaatatggagaaatttttcgtagtcaattttacaagtgaagggttttttttccaacaaattaattttaaaaaaaatgtgaaataaaagaaaaacaaagtcgatttctaatcttttggtgaaataaaatactgtattagttttgttgagaatcatgaggttccatctcaaacacaattggtgatgagtggagtagcccatgttcttatatatggttcaatacttttacatttaatccatgtgaaacaatgttaacatctaaaacaataagaaatgattggaaaaactttttttacacacaatttgtttcttggtttaagtttgtgtcttatgactcttatgtaaatgtgcttacttaggcacacatatatgtatctgtatgtaacatgtatagttttgtttttcaaatttattagaaagataaaaggtattttttagaccatataaaaagaataaaatgaatctaatctaaaccaagaccttactaaaaccatttcatcttttattttttaaactaatttgagatatgaaattattcaagctttgcaataaataataaatactggcaaacttctgaaca

SEQ ID NO: 68109 - DNA, 1723 bp, Cannabis sativa
  modified_base (1682)..(1691): a, c, t, g, unknown or other
ctattgcatagaaattaacattaggaaaataatattaggtcataatcaatagaaacgcaaaacagccgcttaaacaccaactgttgtccaaaatataccagcagttgcaaacaacaaatcaacagccgcatccaatacacctgatgctccccaactccacccaaaagcaaccaaatctggtcgagttgtggccaaaccgcaacaccttactgactatgtgtatcatacttcttccacatctcatcccattgagccttttctatcatctatcaaattacaacctcaatttagagctgccattttagcaacgtattctaaagtggaactacaaaattatgctgaagcatctcaattcaaacattggttactagcaatggacagtgagaccaaagctcttgagcaaaataacacatggatcataacagactaccccaggccacaaagcagttggctgcaaatgggtttacaaagtcaagtacaatgaagaaggagaagtagttcgctttaaagctcgcctagtagccaaaggctacaaccaaaggcaaggcatcgactattcccaaacttatgcacccgtagcaaaattcaacactttaaaagtgttcctcgctttggctgccatgaataactggaatgtccaccaattggacatcaataatgccttcctacatggagatctccatgaggaggtctacatgaaaatcccacctggctataaggcacctccaaacaccgtttgcaaactcaacaagagcatttatggcctcaaataggcttcccgccaatggtttgacaaatttagtcaaactcttatttcacatgctttccaacaatccctatcggataactccttgttcataaaaaataccaacaacatctttattcctgtattggtatatgttgatgacatcatcgttgctagcaacaatgacattgctactactcatttcaaacagcatttagacactcacttcaaactcaaagatacgggtacttcggttctttcttggccttgagattggccgaaagaaacaagggatatccatctcctaaagacccttcacacttcagctattcgctgacacaggatatctatgatccaaacccgtgtctactcctatggaaaccaacctaaagttgagtaaagacaaaggggatcctctcggtgatcctaccacatttcgcagcctaattggcaaacttatttacctcaccataacaagacctgacatcacatatgttttcaatcacctaagtcagtttttaacttgccctaaagtccaacatctccatgctgctcatagaattctccaatacctcaagataacacctggacaaggctttttttttccatcaaacacatctccaaaactgacagcatacgctgaaactagtctttctccatcaaatgtccaaatatctttcttttcaaatgccaattagggtggatgtcaagatacacactgctccatctcgggctattgcttgttccttggtagttctctagtttcctggaaatcaaaaaagcagcgagttgtttcccgttcttctgtagaagctgaatatcgtgccatggccaacgcaacctgcgaactaacatggctccttgctctcctcaaagactttggcatttctcattcatgtccagcagtgtttactcgtgttcttcgcacagaaactannnnnnnnnntcctcttaatagcgccttggtgagtcgtaata

SEQ ID NO: 68110 - DNA, 875 bp, Cannabis sativa
tatatatattgatatattgattgggaagatactgaaataaatgggtagtaaaagttaatgagtattgaatttattattttttcgttgtatatataaataccaatatgaatagtttttagtaaatcgaatggctaaaataattagaagattttagtattggttatgatgttggtattccaacccatctatatagataataaataagaaataattaagtcgatttagattgtgaattgtgattatattagttaattttaaataatttatattgactataaatattatttttactataaatagataaataaaataatatagttttattgtataaattataaatgtgagtcatcatcagtgggagataggagacattaataatgaattgaaattttttgatttaatcatataagatgctaaaataaatagacaataaaacttaataagtatgagttttattatatttcattgtaattaaaaataataatatgaataactatatatagtattaggaaagcattaagatatacatcactattttcttcttacatctatctatcttaataatactagtagtatattataatttatataatatacagtcaactctaatagagtcaaataatagtgtttatcatgttggtaatgtcaatcaagaaagcttagatttttctaaggttgtttttggaagatctttatcaaacaagagagtcaacttctatgaatgatataatagaaatggattaagtagtaatttcattatacatatatgatagggtttaggttcattactttttactaaaatttattttagatgatatggtcttagtaagggatagtgactttacgaaggttatgaggtagagtgttataattca

SEQ ID NO: 68111 - DNA, 732 bp, Cannabis sativa
cttttctcctcaagcctcatattctccagacacatgatttacaaccaattgcgaatcactgcagatctcaatgtgtttggccttcatctcccgggctagttttaggccggtgatcagagcttcatattcgacctcattattggatggcttgaatccaaatttgactgcagcgtgcaggtgttgcccccaggcgtgacaagggaaattcctgcaccggatagttggtctgtagccggttcgtctatatgtagcttccaggtcagcttgtcttcgctgttactcggctgaagcatttgtactagctcagggttattgtccaaaatgctttattctttacccgtacattcaactacaaaatctgccaaggcctgacccttaatcgctgtacggggttgaaagataatctcatactgacccaactctactgcccatttaagcaactgtccagaggcatccggtttttgcaatatttggcgtaatggttggttagtgcatacccaaataggatgagcctgaaagtagggtcttagctttcttgttgctaggattaggcaataagtgagcttttctatcaattgatataggcctttagcttcaatgagtcttttatagatgtaatagattgggtgttggatattgctttcttctctgatcagaacggcacttacactgtgttccgtgacagctaggtacatcccaagttcttctccttccagaggttatgagagcaca

SEQ ID NO: 68112 - DNA, 670 bp, Cannabis sativa
tcggtccatcattaccggccgaggcaataacggtcaatccatgcttaacagcatggaaagagccaattgcaataccttcttgaaaatactcgacggcagcaccgccaagagagacagaaagaacatcaactccatcggctatcgcggcctcaaaaccggcgagaatgtcagaatcaaagcacatgtctccgtcccaacataccttgtacacagccacgcgtgccttgggagacccgcccttggctgtgccgttaccattgttgaaaacatttgccccggggacaaaattgcctccggcggtggatagggtgtgggtgccgtggccgaaagtgtcgcggggagaggaaattgttttgctttgtagtggggacattgtaccgttgacaagcttgagatatgcaaggtagcctttgttaaagtatcttgctcctataagcttcctataaaaaattaaaaaataaataaattaattaaaaacaaatgtatgtaatcataaataaaaatgtgtattatagtaattaaaaaaaatgtatataagcttgaaatttcaatttatttttcaaaaatattgtattttatacattttttttaaaaaaaataatttgttttataaaaacgttatggtgtggtgtgaaatataatataataaatatagttatgatgtaacata

SEQ ID NO: 68113 - DNA, 914 bp, Cannabis sativa
  modified_base (786)..(792): a, c, t, g, unknown or other
tgccccttaaaaagttattttttagtaaaaagagctttttaataattacggagggcattttggccaaaatcctttcttggaaagcatgcctcctttgattctggtagttgtacggttacgaaaatcattatgaattgcctattcatattttgcacgattcccagccattagatatctcaatctttggctttcttgtcactgaacttcgtgtataaaaggggggctcaagcttgtcatttttcataaacctctggcttctttagtgaaatccattttcagaatggattacttcctgcttgccaaaatgtctcttctgagttcagaagtttatccttccagactcataatacccagatgcaccagccattttccatttgttcctgtagagttcaagcctcaatcggagtcggaaacgatggattctaaggctgaggagctttcgactaatccaaaccaggggagccctatagcctgccatggccgatcctcacaagtgatcccagggggtatacatcttgtgagcgatctcaaagatcttcctcagactgatgaagaattccagaggaagattggcatggttttaggtggatctgggaaggaagttggcgtggtttctatcagagaatccatccaacccaagaccgtaacatgtgccaggagatctttgcgtcaacctctctccaatgttgagaaatttcataaggatgggaaagagatctcggcttcaggaaatgagatctgatgatgaggagaatagggtctgtgtagagatcaaggctctctacnnnnnnncggtctttcttgtctatgtgtagccgatctttccccaagctatgtgtagacggtctttttctcccatcctcaacttaggagaatgacttaatggtttgcctctagtggcatttttgtaaaga

SEQ ID NO: 68114 - DNA, 1846 bp, Cannabis sativa
caaaaagttcaccacatagtatgccataaatatatccttaaacgacataggactaatccaatggtgctatgaggataacgaaaagttactgtgaataaaatcaaatttgaaaaataaattgcacagtgttttataaattataaattttaaagtattacaaattatttatttatagttataatgataataatattataatttaatttattataatacatgttgctcaggatttcttccaaaatacgtgacatctcaaggagtcatatagcaatgagatccttaatacgagacgtgctatgttaaattgtattcggagattgatgattggcagaagcttcaggagattagtcatctcctgaaggactttccaggaggatagtaactttgtctctgtctctttgcggatgaacctcgacccatagaggaaataggaaggtgtacgaagcatgacgtccaactcgaggctagggtaccgtgcatgaatttaatgcgacatggggtagaacattctactcgtcactctgaaaagatgtgcccaaggatttaaacccattattttctgatttgaacgcatcatagtaaaaaattctcttgaagcttcaaatttgtttttcaatcacaaacggagtgtgttgagcatcaaaaacttaaaatctttcaccccattatatcttgaaatctaaattccatgatatattcattatattcatctcatttaacatgtttcttctcattttaaaatttatattatgaatattaccattagacctaaaacaagtagaaaacaaacataagtttgcataaaatgaatataattacctaaaacacacgtctaaaatacttcataaaatgaacctaaaactagcttagcgatcacctgatcgttaagtgtcaagtcattatccatgtgttattttttatttgtatatttaaactaattttttaaataaaaaatataaaaatttaaggactcagactaatcagggactgccacgtggccattgactcgacacctaatgactaggtacctatggaagttctaaaaatataactttgtattattaccgtcaaaaattaaacttaggtatttatctacaactgaaagttaaacttaaatatttatctgcaatcgaaagttgaacttaagtatttatctgctattgaaatttacacttaagtatttatagtgcaaattactctttatagtttactttataagcaatatagatacgttatgaattactcattatttatgtcatagttatcaactaatctttatagacggtctagaataagttaggactaaaattactattttaccgtttaatataaaaacactccattctttgtaaataatttttcagtaaagtaataaaatttctaaattgagtattctatcatttatcgtttttaactaaactaaaatttctaaaatgatcatttcactctttaaccaagctaaaagaaaataatcattttacttcttaaacaaaaattattgatgtcaatgtctacgattaatactctttttctatagcactattgagttcgtaaaatataaatatgagctaatctataaggtaatttagtaagaaataagttagagaaataaaataatacaagcagctaaaatttaaccactcaataaaacaaattaaaattaaagtaagaaagtagaataaaaagaaaaaatagttttgagacaaaacgaaattttatatgtatttttcttaacaagaagtcttatttgcattatttggtcactagatcaagttaccgtcaagttgataaaattggctattggaggtgaaataattttttttttttatttatttaagcgtttata

SEQ ID NO: 68115 - DNA, 624 bp, Cannabis sativa
ataagtagaattttaagattgattaaacgattttttttttcgagaaattttccatattattataagtgaaagttatttacaataatagagaaaatagaataaggtatttcttttattcaagatacatcttcatctaactttagagcgtactttgtttagccatggacagtgattaaacaatatttattataagttattttcaaaccataattaattaaatgatatgcctaagatatttaaattattgaataattgattggttgtattattggtgggacacaccaccacatgaaaactgtccaagtgtctatcatgcacaagagactagagagtcagacacaaagagcagaaaagtttataattggtcaacatttttatatatacatgattttgagttatttgtacaacaaaccagcagccatggccaaagtagtgctcaattattctcttcccaatcttattccattaaccaaacatgacacaaaactctttttcaacttaaacaaaatacccacttcatcttcttcattatttaatcaaagtagtgtatcaagatccaagctttacacttccatttcatctgtttcaacaaatctcacagacccttttgaggcagagcttgaa

SEQ ID NO: 68116 - DNA, 599 bp, Cannabis sativa
attaattttggtaaaattaattatgcaaagtgtttgatgaaatgtgtgtgtgaaaatataaagttgtgtgtgatttaaatttgtgtgtgtatttttttttttttttgttaaatttttctgaaattgaataatattaaaaaattagtttatgttaattttgggaaattttatttgagagtagtgatgttttgggatttcatgcaaaaatatgtatatatgaatatgtttttttgtataaaaaatgtattttttagtttgactttatatgtgaagatgtatatgatgtgtgtgttagtatatttttaggtttatttatgtaaataatatttgtgtgtgtatatatatatgtgaatatgtatataatgtgtgagtatatatatttatatttgtgtatatgttaatataatataaatatatttatatataaatataaatttgtgtgtgtataaatataattaaataagataagtttacatatatttgtgtatataaatatatgttcatttgcttactatttttttttgtgaaattagttcctattttactgcattggatcgttgctgcccagtaaagtctctataattgtaacaccctaacta

SEQ ID NO: 68117 - DNA, 2430 bp, Cannabis sativa
ttatgttttttttttatactattcattctaaatgctaacaaaatatttctttcaccaaaaaaaaaaagaaagaaggaaagaccaaaaatggagtatggagaagaagagttggtggcctgctgtggaagcaccagattcgcccaacaattggcaaaggcatctcctttctcttctcttcagcaagcaatcgccgccgcacgagatatctggttcaacaaggtcgatgtccatggttggctccaagctttctctgctcatcctcagatcggacaatctccttctccttcagctcattccactagtgctcagttgagtttatctcaaaatccacatctgggttctttctttcttgtcgtttttttccattttctaattaattgatctgagaaaaagaaaaatgattgtggttttgttttgtaggtggagtaagggagagcaatccactgctttagctactgccactacctctagtttacaggtttgtaaattaaattattatgcttttcaattcaaattatggattttggtcataggaattattctatgtggatcaaagggtgtcaaaagtctatcccagctcagtgtaaacctatgatccttttgtgaccataatggtcgtttatggtcgcattgtgtaattcatggtcgtttttgtgaccatacaagattattttgctaataaaacttttcataatgactgttttaaagcctagccgagctctacattgctcatgtgtgtgattagtaatgtttatattacattcagtagctaccaagctttaatccggtaatagattttggtaatttggtaatttacaggtttataaattagtatgcttttcaattcaaattttggattttggtcataggaattattctatgtggatcgatcccagctcaggtggagtggaatttgccaaattagcgatctgaaatactaaaatttacaaaataatctcgcgtaaattactctatgcgaccatgatgattgcacagtgtaaatttatggtcgtacagtgtaattcatggtcgtttctgtgaccatttattttgctaataaattctttcataatgactgctttttgcaactcttgtgagtgtataagggtgtcaaaagcctaaccgaacactacattgctcatgtgtgagtgatttgtgaggtttatattacatttagtagctaccaagctttatattacagtctcttcattgcttgattcttgttcctttggagtttacaggaactttatgaatggaatgctcgctatagggagaagtttggatttgtttttcttatatgtgcttctggaaggagcactgatgaaatacttgctgaattgaaggtgctttttttttttcgtttttaatatgattgtacatttgtttttgtgattttgtggtacaaatagataattcagaaaattttgtaaaaaatttacagttattttttaggtaaaattagaagactgtaatctgtataggtttgttctagaaaaaaatgtagaggcaatggagaatgtattgcttctattaattggtgaggagggttatgctagaatttgcaaaaataaatgaagattctgagattttctttttcttttatatttttttcgtagaaacgttacccgaacaggcctatagttgagtttgagattgcagctgaagagcagatgaagataacagaactgcgacttgcgaagctcttttcaactaaagaaaatgtttcttcaacagggggtgatcagtttcatcaaactgcctcaatgaaagcagaaggtaacactccttttgaattttgattatagaagaagatcaaaatgtaaaccgatttttcgtttataagaaacaaaactactggatttgagcttctttcaattatatatggcataccaagtgaagctgttcactgtaaaattcatgttgaagtttaacaagcttgtgtccctatcaatgtctgattgaaaaaaagttcaaattttcggtactagtcagaactcttaaatattcacaggccggccctgagaatatataggcctaaggccatttaaattttaggtttcaggacttgaacccacaccattgtgtaatgtgtcatacacctcaaccagtcaagctgtcaatatttgttgcttagaatgtacataattttacttgaataaaagtctaatgagacctttaattttttattttgggccccaaaagatatgaccctacgcacagacttaacttggctatggctagagccagtcctgaatacacattagagaagaaaaaatagaatggagtgatttaaataatcactgaatactttcttagcttcttaataattccaatctttgtgagaggtaattaagtgtcttattcctataaaacagtgaacttttgctgattatcccagtctcctcctgttgagaattctattaatttatc

SEQ ID NO: 68118 - DNA, 515 bp, Cannabis sativa
aatttattaaaaaaatatgtaatattatatttttctgtctaggccccaataatctaagatctgagttttatatatgtcatgtttaagacaataacaaagtctgacgaaattacaaaaaaattacaattttacaaatattgaatatttataccactaaaaataataaatattaagtttatgtcacctactaattaaaagttaaaatttatatgccactatttacggaaatacatattttccttttaaatgttatgatattattatctacacacatacatacatataaaataaacaaaaatttaataaaatatttaaagtaatgaatagtattttttttttcacatataacaaaaaatactatttattgctttagaagaagaaaaaaaaagcacaacttaaaatgtgtaattattagtataattaaatattaaattatacacaatttaatttaataattattataaaatatcaatagctaactacttactaagtattacttatacctaatataaatt

SEQ ID NO: 68119 - DNA, 946 bp, Cannabis sativa
  modified_base (765)..(767): a, c, t, g, unknown or other
acagatatgggtctatattgctacaaagtaatatcgtttggtcttaaaaatgcaggagcgacataccaaaggctggtaaacaaaatgtttaaagaccagatcggccaaaacatggaagtgtatgtggatgacatgttcgtcaaatgcaggaaggctagggggcacatagacgacctggacgaatgcttcaaagtcctcaggaaatacaacatgaaactaaatcccttaaagttctcctttggagtcagctcgggaaagtttctaggcttcattgtcaacgcccgaggaattgaagccaatccaaagaagattcaagccctcctggatatgaagtcgccaacaaaaaccaaggaagtgcaaagtttgactggtcggatcgccacgctcggaatatttatttcaaaatcaacagacaagtgtgtcccattcttcaacatcctgccaggaaacaagcaattcaagtggacggaggaatgtgaaaaagcttttcaggagctaaaaaagtaactcacgaagccgcccatactctcgaaacctctggacagagaagaactttgaatatacttagctttcacggagcacgctgtgagtgccgtgctgatcacagaagagaacaacatacaacaccgagtctattacatcagtaaaagacttattgaggccgaaggccgatacccattgatagagaaactcgcttactgcctgattctagcaacaaggaagttaaagccctattttcaagctcatcctgttcgggtatacacnnnccaaccattacgccaaatattgcataaggcagacgcctctggacgactactcaagtgggtagtggaactaggacagtacgaaattaccttccaaccctgaacaacaatcaaagactaggccttagcagactttatggtacaaacacctcagccaagtaacagtgaagacaagccgactt

SEQ ID NO: 68120 - DNA, 782 bp, Cannabis sativa
ataaaatcttactaattaatcaaaaagtatcacatttagacggtgcttattgagcaataatgatgcctaaatgctttcgttgatgtttaaaaaaattatcaatagtgatagtataaatatacgattattgttattgagcaccaataatacttaatatatttagatatgtttttttgtaattaagtgtaacgatactttttaaaaattataattacattaaattatatataatttaataattaattagactgataataatattaatagataagaaaatgcgtgtatacatatttatgtgtatgtatggtcaaaagttttggtgaatataacaatataaatctataatacgtacgttattaattgaggaccaaacctattgttcttcacataaacactactaagacctactgtcattgttttcgtcgacagatattgaccgatttggtatagcatgggttttatcattccaaacaatttacacaatttcatttctccgagccctaattttgtctttatacctattaattaatatatatattaattaaaatttataaatgattatattaatgaaaaaggtaatgagatccatatatgctgtaacagtccagttgcaatagaaaattaatggaaacctacttttgttaaatatacatatataaaaaaaaattaaactgaaattaaactcatctcgccatattaatatcatggaaagttcaaagtagctagtaatcctagctaggtagctcccagtggaaaagaaattatattataataataataat

SEQ ID NO: 68121 - DNA, 893 bp, Cannabis sativa
aaccttaacttcccatcctccaattcctttccacatacgactaaaaattgttgtgaacaatgattccttaatctctctcttggcaatcagtcttcctaccagtgattgttcaacgaacgatgatgcagcctcctcattctcctcccaatcctcctcactactaacatccattttacttgtcattgacacaatgtcatccaccgtctcactcaaattcccccccacccccacaacctccagttgccatacataccaggaaaacaaaaagatcgatcattttgcagttcagaaactatagcgcagagcagggtccctcagaccatttaactattgaaattttgattttccagagattttctttaataacgttttccttttaccacttaaaaaaaaaaactttctttttatttagatttttaagttaagttgtttatttataataactgaaaattgttgtcttaaatattagattagaacacgtgtcgtaatttggacatacatccggtgtcttagaaattattatctcagccgtatatgagatttattttcttaatagacttaatagattttttttaaaataatatttgtttttatttttgccaaagaaaataatatttgttgttacacacgttttttttattcttgaaagacaagcattttttttaattagttgttagtgtccgaaatgaaatcagttgaatcaaaagaaaaaaaaaagaagaaatcagtcgaataaaaaaaaatgaaatcaagtggaatcaatgtggtcccagaagcaatgatgagaatataattgtaattctgaatattctttttttctgtaattcctacttttatatgcacgtggcaatatggttatttttctattagtgtgtgtgtttttttttattatt

SEQ ID NO: 68122 - DNA, 704 bp, Cannabis sativa
gttcaatttcaccagacaaaggtgaaacgaacactgctgaaggagaacccctacatcttttgagtgtttgcctcaagtttggtccatccgaaagccttttgctgaagcgatttggtgataagttttctttcccagttcgctgagttgcatatggtgtgacaataagcattggtatgtgactatgagagtatggtaatggagtgtgaatttggaatgtgcttgctgctggaaatgtagggccttgtgggggatatgtagcataagtgttaggagctttatttatgacagcaaaaggtgtaaacaccccagataagtcagtaaccagttcactttgtgatgaccgtggcatggaaagatttgtagcactaggcagtgggagatttgtgttagttttaacattggaaacggttgctggtgtgagagttgttactggtgcgagtgttgctgctggtgtagaggttagtgccgctgggagagacattcctagaccactaccagcaccaatatgttgcattccaatgactatgttgcgttgagttaaaacttcagcaggaactgagatcggtgatgtagtaacaacaggagataaatcagttgcaatagaggattctcctataattagtggagttggatgaggaagttcacggttcttaagactaggaatggccgagataaaagagtttttggccaaacgagtgagtaat

SEQ ID NO: 68123 - DNA, 1552 bp, Cannabis sativa
gcaatggcacagtttcaattgtagttgtttggacatgtgagtgtaaaggtgagtcaaaagtgtgttcggctgggacagtcggtaggttggcagtaggtaatggattatttaatgtattagggaatgagtttggtaaagtggtagcattggtagtagtgtctatgctagaaataggaatagtttgggtaatagtggtgaggttgtcatttaggggggtaggacgagggtgttgaccgtggggtagtaggtgggggaagtactgtagcatgtggtccttgtgttgatgtattgtcttgtccctcagtagtcgaagtaggatgagtgatgggagagtggataacaccagcattagtagatgaattattgtattagtctgaaaactaaaatttggagattggtttaaagacaatacctgattggagggcacacttggtgagggtgacatggcagggaaatgtccctcattgaaaatgacatttcgtgagatgtagaccttgccatttgggtgttcacacaaataacctttgtggtgagaagaataacccaaaaatatgcactcctcagatctcaattcaagcttatggttgttgtatggcctcaaatgaggaaaacagctacacccaaacacttttaaaatattgtaatctggcttagtgccaaagagacactcataaggactcatattaccaataactggtgttggaagtctatttattgtgaacacagcacaagacatagcaaaccaccaataatccatgctcaaaccagcttgagctaataatgtgaggtcagtttcagtgatgtgtctatgtttgcgttccgcacggccattttgttcacttgttctaggacaaggatgttgaaaatgaatcccttggtcagataaaaaacgagcaaatggtctatattcacccccccagtcagcttggacacttttaatgggcaagttaaattgtttttccacaagacttttaaattttatgaatacatcaaaaagcatggtttttttgagttaatggaaaaatccaacagtacctactataatcatcaagaaaatgaacatagtatttgaaaccatctttggacacaacatgggagggaccccataaatcagtatgaatgagagctagaggttggttggccctattaggagacaaagaaaatggcaatttatgactttttccttgatggcaagcattgcaaaaatgtaatgcctttaaagaacctgtatgagatatatgaggtaaaagttttgccaatgtagaatcggcagggtgccccaattttaagtgccaactatttacatcattaaactttgagacagaaaaagcttgtggagaaacagcaaacccatcttgggtagttttattaatatcttgagtattacaagaatcagtttgtacattagagtgacaagaacaagaacatgaacaacaagatttatctaccctagaacttgtggtaagatgacattggatggcagaagtagatgactccccaagctggtataaaccatctttggccctccctttaagaagaacagtccctgtta

SEQ ID NO: 68124 - DNA, 3422 bp, Cannabis sativa
acaatatataatgtcatttctctttatattatttagtaagaaagtaatatatatacatataatatatatatcctattttagcttttttttttacttaattaatttccttcgttttcaggatcatattattcgtgggaagaagcgtattcccttatacaggtcacattctctttatccgattttaaatttttaattacatttatcaattagttaaataaaaaatgacatttaaatatcattaattagtacacattcaaaaatttatcattcctgacaaataataataaaattattattattattattcattcatccatctcacaaaataagttaaattgtgcagtagagttgtggaagccaagtctcccatggccattgttattccttgtagtggctctaatattggtgcagaattgcgtgatggcgatatttcttgggattactttctagaaagagcaaaagagtttaagtaagttaatttattttacttctttttgttacatcaatttcaattgtttaattcgtagaaattaatgtggaatatataaacagtagaggtgaatatacatacatatctatacatatatgaacatttggatccattggagtttgaactaaaacaaatgtgaatggtagtggaaaataagtatcacgtttcttattaatcaaggggttttaatcaagttgggcattattaatttaggagttattttggggcttaactaaattcatcttatttttttatcttattaatttattttttttaattaaaagtaacacaggcaaattagttctatgctgacaaaaagaattatatgattatttaagtattatatctagaatattattaaaaaaaagaaaaaaaaagtattatctccaaaataataagcatatatgtgggactaatatcttcttgagtggtacctgcagaaattgtgaatttactgctagagaacaaccagttgatgcctatacaaacatcctcttctcatctggaacaacaggtaattgaagccaccgccatgttttgaatttattaaaagaacatttggaagtaactgatattacatatttgtatgtagacttaatgatcaacaatttaggcattatatatcctctgtttaagacaataagagagtctatactgataaaattaaagaaaaattacagttttacaaatattgggtaccgctaaaaataaacattgaatttatgtcgcttacaaacgtaaaactttgagtacttatgccgctattcatccttaaacaaaacatgtctacaactaaacttttaagagcgcaaactaaaaggtaattcagtaaataatgatgcttggtatgaaaaagaacacattctcaaaatcaaagaccgttaaaaaatctcacgagcccccttaatatccttaattagttttgttcatcaatctaaacacttttgatggaagacaatattgttttggtataggggagccaaaggcaattccatggacccaagcaactcctttaaaagcagctgcagatgggtggagccatttggacattaggaaaggtgatgtcattgtttggcccactaatcttggttggatgatgggtccttggctggtctatgcttcactccttaatggggcttctattgccttgtataatggatcaccacttgtttctggcttcgccaaatttgtgcaggtaaactaaacttccattaactaataaactttttagttatgttatttatgtgttttgtgcttttctatatataagttatatttgtaaatgtctaattcatcatagaagggtgaaaacagaaagtacaccaataatcacatcatttttattattattattttttaaaataaaaaacatgataagtttggtatttagctaaaacattttgactacaattttattttccctttattttctctttattttaatgtttttataatatgtgtgtaggatgctaaagtaacaatgctaggtgtggtccctagtattgttcgatcatggaaaagtaccaattgtgttagtggctatgattggtccaccatccggtaaagaattataatatattttccaataattcttatgtatgcacataacatcagtctagattatattaaacgtattatatggatagttaaaataagttttatatcccttcttgtagttgcttttcctcttctggtgaagcatctaatgtagatgaatacctatggttgatggggagagcaaactacaagcctgttatcgaaatgtgtggtggcacagaaattggtggtgcattttctgctggctctttcttacaagctcaatcattatcttcatttagttcacaatgtatgggttgcactttatacatacttgacaacaatggttatccaatggtaattaataaactataaaatataatataaaaatattggataagacttttcaaataagatttgatggatcaatttaaattcacaattcttgtattaatcccatataaaattatgttacatttgacttgtttgttgtattatatatatactttatgacatgcagcctaaaaacaaaccaggaattggtgaattagcgcttggtccagtcatgtttggagcatcgaagactctgttgaatggtaatcaccatgatgtttattttaagggaatgcctacattgaatggagaggttttaaggaggcatggggacatttttgagcttacatctaatggttattatcatgcacatggtcgtgcagatgatacaatgaatattggaggcatcaaggtatgaaatgaattatgtgtgctattaattagttagcttagcctgcccaacaataatttattttttatttattttaaatttactattttgatcatatattttttttataattcttaattaggttttagataatgacacatattcttagttcatagacaaagtaggaaattatcctggttcagaacctaagttcgatgtaaacttagtcctacttcagcttagaatacgatctcagatttctttattaattagcaacaaatcgagtacatcacagtcgagtaaggattctcaatcttgggttcaaacaagtttttcactttcacactctcatccgagcatacaaatttgtacgtcaatgtagctcattacaaaaatcgaatccccaaactctttcacagtattctctctttatctgatcttcttgcactctctttctctagattcgtgcttctgtcgtgatctaaaaagtattcactaaataatgaaaaagacttgccttatgtaggcaactgagtaagtagctaaattaagaaaggtcagctaaatcgatattggataataacaaatgtaactaaatctgctatatctcttgttacttttggtaatttgataggattataactgtacatatatatttccaactatagattt

SEQ ID NO: 68125 - DNA, 772 bp, Cannabis sativa
gcccctagacttcttggccagaggggataagcctgggcttcctcccactctattcctcaaaggtttgagcatcttttgagacatgtctgcacgaaataaaggcaacatggttagagaaaagcactagaagtatgaaagcataataatcaatgaagttaaaggcaagatggagtatcttgctcttcgaaagaagtgtttgcccgagcaagacctaatggctcatcatcacctgactagtctcttatctcctccgagacgactttccctttcctattataggagtggctggccgagcaggcagactgggctccctgatctgaattgcatgttcaacaggcttgtgcttggttagaagtttcttcttcctcttgagtggagtcacctgctcctcctcaacctcgtcttcctgctcaaaatgctcctgagcgtactgcttggcccctgcacctcccttcaacttagcctcacgcttgagttgaatgagttcattgtcctaatgaactccctcagcttggccagcactggatttcctctttttctccttcacaggctaaggaatgaaatcctttgggtagagcccgtactccaaaaagctgtcctctaaggtcaacaaagtgatatttcgggcagcaccccgcagttgagcaagcctttgagcaccatccctgatagcaagtgtgaagggtgggcggttatatatagggatctgctggaaccgagtgtaggtggtgcccatgcaatccaccaagtaatactcctcaacaaaatgccc

SEQ ID NO: 68126 - DNA, 652 bp, Cannabis sativa
gtgcaacctacctaaataaagaaagaaaaagtaacccgtcccatgggttcaacctcgttcttcataatctctacactaaaataaagatttatgcgcttgcgaattgataaatgtaaaacgtaccattttttgtcactataatttactcagcttcaataatcacaaagtactttagacctaatttatggtttgattgccaccaaaaatgttttaagatccacaatttcactaatcaacaatgttctttgtgactttactggtcaaaaggcacacattggtcttgatcatcgttgatctcaccgagaagatgtatattatcatcaccttaactaaatacaagatatttcaaacctaatcaattgtttgatcgacaccagcgatcttccaagatcatcaatcgcactgatatatagattttttactagaaagcgttcatcaaaatttcttactttaatatattgcagactgttttattcatagctagtgatcttaattctctcgtttgaaaaatgtgttgtacacctccctaaagggttgtttcgatagacacccctatttattttgacatttaggagagcttttttgtgtatttttcatgtcatgtatggtgtagctatttaggatcacctataaatttttagaaaattctgaa

SEQ ID NO: 68127 - DNA, 835 bp, Cannabis sativa
tttttttactttgtttattcatgctctgatctgtgaatcacattccaatcatgacttcaccgcaaaaccaaccggtgaatgtggatctattcgatgcgtattttcattgagctgatttagaccgcgatggccgaattagtggccaagaagctgtccctttcttccagggctctggtttgcccaaacatgttcttgctcaggtaatattattgttaaattttgtatgcgtatttgtgtatcttagtatgtttgtgtgtttctgtatgtattcttgtgtagttagagttagatattgtagaattgaattgagatggagttgtgttatagtgatatagatcggagtgtctgaattattagtctatttatagttttaagtgatgagattatcttgatctggtactctggtctaggctgaatatgattcaattatttcgtggtgtgttttcaagtaaattatagttcgattttgtgcttatttgatcctatttttatgctgtaattaatctcctacaatgtataacactggggttggacaataatcattataagttcatttaatttgtttttgaatttggtgagatttattataagaaagattttctatagtttagctctagtatttatagttatcgtttttgccagatatgcattcctcttctcattttctttttgctactgctactatagtttagggcttcaaactcaaagccccataattcattttctcttcttctcattttctttctttttttgctactgttactatagtttgtattaatgtgcttataaaataaatttgattatattttacacaaaaaaaaaaaaaaatcggttt

SEQ ID NO: 68128 - DNA, 681 bp, Cannabis sativa
gtacctttgaaacgaagaatgaagctgagacgaagtaccaacgatgaaggtttttgggctatgtttaagtatgaattccttcccacattttgctttatttgtggattgcttggacactctgagaacttctgtccaaaacgttttgatactcctgtagatcaactcgttaaaccatatggtgtgtggatgagggcacagcctcgtcgtcgacacaatctcatcagaagtcagtggttgcgtgatggtgaagatgatgatacagctcataccggagggacatccagcagtgtgaatggacagcaacgaatcaattatgttcctatgatcaaggaaccaatcgcagggaatccagacgcatcaattcaaaaccaagtcaaccttggtaaatcaaaaggtgttatggggaatgaggaaatcatggagactttaatggggaataattccaaaaatggtggagtgtatcaaggagatgtttttaatgaggagatggaagataatgtcatagttgaccctaaaaggcgctgtacgagaccaatgcaatctaccaaaacaattgaagtgggccactctgaagttaattttgcaagtgtaaatggacctacaagtgaaactatggaagaggatgatagtggggtcattgttcagaaagccaattttgaattgggttcaaaaaacgattta

SEQ ID NO: 68129 - DNA, 522 bp, Cannabis sativa
atataacaccaattaattattataagcatttgaatgtacatatatgcatcatggtttttaaattcaattagcttgcttctaattaatgataatattaaagataataaattaacttaattaatataaagcaatgagaactgagaactaattaattatccctttcaaaagttttacaaaataaaaaattatttgcttaataaaatatcttcattattagtattattgttgattattttatcccacttacttaccgaatacgttgattattgttgttagtaagtctattgataattgatatgtatagagaatttgcaacataaatacacaatttgttaatatctaaaatttaaaaataatagtgaaaatacttaagtttttaactttcaaaattctattagtactcacttaaacagctctccgtgtcaattttttttattagtcaatcaaggtaactgtataatgccaccatttttcatgatcgagcaacgtttgattatgatatagtcgttcgagattctcaag

SEQ ID NO: 68130 - DNA, 12329 bp, Cannabis sativa
caaaagtagtcatatattacctatagtataacatttaggtttagggatataattttaggattttttaagcatagaaaatcaaatttcccatttgaattgtggttgtacttgttaacacataattttgttaacaataaatgaagtcttgtaaataaaaattagatatttatagttattaaatatatttgaattcacgaagaatttttacgtcattttgtaattaaaaatctacatactccacgagttaattttatttttgattatgctatttttttttttttttttttgtatttatgggtacaagatagtatttttaggtatttcttatacttatacttaatctctcaaagttctttctcctaaaactcctcccgtacaccataggttccatccttatttatagggcttttaaaaatgacaattactctattttgatcttatctaagtaatcgttcatgacacgtggataaatcttacgttttatatttagaacaggtggataaataacataattattgataaccattttctgtccttagaaagtagtttctttaccgagataacatattcgaaatatgactcatgttcttcaatagtgttcgggaacaactagtcgtaatccgcgagacgctagttaagatgtttgttctcgcttttgccatttatgacaattctcgaaatagcctttaagaactcattatctaccccttctaacaatatcactttgggtcatgtacgcttttgagttatcctggctaactttgagatgatcacagactgttgtcgtctcgccaaactgtgcatttttattgtcatcatatgttggtattattgtaacacagtgcaagatagatatctctgttaattgtaacctatcttgagataagataatcgttgtatttatgaatctcctttaatttttgatatagagactaatatccacgtaacatgttcatatttatagcttgaaagagcacaacaattgcccctcaaaaagctctatctagaattggaagagttttttaaacaatctttggtgggacaattcggtgtttctccaattagtaatgtgcatttctttggcggttttatttttcccaagaaaagttaatcaattattaattaaacgtcctttcaactgacgggcttttttacatgtctttttagtatttcttggaaagatcccccactcgtttgatctgatttagaactagatcaacagttccttatcttttgatataagaaaggtttttaccatcgtcttcctcattacctcatttgaaatacaaaatcaaataaaaaactcatttttacttaaaaaaaacttttgcatgcccagcttgtctttaacatatttccttcgtgtaatcaacatcatttttttccaaaccttcttctcgttatattccagatccttggtactagagacttctagtaagtaatcatcaacatcttcataaaaatcaagaatttggtaagactttgatttttactcttttatctttttccttgttactttttattgatttttgttatgtttatgcgttatttttgttcagaattgaaaaagtagttattgttttagtaatccctttctttgaattacttcccaaaatgtctgaattcctatgatattttcttttctatgaaaacaatgtttatacctgattcgaaattttcaagtccaaagtttttaggataggaaaacccaaaactgtcagccttacctttcaaaccgcgagttaaacatccaaaaataatattaaaaataaatgacaaaaaaattaggttgttcaataaaaaacttgaccgagaagaggcctctgctcgctttaaacattttatagactaagttgttgatgggaaacgtcatttcttgtgagatgcggtttggccaaagtcctctagtttaacaaagtatcctttggaaagacctttatttttacccgaggttaccgtagctttttccccgggtaaactaaactttggcatcatgtctccaaaagagcgcaagtctaaattacctcagaaccctttagtccaattcgaagctcagttgaatgaatctagagttaggtcatttgctccgtatgtgggtttgttcttaagatcctgcagtatcaagaatgaggaagaatttcaaattcgcttagtcacaccaggcgaattcagttgttttcctccaactcctttgtcaaatcatgaaaactgcaacactagtggttcttcgaggataggtgcttggagtatcgagcatattaagacaagggttgtacttcctctcaagcaatacttcaaggatttctgtaattatattagaatcgtaccttttgaactcgtcccaaatacatacaagatcctaacctgtttgaagtcgctttaccaaaaactgagggacaaagtgtagtgttagaaatctccttagtgtaccaaagaagggccatatgatagtcaagcaagcccatcagttccaaattcaatgttcttaaactcaataagacactcaaacgaattcatcaggccttgaaatatacaaagagcaaacccataggccatgcaacagttcgcgttgcagtcaagtctaaatctaaccaatcaactaaacgagcaaaaccaagtaaacttgaaactaaccagcaaaacagtaaatattctcacgatactaggggagcaactaacttgaacaagtcaaggggtcgtgtgaatagtgggcaaaagttgtgaaaaagtcacgataaaaagggaaccaaacaatgtaaacatcattgaatattcaacacttaattacttgctctcactcaagcagagagtcatccgttttgaacttattccttaaactccaccactatacttgatccattcgtccacccgtccacttatccatctggctactatttatgttctatttcattttttttttaaaagcaacgttcattcattcataatatattagacctcgcggtcattacagcaaatgttcttaggaatagtagtaatgtcaatacaaccataaatcatataaattatgggtaaaggcccaattggacacattatgggccataaagttagaggatctagccaaaaaacaaaataagcaagaaacaaaagaagaagcgaatcttttacaaattaaagagtagttctatttcatttgttttttttttggaaagaactttagttcaattaaggcaaaaagcaaaaagtactaacataagcatggagtccctctaattaacaccccaccagtgccctcatttgaattctggcctcttcctttatttaatatttttgatgtagttttcattagacaaattttttaatgtaataaaaattccattacataattatcatcccaatgtaatcccgttagatcacttctaaaaacaaacattatattggtaataatgattatattacattccacaaacaaaacttgaaagtgccaataatttgaggaaagaaattacagtgtgtcgacttagttttatgataaaatatgtacaattatttaaaaattatatagagtaaacaattatctttgtaataaacaagtttgaatataatagcaaggccccctaaaagaaactggacaattcaaaattaacaactttgctaccttcaaattattcatctccagtccaattgtattaaaaatatgttttgaatttttttgtttaccaaaactagtgagatatagtatgatgttaaactgatttacaggaacaataaacaaataatgcaattaatatttcttaattaactacataaaaaagtttaaagtgtgattttgttgctataaattgttgttatgtttatttctcacttatgttaaaacacttaataggtgaaatgttttgttgtgtgggttgaaatgaaataattcttacacaatgagaaagagaagagagggtcttatgttgaaaactcttccatcaatgcattaatggcagacattatctgctccatttgcccattatagaaatgaatattaagggtccatcaaaacatgaaactatggacccggctaagctatcaccaaaaaaaaatacatatgcatatactaagccgcatgactgactgactgaccgactgccttgctacttttacaggttaaaattacaacactggtaagaacaagcttcccctactacaaataatgatgatacagaagaacaaaagtatctaaccgatgattatgattatgccgtgtctaacccaaaatcatgggtgcaagtaactacatgatgtacctttcttgcagaatccactttcgaagaatttacaaactcgttgccctttgggggaaggcctgaactgagatcctccgtagccgctgccaccataaaatggttgcctgtgcaaggaatgcctattcctatgaacacctgaatccctactgtgataaccccgatctctcggactagttaatctctctccaccgccatgtctaggatagcttcccaaagtctctccaccgccaccatgtctagaatagcttcccaaagtctctccaccaccatgtctaggatagcttcccaaaaggctcgccggaggtgtaaccaaattcatgtttgtgtttacctgtggtggtgttggctgactagtacgccaatccataagaccatttccttgttctaatcctccttcccagccccccattcctgcatttgcaggaactgctccccagttgttggtgctttcggatcgtgcattccaagggacatctgtcatagccacatcccaacctgctgttgatggtgcatgtggttgaatatctgggtttgcttcaaattggtttactgaaacatcactgtgcttcgcatccccttccatatcagcactcaccgaaggatgccctttagacctctttccacgatcgattacacctgcattacctctaacatgtgattcatctgtcacattagattgaggagttaagtgtacgtcagctgtggagctcaaagcatcaccctttccaggctcaggtgctgggctaaattcctcaacagaactgagacaatcagttttagaaccctctctaaactcacctccatggtttatcatattatgggaagacaaacgatgtagagtctccatagcttcaacttcggctagtaaatctgaaacggattcatcaggtagagaactgaattcatcaggatcaggaactaaatcatgccaactagatgcattagattgaggatgagaggatgaagaatgtgtaagttgatcactaattgaagctggagtggcagcatgatcattggcaatgtcggcattggctggcctaagagaagatgcagagacaagactggagtcccattcctcaacagcaggtttggctggattagaggaatatccaaaacagtcaccagctgctttacgtagctgtgcgccaccactaactagactagaagcagggctccagctaacacctgcaccctgaatgggagcaattgaaggagactgagtcttttcagcaacctgaccttctgggctctcatgacttggcttttgggtggaagtgggctgatttggcatttcctcctggtcttcgtcaaatagtccaagtgatttgaccacagactcaagttcagctttgggatcccagccatttgaaggactagttacaggaggtctccagttctgaccagaagattgacctgattgaccttcaccctcagataggttttcacagccctggttatttctagtttgacaatccggagtcatattttcattgctctgaccagagtttctttcagttccatgttcttcactgttatgatgcaacaagttttgattcccaggcaaaacagaagtgggtaacgaactactcacttgggcctgaggccaaataggattagccttaaatgactcccagccctctgggaaaattccactatgttcctcgctggaattgaccgcaagagtagcacagctagacaaatgagagcccaatccatcactacctacagcttcattgttaccctcacgaagccgactcaggtcatcctgctcaagatttctgctctcctcgactctttcaccatctgctgcagtagcattcatcatcatgctcttgttttgcctgtcatccacatcattacctctatcatcagaagaacccttgacttcctcctgtggcaaatggctattgcatggtaataactgctctttacagtactgcccagtcaatgcatcaatcaaaagtattgagttttcttgtttttcattcgccctccatatcctcaactcctgaggaaacattccacttgcactccattttcgcaaatgtagcatagagaacggaccttgaaccttcccagttgggtcccggtaatgccatatcttctctatctcataatcattaacagattgatttgtccctgtggaaagacccagtgtcaaaacttccaatgcatcagaaaataattcggaccccaacactgcttgattactccaatcaatacctgtatcagtaggatcaaccttgttattcaaggtatacgaaccatttagatcaattatttctacattattcttgctttgctcaagagaggcggttgaatgatttagtgcactgcttccaccgttaatcaagacatcccttccttgtccagaagaaataggatccttttcctttgtatcgaagccagatcttttggttttgaatttatcatctgtatatgattcagtaagactatcatcagagaagtataacattccataagaatgattaaagtgaaaaagagttgagagaataacaaatgtatattctatgttatacaagagctcatttaattcctcaccattgtcatcaaactcacaggttgaatcaatcttcaggtcagagttcactacaggaacctcttccagtctgcgcttacgttcctctggtgaattcagaagctgtaatttctccacgcattctctcagagtgaaatacagtcaaggaatattcatatacttcaattcagtagagtactcaataacagggtaaaaggtaaaaaataatgcgactgtcactttccactgcatactgcaagtattttatcccatgcaaagcttggcttataagaaaatatcaaatacaaaagaaaaatcaaataacaaagattagtactatagagaacaaaggatattcttttcggtgtcccttttcactagctcggtcacgaagattagtaagccgcaatatctctgcctctagcccctagatcagacaatgtgaccatgcataagaataagaaattaaaatattgcacaccacacgtgtttgtttgtttaattatttttgtcagccaaaccatggacatgaataaacattttttacttatgtaacttacatgatttgatttcactgcatgaaggtccattgctttttcttggatctcactctggtacatgttaaaatgtaagtcatataggaggtaaaaaaaatatctcacaaagagcatggaagtggaacatcttaggcacacttacaactgtaaatcgcttgttgagcccaaattcaatactctgacgcaaacgttcacattcatcctgcagaatggctaacacattaataatcaaacaatagaatgatatgctctaaattcttgtatctcatcagccataaccgtgcaatgcctatgtatccatgatattttgcaaagacaacaacgaaaaagttttcttatgtttgatatccttcactgcttcttggatttctaaacaaggaaccagaatatatagagcctaaacaaagtgcactaaagcatagtacagtctcaatgtaaataggcacttcctatcaaaaccacttttttccctggctggaaaatggctatctctacttgagtaaactatgtggaatgcatactttctgtcattattgtgtccacaatgaacaaaaacataaccatgtgacaacaatatttgcatttagattatgatggagagtggagactgaagatgacaaacaaaaataaaaactttatcgtaaattactagtcaatagagaactataaattcataaacaaatgtgaaatggcattaagttataaataacctgagagaactcctgatttgaaattgcatcaattgatacaagctccttcttatccaaatttatgatttcaagcatgacatcagttgccttcgtgccaatgttgtaagattttgtactcttagtggttcctgcaagtgtggatatgcaatgctgtaaggtttatcataagaacaaacaccacccacccaaaaatatacttaaatatatatacacacacatatatatgtgccaagtaataaaatctatacctactactcggacaagcctatgcacatctggcttttgatcattactaggaagtcttattcgcacaattgacccaacaaccttctcgtggaatttttcagcatcatcaactagattctccaacaaatttcgacgtaagtaaattaagttaatgttgtgcatatcaactgctgcatatgcatctagtttagttggcaatcctatgtcattaatcctactgtgtgtcttggtgttcttatcactattcattgtaatttgactatgacagttctgatctgactccatctggctaccaacagaatcaacaatttccttcataatagcattggtcacaggacagtcttcttttatgagaaaatgatattcaagaagctttagcatttcaaagtgaccaacacgcgctttaccaaacatgttcaaaagccttgaatcacaaacaatttgacatttttgacgaggatcacgaagcttgtttctctttatatactcgagcagtaaagtttggacatcaaactgggacatcaaagaagtatcaccatttctcatatgagcaacaaactccaggagctccttcgaggcccagtttggttctgcttgaataggctttgctatatcactgccagattcgtcaacaggcaaacgattctcatgtgcaacattaagatcattttcgaattttcttcttttagcattagaggctacaaggtctgcacaagagttgcctgaagcaaaagttttatcatcatttccacaataattttcgaaggaagaaatcctattagaaatcacaagtggaggagctttccatgggtttttagccttcaagagctcatctatattcaatgataatttatcttttaaaagaacccagtagactttgaaaagatactcccagctacttttatcatcaaaatccacttgaggctgcagaaagcaaaccaaaaagaaaagaaaaacatgataatcgtgtctcctcaaagctccacacataattgaatatttcttagtcttaaaaataaggactaggcaagaggacagcagcaagtgagcatacactactcaagagtataaaacccaaggcagagaagtcgtaatgtactatatagataatgatacattcttatattaatggaaatccttgcaaatgcaaacattatgagagcttttaacttcacaaataaacaagaaaccagataattctgagagaaaggctagagattttagtcaacataccgattccttatttacattcaacttttcaatcagcatgatagttctcatgcacgtttgacaaaatcctttgtttcctcgaacacaaacataatcggcgtctttaatacatcccttacacaaagaatacgtacaagtataacacatataatgtgaagctttctggcaagtgctacatatatgccaacctgaagaagataagaaattggaataaggaaagtgataaaatcacattgttcaaataatgaactgatgatttgatataatacgtacaagcatttatttaagaagtgacttgaaaaagaaaaagataaaaaggcagttgaaagaattacaaaacaacttctgcaagattttacttgactacccaatttgttaacataaatgtattgcaactaaaattgtcttcattgtattagcagtgtcagaattgcaggtctcttaatatgcttaaatacttctctaaaatatgttaaaaaaaacaaacaatacaactacattcaacataccacaattccatttagctcttgatcgaaaaaatgcatcatccctcttgatgcacgccgggtgatatgccttggggcagcccctaataaagtaacaattcacaataaacgcataaaaaataagcaccaaattttttaatggagagcaagtgtaatactttataccaaggtctcttttaatagccaataaatcataaaaatgaaagcacaacacggttttcattacgtgtaacctcaaaaacaaaactaactatgaatatccaaattttaagcttaaccacacacacacacacaaaaaaaaaacgccttctagtttccaaatctcaaataatcataataaaccacaattgagattaatatgatttttaagttactctgctcctcaccaaaattcagccccgcccatataagaaattatcggtttttatctatatatgattatgtgaaaagcttcagctttacaagttttagtctttcttcctcaattgccaggacaaaaacctaattcttaaatcaaagacaacaatcccttaccggcgatcacaaagcacaagactcccaccatcgaagcaaataaaacaaacatcctcctcatctttcttcttcctcaccggagccgccgccttgacctgtcctctaggcggccgacctctcttccgcttctccaccaatttcacttcattcaaaccacctttacccaaacccaaaccatcagttccagcagaaacagcgacgatcgtattcgaagctccaactaactgagaatcatccaagtccccaatcgtttcgcattgatcaacgttcataagcttcaactcaagctccctaaccgactggtcaaacctcgctccaccacctccctcatctccaagcgatggcttataaaagctcgaagcttgcgcttctcgctcttccataacctcacaaaaatcgaaccgattccactttttctttcccctttaatcgaattcgaaaaaaaaaaaaaatcaaaccaaaaagagtaaaaccccccaaacacaacaacaaaaaaccaaaattagaaagaaaataaaaaaaccctagctatggaaatgaccgattgcgatgagctggcggtggctttgtggttgagcacgcgttaatagacgcggcggggtcgcgacttcgcattgccacgtcggtcagttgtttcgtttggtttctgagaaaatgatggaaagagagagaaagtagagagaaagaagtaagaagaagaagaagtactacgacaccgaaagacggtcacttaggattggctgaaaaaaatggtgtttttatttttttggttttataattttaataaaattaaataaatttaaaatagaagcgtcaaacgcggaccctgtgactttttacgagtctctccctcctcttccgattctctaatctcgagcaccacgtggtttagtgggtgtcgagaaaggaaggtgatcggaatgtggggcccactttagcaaagaaagaaagaaagacaatttttttgaaaattaaatgaatttattgattttttaaaaaaaaaaattatgatgtgttcaacgctaaaaacatgattaaactatgaataatattgggtatcaatgaggcaccactatgtgactgtggccttttagaaatacagatatttttataaataccaaaaaaagtcaaaaaaaaataataataaataaagtgtaacgatattttaaatatttttgtcattaatttataaagtttggttgtttattaaaaatacagaatagttatgttttcatgttattttataattctaatttcttatttttttattatttgtgtattatatttttatatatatatattttttaataggataatgtaaaattgtaaataaaataaaaaaaataaaaaaaaattgtaaaatataaaaaataaaaaaattatttgacagtaaaaatgttataattttgttaaaaaatattattttgcataaatttttttaattaacaatatgagcatgccagcataaattttatcattttttttttatctaatattaataaaattgtaattttttgctaatttagtcaatttagaattcgttttgaatttattaaaaataatcaatatatttttccatctagactcaatgatttagaatataattcttacttgtgtattaatcaagacactaacaaagattatattgataaaattagggaaatttacatggtatactaactttagtcatttttttacaaaaatactgtcaggcggaatttttaacttttttactgtgttttttcataagtttcata

SEQ ID NO: 68131 - DNA, 1230 bp, Cannabis sativa
aaaccagaacccagacacatacccaaacctagacccacactcgggaaccaaaactgaaactcgaactagaactcgactgggatcttgaaacgggaccaggacctggacccggacctgaacctcccctcggagctaaatcagaacccaaacccagacttggacccaaactcaacctgaacccgtaccccatgacttgaaactagaactgaaaccataagcagatcgggacccaggaacaggaccagactaggacctagacccagacacaaaactgtaactggactaggacctggacccggactcagacccaaacccaccttgggatgggaccaaaacctaaattaggactaaagactcgaacccaaacctgaactctgacacgaacatggaacaagactcgggacccaaaattgggatcgagactcagaactgcaccctagtctcagtcccagacctaaaccgagacccagaccgggacgaacatgaaccgaaaaaaattggggctcgtgattgggatccagaacttgtgcgaggatctgggaaccgggccttggacaagacccatagtcgctgtcttgatctaggactcaaacaaggacctaaagctggaccaagaactggacctagaaccaaaacttgaaccagcacgtgaccagcaccctggaacagcactgggaccgtgacaagaacctgcacctggatcgatacccagaactagaccataaccaatcttcgaaactcgagcttgtatctagtccagaatctggtcccaaacctagactagcactaagaatcgaacccaaacccaaacccaaactcgagactcgatcccaaacccagactaagcccctgactgagattgggattcaaacctgcacatggacaggaacctaaatcgagattcgactaccgacccttacccaaaccaggatcaaaacacaggacttggacacacagacccagacccaaacctgggatccgaactcagacctggaccaagctcgagatctaaaaaacccatacctagactcagactaagactcggaccccaaccccaacctggacccagaccgtgacgaggaaccaaacccagacctggaatcagaactataactgtgactaggacccagacttgagacaagaaccgaacccaaaccataacccaaactcggaccaggacctggactaagattttgactaggattgggatttgagacctgggacctgagc

SEQ ID NO: 68132 - DNA, 9270 bp, Cannabis sativa
gaatatgcaaaagaaagatacaacaggagaaacatagagaatcaggcaccagaccaaaacacaaaatcataagaatgacttatttacaataattttttaaaaaataaataaataaataaatcacaacaaacaaaacaaaatagaggaaaaagcatataattgtggctgaggggaataagaaccatactatttttttgcattaaaaatgactgcataataaccaacaagaaaagtgtctttgatgatgtagattctttaaaatcctcagtaatcaaagcaatatactgttcaggatgcattaagaatctttctgccaaaaaagtaattgtgtccatattcattgaagaaatgcttcctggttgcagcacctgcattttgaatttccacaaacaaaaatagtttaatatctatcatcaccaaaaaaatgctaagcaatcaaaaaataaaaatatttcaaactaggctccccacctaaccctacaatatttggggatcatgaaaccatagcaatttccatgtaggtacccaaaagggactcaaatgtcagatcttgttggcgcaaaccacatgcctgaccatttgagctacccttcttgggtgctaagcaatcataattgaatcttaaatatatatacaaataagaaatgaaaaaccagcaaattacaagagataaataggaaagttctacttcaaataaattaaacaaattcctacataccaattctgtactggagacgctaggaagattctcaaaaagtggccaattcaaattcttggctgtttccagcgctttcaggtttaacctctgagtctggattcagtaataatacacttaaaacgtaaacagagaaataaaagcaaagaccagttcctggttcaaaaatgtaaaagtaaaagaagtacaccaaagaaagtataggcaaaaaaaaaggacaaccttcggcagaactaagagtataggacagatcatggcagcaagtgtattcatatgatccttgtgatcacgagaaataaagtctaatttcttcaggcaacatagagcaacatcacaagccagattggtgttctctgatgaaccttcaagcagaaatggaggaattagatgaggttattcccaatttgatagatatctataccaataatcggcaggagaatgcataaaaaacacacccactagaaaaaacaaaagttggctaatgattttcatgccaaactgccgaagcaattattacataacaaactcacttgaattaagaatacgaatgcaccgcttaagcacgttattcagtacttttaaaagctcagttgtatttaacatatcatttattccatcaagagaaacagcagccctcacaacagtaagatcctcatcatgcagctgttgcaatatagcatcttgaaccgatgaaaagccctgctccagaagagatagagaaattattagtaaaaagaaacatacaaacataaaatttaaaccacaagctaatcaactaagaagtgcagagaaaatacagatacaataattacttaattttacagcacttgcagaaaaggtgagagaaagaagttactagtatcaaacacaatgctgccaaactgaaaaaggcaccactaaatgattgtttaaaacttactaaagatagttaacctcctatgtatagtaagagtgattggttgaaacctaacggcgatacaaacagtccacagaatgtaaaaaggaacaaatacaatcaaagaacaaattaacttcactaaatacaacctgtgggtcagtagccttggctgtcaagacactagttgcatttaaaccagatagcacagcccgccgcacatcagcctaaaacataaacgcaagtcaatagaaagaaaattatagaatgcccccaagggatgtgcaacaactgaaacagagttatatacaagaaattattgaaaaatcacattaccttgggatgatgcagtgcaaaccaaagttttgaatgagaaagtgtggcttgtgacaaatccaaattatcatccaagaacttacacaaaatatcatactttgaaacccccttcttggactgaacctttttttcctgtcaaaagacatgaaatataaaataaaagtatataaaaaaacgaggggaaaagaaagacgagaatgaatacatactttaaggaatttgcgaagcgcttcttgtacttctgatggataattcttattaagaacaaataaaaatttcttcaccatgcttcctatttatcaggaaagatagtagcagcaataagaaccctattgcaaaaataagcaagggcaaaatgatatgaaagcagagagactgtaaaaactatttcaaaagttggggtttatatatacacatcatatacttatatgaaattccccagccagattcaaactgcttaaatggaccaaagttcaaaactggagtcttcctcctaatgtacctgacaaggatgatgttgaaagggtatctttttctgacgctttcaagcaatgagataggaccttagtgaccagacggttaacaaaaccctttataggaagtacctccaagatcgagatcaatacatgatgagatgattcattagaaaaactgcgaacaaaaagaatataagtttatactaaagaaagaagatacaattacaagtaatgctctaagacaacaatcttcctcctcacctgtagtcaatattgagctcattaaacagagtatccaaaaacacggacaggaatttgtcaatattgaactcattaaacagttccaaaagaatcccagcgaaatcccttcagattataatacaaaacacaataagaaatttgaaaatacagataaagaagcaatatataaccatgtggaactgttcaagtatgtctaggcaatcagcattaccggatttccatcagaatctccaaagccttttttgggaccatattaatagattgcaactgaaaatttccgtgtcaacattagtagaagaagatcaaaattaatagtcacaacatatatatacacaagacaataaccacaagcaagtacatgcagtaacatttataatccaattaaggataaaaagggtgttgggcatctataccacacctatccttcaccagtcaccacaactaagatctttactacaaagacaaagtaaactgtacagcaaaaaggcccaccttccacactgattcctcaaatatgatacttaaaaaggaaaattataaacaattgtgtggcccacataaccagaaatataaatttccagttttataagttcttatcttacactgttctaattttccctcaatcagtcatttgccataataaacagaatttcttgttatcttctgctgacgttagtttctctttttttttctttatctaagcattgctccactaaattgcatgaacaattcatacacaatacacacaagtgatccctttcatcttataacataaatgagcttgaaacattattaaaagaagaattttcacagcaaatatcaatgaacttaaacattatttatgctaactaatcaatgcatcaaatttagattcaacaacaatctccagattttctattagaaacaagacttgtattaatgcttggaaaaagaaaccgcaatgaataaaacaaaataattacagaaaaatactccaatcccttataagagaagaaaaaacatctttaaaaataatttacacttcacaacaacaaatactgtcagcaatgagatggtacaaatgtgcatgtgcatcttttggaaataagaccatacctgaataaggttgatcatagtcattagtgccaacctaagccactgaagatcagttgactcttttgcatcatcttgagcaatttcagcaatagaccgaatcaaagtgttgacaagattgggagacaatgcaacttttctagccagtaaaccaatgatcatcatagcaccagcctatacacaaacaaatcatatacttagcaaacacgattaaataaacagaatcctcgttcaagaatgagttatggcttcaaagtttgaaacatgtaagaaaagtcaaattcacattcagcaccctatgcaaacaaacactgacgcattaatatgcaatgacttaagggttagtttggttgggggaatggaatgaaacaattttgattcctttttctttcctttatagtttgtttggttacaatctaaagcattagaatgtcatttcaatggaatagctttcccattcttttgggggaacggctattcatcccaaacaagaggagaaaggccatttcaacgtacaataatattttaactagttaaattttattccattttccattgttattctaattccactcacacaacaatgtttctattactcccaagtcccaaccaaacatatgcttaattaatacaacaagagaactcatgtcaaagatggggggaagcaattatatggaatttaaaggtagcaaaaaatataataaaatggaattcatatgtggggagaaatgaaaaaattacgatccatacagaatacactacatatgtaatcctctggaacattactcgcaaagaaggaacatgaacaaatgtaaagcagttcattatttattatcaagacacatattagtggtagcaacacatataaatgcttctagactattataccaaacatctatgtaaagcttctctactaagtctcttaaaagcttgtgagccaaaattagaagttataaatacgaatatgttttactagacatgacacaacaggggacaataaaaataccatcctaacaaaaagtgtatctaaacctgaccttgtgatctgaaccaccttttgcatcaggctgaagtcctgaacgagcaaatggaagaattttgttgacgaaatcattctcaggagatgcaacggaacccaaagcctcaatgacaacagctgtgcaaaaactgatcactggtctagagggctgaagcttctttgacggtgttgcctgtggcaaaaggaatcagtaataatggcaccaaaacaagatgtagaatcaacaatcaaatggagaaaatactcacataatggcatatagcttccaagacccccttatcacgtatacattgctgcactatattttttctaggtggtggtgcaccagaatgttttacactgtccagaaatttccatttactatttctgcaacatcagttatttaaaataaaatatatatatcagacttcttaaaattagcatacaacaatttgaaagcaaaaaaacacattaaaaaacagcctgctaaccctgtgtcaatcaactctactattcgaacaaaggcatgggtatcatggtatggtaaagaacacaaaatcagttcctcaaaattgtaaacatgaatcctgaaataaaaacaaaggccaattaaaaaacagaaaaaaaaaaaactcaattcaaagaaaaagaagaggaagagaagaaaaaaaaacacccagtaaggatatatcatgcaagcttacttgtatcttcttatcaagtactcgagagtcttgattgatgattgatgttggaaatgtactgatattaagcgcaagtacgaactaattgtttcattaatgcgattattttcctctattcccaacaactctctatccatttccctacttttatggctaaaaagatcattcctgtagttcctaaatcgctcatcaatgcttataagaacatcaagacctgaaaagtaatccatacatccattattttcaataaacaaaaatatactaaaataaattccttgaggcagaatttcatcttagaaagttggcgttaagcccacatacaaaaaccgagaagagaccaaaataaagagacccggtaaagtaaataaatttgaatatacaaccaaattttggttcttcgtataataaaacttcatttaacagctttttagttatcaatttctgtcattagctttctcgggaaacaaacggaaaaagaaagcaagagctgaccttgaagtgcgatagagagaatggtttcaacatcaatgtcagcggcttgttcggatttgaagataatagaaggacgagtgaaaggcctcttctgctgcgggtcggagtcaacttgtacgaaggatttaatggcctgtaactgagaggcgatggacgtagccatggctctgtttcctctctaaagcagaacccagtcaagaattaatggagctttcgattgtgctggatgggttgcttcagtatcctcagagtagggaaacggtaaagagccgactttgagaaggctttagggtttatttcatcatcgagggttttagagtttttctttctttttcattttttaatattaatattttttttctttaacataggtcctcaataatagcacattagtctttatttttacactaatttaggcgaaaatacttaagtttaatttttacattttttaatcaaattctttcgcgctcttcttgctttcgagtcggaaacacccccaccccaactctatcttccttatcagtgaatcaaaaatagttcataggtacttttcaatgcaacaggactgagacgacgctcgatcaaattagaaatttcataaaagaagaaaaatcatagcattcaaaaaaaaaaaaaacttctgattgcaaattaatacctaagtaaaacttttagcggtaaaaatacattttgttaggattatggaacttccattggtatcttgttgttaagtgtctatatgtcactctgtgattggtctagatcgtttaatttttaatttgtatttaaaaaatagtttaaaatcaaaatatttaaaattcatattttaattaagggatactagcggtaatattatccaaactacagttacacttaacctcacaaactcaatttttggtggtaaaaccctttgaaccttacttttattttgctcattacactttcgtccaaaaacttcagttaagtgccacaatggactgcccatgtatacatgtggcaaatttttagtggtctacttgatattaattattaaaaaataattttaaatatttaaaaattttaaaaatcagaaaaaaaaaatataattttaaaaaataattaatttttttacttttactttcttttttttctttttcttctttctttctttctccttctttctttttcttatgaaaccctaatctctctctttctctctccctcagagctttctctctatctccttctctgtcagctgcatgcagctctaaccctagctctgatgagccaccatcatcgagatcgacgaacaccaagggcggacccacattgtagcgagacgggacagtcacccctcctgaaaaaaaaaatctagaaaaaatgtatatatattttagttagttacaatatatatttgtaataaaagattatatttatagacataatagtaggcttggtataatggttaaggtaagttacatatatgttagaagttaaaagttcaaatttcactaacaacactttattttttctttttaagtttacttttgccactgctttacaaaaaaaaaaaataataaataacgcccctcctcactttaaattctgggtccgccactccccacccaatacccaaaaaccccaagacccaaaacccctaccccaattctctctctatttctcgacatgtctccctctctcttcctcgttgttctcgatacggcttcgatgagccaccatcgtcgacaaagggttcgaaccatctcttcatgtctctcatagaccctcttttttgtctcttctctcttttcgtggtggacctcgccagagtcgaagctccacagctccaattgagccatcttcgagtcccaatgagctaatcgatgggtctaaatctgatcaatgggtagattgagaagaccggattttagaggagattgttcctcttgttggctttgttcgaaccatcattcactctagaaagtaatttttctattctttcaattcttttgctcttcgtgtgtttttgttttttgttttaggtttgattgattacatttcgtattagagcatatataagattggtgataaactcagtgatgagcatgagaatgtaattcttgaaaagttgcttccttttcatccagcttatgaaatcaagattggttgtgttcaatccattatggtaacatttttagaaaagatttttcacctgaaaccttttattattgtgtttttgtacatgggattttacttatttgttgattttgattttattttaattttgtagtttgggtttcattcgaagttttaagataataaagtgtttatttgttgtagttagtggatttctcatattggaaatgtataaagggttgattagaaagaagtaccctttgtttgatcagaaagaaagaagaaaaaagataaaaataaaaaaaaaaaaattatatttttttctgctttttaaaagttttaaatatttaaattatttttttaagactactaaaaatttgacacgtgtacacgtgggcagttcactgtgacacttaactgaaatttttggacagaggtgcaatgagcaaaacaaaagtgaggttcagatggttttaccaccaaaaattagcattgtggagttaagtgtaactaagtatatagtttgggtaatattaccgctaatatccctttaattaaattaagataaaaaaatcattaattaaagtcctaaaactaaaactttaactaaaaattaaaacaaaaataaagatctggaatatcatttcatttcttcttcatcatcctcttattcatcttgctaaaaaatacctaaagtttctaacataatccttctcaaccactattcgtcatgcctcaattggcagtatcagagagtcaatttagacaattcagttcagaagtcatcgaccacaacagtgtatgatagacaaaataaaaataacttaattataagtgcatttttattaagtaacttgatttaatttttaatattttatttaattattttttattctcataaaacggtgattgcgggcagggtcggccctgggcattagggctgagcatcggtcggtttggtcgatttttttttatataaaaatctgaaattcgattttcggtctggattggtgcaatctgaaaatcgaccgaccaatcaaaacctatcttaataccgaccgttttgaaccttgatttggtcggtttaaactgcccaaactgaactttttttaaaaaaataatctaatttattctataaatatattattttatattttacaactaca

SEQ ID NO: 68133 - DNA, 1394 bp, Cannabis sativa
tatttgggcgagctttgtgtcaccgtatttgtacgcgagtttgcctgtgtttcggtgtgatatgaatgttgctcgttcttggaatgatgtatagattgtgaagagatagggattctctccaacatcagtatccttactcacggctatttcacgcttttgaggggccttaataaaaaaaatataaagttaaattattattttttttaaaaaaaaaaaaaagaaaattaatatcaatgtttaatataaatacattatctaaaattaaatatttatattcacatatctaaatactttaatataaaggaaagcacaatttgacaataataaatgttcaagggccaaaatatgatagtgattgattatactttgggggtaaacttatactaattatttaataaaaatctagtgaagtttcaaaaaaatcacatatttcactaatgttaaaagttaatgaaaatatttaacattactagtaatttaggggacacgatcttattagtgaaaaaaatctaaggttaattgccctatttattctttataataatattttgaacttactcatcaatcaataacactcttaccgttccttttccaatcaaataatgaatagttgtctcaacttttttcatgtcaacacgaccagataagtaaagatacttattgagaagatcaccatgcctattctcctcagcactccaaccccttgcccatatggcccaaggtgtctcatccacacccgtacgatcgtggaagaaatcgatgccattgattcgcgcgtggtacgatggcaatgcttcttctgtgatcatattcccaaccaacacaacaaagtagtcatttggaacttcctttgttctctctctcaactccttcacttgctccgcaaattcctccgatgtcggttctggtaaaaaatcttgtggttgccaactttgctcaactggcttcaacaaaggtaaaacgttttctctcccccattcttccattgacttgaagatttctactttttttgcacttggcgtcatcaacaatgccctacgtttggtgttgacttgtatttatataaaaattgtaatatttttatacaaaaatatatattatgttaaaatatacaatactatataatataatatgatataaaaagacatactaaacacattttgaatgcattttttaacatctctataattgatctattcacttttaatgcttaatgtaaaacaactaaaactacaaataaaataaaataaaataaaataaaaatctctaaaatagattgaaaaatcaaaatggaagaaaaataaattctcatatcttatacagtgtaacttctatttaagaatactctattcaagaataacatctaatttattataaaaaaatcaagtctcaat

SEQ ID NO: 68134 - DNA, 648 bp, Cannabis sativa
agagattaattaactttcttaacaggcaccgcttcaaaaagttatgaaagaacgaaaacaccaaattaaaacttcaaaggcttaagaacaactaacgaaaaaagaaaattcaaaacgtgttagccactaacgttaaaattttctccttgacttaaggtttatacattttaatttaaaaagctttaactatattgttttttcaatactagtatataaaaaaaataatttaatcagtggtgaagaatggtgaagatcattcgttaaggacagaagattattatactttaacgtttgaaatatatttttaaaaactaatagcaaaattataattataaatatataattgggtaagaaaattagttgttgccatataattgtattaacacatccaaaaaaacataacttatcttttacaatcgacaatatatcaattttggtggctacgacagcagaaaaaaatcaactttcccacagaaaacgaacaccacaactctttgtttaacatatataattgggggagcacatatataattgaatatacatacgtgtgccttgcggccaactttgaatggaacaataaaattatggtaatgacagtaaaaaaaagaaggaaacgatgactgatgaaggtgatcggtaggactgagt

SEQ ID NO: 68135 - DNA, 846 bp, Cannabis sativa
tgttaggcaagaatattaattacatgaatttcgaatgtaagagacgtgtagattaattaacaatattctttaaaaactatttttttaagttatacgagatctcatacttaattataccaataaatataaaaccgagaagagtgctaactaagcactcatggtgccttttaacaattctctaagaacaattaatcaattacagaagctttgatttggagttagcgcttaggacataatttggagcaaatatttaattaattattgtcgttttcactaattaattaactctaatatatataggtacgagaaagatcatacatattataatactttttccttggttcctatagtttattataatattctcttgttctgccaatatataagattcttttcaatattatttgtacaaatttttttatgatctttcgtacgttcaatttatattatatatataatttttaattataataagctgtaattaagatctgtaaatttaatgaaaaagattagtctgccagtaaaccacatgtgtaactagatcgccaaacactacttatatgtatatatcatggccatggagggatgtaataaatataatataacttttatagtataaaaataagaaaaatatgatgaactaatcacatctttagcttgattataccttcctactaaaaataattgaattttatatatataaatatatatatatatttatataaaatataaaatacttataatgctgaaattatagagccaacaaacaagagtactatgcttaaagagcattaattattaagaaatcaaaacatgcacaataatttctttataatttcttataac

SEQ ID NO: 68136 - DNA, 1242 bp, Cannabis sativa
tcgagtctcacataatttaatctaataaataatttttttcatttttacacttcaaatttttaaaaaaatatacataacaactaatagaataacctaaatctcattctcaattcgagaacaaccaaaaccataaatttattcttaaaaagaaaaccataaatttaaaatatataaaataataattactaactaattagaatatgcacatgttttgtagtgctccatatttatccaaatcaaatgcaacaaactcaattagattacacaacaccaaattaaagaccaaactcctaaaaactcataactattattattattattatgtaaaattgtgttcttaatattatgaaataaatagatgaatatttaaaagtcaaccaaatgttttgttaataatctaaacctttcttctccttctgttacgcctaaacaaagctctgctctttcttctataacctcaacaatggcaacctctgaagaaaacgacaaacccatatccttatacgacgaatcgtcatcaccgtctcaacctctcctctccaaacccactgaagacccacctccccggttacagccatctcttctcagcaactcacctgattctgacacctctcagtaccttcagatctcatacaactacggtcccagacacttcaaggaccttcctttcctcataatcttcctcatcttcgttctctccactttcagtttcggaatcttctcaatctttcatcggaataccaattactctaatctctcttccttcacttacaactccaattcaacttcttgtgtgaaagactctgtttctgagaattgggttttcttcaattcttcatcttcttcgcttgttttgaaagatttgatatggacacttgtaattacgttgattttgagtgtacccatttgcttagctttgcttttttcactcaaacattacaccaaacacattgtctacgccactcttcccttcttcattgtcatacccattttcttcgacgtttactggttcgttgcctgtactcttagctcctcttgcagtgtctcttttccgttagtttacagaattttagttttgggttttgtgcttttgatcgttggggtcattgtgtggatctttgtggttaattggcatagaatagagttgactgttagcataattggggtagcttctgatgctctttcgaggaatttagctttgtttggggtcttgccgtgtatgacattaggattggtgattta

SEQ ID NO: 68137 - DNA, 601 bp, Cannabis sativa
ccatccaatatttttaatccaatattaattggattgattggatccatccaatctaatccaagagtaaaacctgatttttcaccaaaacagctaatatattatacaaaatattgcaacacaacataaatccaacctaattgtaacataagtccaacataaatccattctgaattataacataagataatacatgttagataaacaagagtgcataaattatgaatatcatagaatccttcatcagtccaaactccaaaataacatgtcactcaattctaatatcaccaattccagccaatatttctgcaaattaaaaaaaatagtaacaccttctttcagatccttgttataatatatatacataacattatttacatgtagttttgctgcttaatttagatttttattcttgtatatcatgcaaaacatcatacgatagacaacattgatcttccaaaagccaatacaagtccataaaagatttcccagaaaataaaaatgccaaaacctttaaacgaaaacaaatagaaaatcacaatattcaacaacatattctgtttcaaaaagagagcacattaataacatataaaattaaaaaaaa

SEQ ID NO: 68138 - DNA, 624 bp, Cannabis sativa
tagaaatatatgtattttttttagatagggtgacttctcttatttttctttttactttagttcagttgatgttgtttttagtttattatcttcaaaataaagttgttgggattctatttgatttagagtagtttataaccaaaattactaaaaaataaaatagtataaccaaaattattagaatataaaatagtataattaattatgctgaagcagataatcatataatctatttatcgactaaatttatattatggaatcttgtttactaccatagaaaatgtttgaacttttacatattagatctatttttcagcccatggattcattaaccaaagaagacgatccgtatcgaataaggtttttattgaagaaaaaggttcaaagttattctatatttaaattttgaattttagatttttttttgttttgattaaaaagaatttttattaggggaattactccttatattatttttttgaacttttttttaaaatttacggtttgggtttctaaaatggttgcagcgctaattgcaataggagtactttctatacaattttttattacaatttaggttgcagcgctagttacaataggaatttctatgtataattccgtaaa

SEQ ID NO: 68139 - DNA, 1938 bp, Cannabis sativa
ttttgaattttgcgagcagatcattaattttgcttagatacgctatcatcttctccccccgagcctcgtactccctagatacatgatttaccactaactgtgagtcactgcagatctcaatatgttcagtttataattcctgagcaagtcttaggccggcgataagggcttcatattcagtttcattgttggatgccttaaaactgaatttgactgcaccgtgtaggtgttgccccccaggtgcgacaagggcgattcctgcgctggacaactgatccgtagccgacccatctacatgtagcatccagcttggcttgtctttactattgctcgattgaggtacttgtactggctctggggtactttttgaagtgctctcttatttacctgtacattcaaccaaaaaatctgctaaggcctgactcttaattgttgttcgcggctgaaagatgatttcatactgacccaactccatcgcccatttgagcaaccatctagagacgtccaatttttataatacttgacgtaatggttggtcagtatacacccgaataggatgagcctgaaagtaaggccttagctttcttgttgccaagattaggcaataactgagcttttctatcaatgggtactgaccttcagcttcaatgagtcttttgttgatgtagtagaccgaatgttggatattgttttcttctctgatcaatatggcactgatagcatgttccgtgatggcgaggtatattcctaattcttctccctccagaggttttgagagtacgggaggctttgcgagttgcatttttagctgttgaaaggctttttcgcattctttcatccattcaaattgcttgtttcctcgcaggatgttgaagaatggaacacagttgtttgtcgactttgagacgaatcgactgggtgcagcaatccgaccagttaaactttgaacttccttggtttttgtaggaaatttcatatccaggagggtttgaattttctttggattggattcaattcctcaggcattaatgttaaagcctagaaatttacccgagctaactccaaaggagcactttaggggattgactttcatgttgtatttcctaatgattttgaagcattcttggaggtcatccatatgtcccctagccttcctggatttgacgagcatgtcatccacatatacttctggcattcttgagaccaaatggcatgactttataacagtacagacccatatctatttggaaactttaaagttcttggtctagtcggtgaagtcgatacatactcgccattttttgttcagcttgggcactagtacgaggttagcaacccaggccgggtagaaagcttcaattatgaagttgttgttgtgcatcttttctacttcttcttttactgctagggctcattccttatccaacaaccttcttttttgttgaacaggttagaagttaggatcaatattacggtatgtgaaattatagaaggatcgattcggaccatgtcctcatgtgaccatgcaaaatgtctaggtttgcttttagaaattttatcaatgctgatttcaatctcttctagttcttttactggcccaacatttgtatttggttccccaagtcggggatccacatcttcgtctccgtcttgggcggttccctatttggctatgttctttcccttgtccgaactctaactaggggattcttcctttttagccttagttagggcaaggttgtaacatgcctatgaaacttgttgatttcctattaggcatccgaccccattctttgttggaaacttgaggcacgaatgaaatattgatgtaacagcttttaggtcatataaggctagtcggcccaacatgacattaaaagctgatggagcttccaataccaaaaattgtgccattacagttatgctcttcggagcttg

SEQ ID NO: 68140 - DNA, 600 bp, Cannabis sativa
tttctagctcaaaatatgtgtagaaacaagaataacaagtcaaggcacaataaatgtaaactaggaataattatgaaaaggtgagcttgaaagacgcaaacattctaaatattgcttaaattatttttcaaagcacatgtcatcaagaattttgcctcaaagaacaaataatataagttatatccaatttaacttatcatacctctaaccctagtcaagcatgtagaacaaattccaattattcacatgtacatgtcatatcatgctctgtttgagtgcaaaagagcaaaaaaggcttagctatcttctaaaattcatataactcacctcattggcaataatgattcttgtaagtcctttttattctacatatcaaattttttaacaaaggaagaattagagaaagttgcttgcatcatatgaagtatttggattgaacgaaacaatgaatatcatggtaagcaaccaaagccaactgtgtgttgttacaatatgctctgaattatgttattgaatatcataatgcacattacaaaatcgatattggaggccaaaaaaaacattgtagataacttcactccatgttctactacactacaa

SEQ ID NO: 68141 - DNA, 1398 bp, Cannabis sativa
atatataattattaaatatataaagaaaaatgaaaaaaaaaatacagtgtgatacagtgcactgcatatatgccgtacactgtagcacaaacggcaatatgcagccgtaaatgctgtgtccttggagaaaatctcacactaaatatagtgttttgatggctccttggagaagccctaatagccgtataagtttgacggagttacttcaatactgtatcatcatcatcatgagatgaatacggagtattctagaaattgcaaatgagtattaaagtgaggtcagagtaatataattgcttactgacaagagttatgttgatctttcaggtatatctaatctgtcaaagtgggcaatagcagttcctaataactaatagtggattgattactgacaagagttatattgaaacttgaaaatcatgatcattgggctcttttggttttggttacatgagctccaggcatcactttcttttagtattttcaatttttttttgggtacttcttaaaaactataatcttatatcttttagttttatattagttattcttgattatcaattcttatgtctttaaaatgatttttatttttctgttaatcaacaaaatgatattcagttttattacacttattctacgcaaatataatatatattttgaattaagtggtattttattatcttattatctcatcctctaactgaggaataaaaaaggaaaaaaaaaaaaggtaaatttcgctaggatagagaaagagaaaattttagaaaaaaaagatacaaacaatatttagcattttttagaaaaaaaaaaaaaagcattttgttccattatttgtgtaggaaaaattatgaacaaaaatagaggaaacaaaaataggatgaaatctaaagtaagttatatgatgaatcactcataagtaccaattgttcaaagaaaaatcattactctacctaccctcaataattactacaccatatcatatataatttcattctgacattttttttcaatcacttgtgtatatagtcttaaaacttaattactttttgttattatctatctaatttataatttgatactattagatgcattaataatcattttactctcttttcaatatatgtccctacaaattttataatattaaattattttttattaataattattgtactatataataatttacttaagatttcaatgacataagatatattttgttaaaattaaatataattcattgaaaagttaaaaagtattagcggacttattccttagtttatatataattgaatctatatcgttattatttcttatgagcactcttaaactcttcaaaattatagtattcaataccactataagatatcttatatataaactattataatttta

SEQ ID NO: 68142 - DNA, 679 bp, Cannabis sativa
gtcattattcgtttaatatgtatacaaggtaatttcacgtaggcaatttctttcgtgtatataaagacaaattggttaaaaaagtgaatggtttttttaggtacgtttttatcaaaatagtactttgtttagttatgatgatgattagattttggagttaccaaataacaaaatttgttttttattttctctaattttatttatcaaaattttctattttctattttcttcttagtttttaattaaaattgttaccgaacaaataagtcagatatattatacaagtttttattttaaggtatcttaaatatttgttttttgttggaaactaataatttgttgggactcttttatccatacgtacgtaccacactaccacatgaggtggactgtgtactatacttataataatttataataatattaactaaagaaacaaattaagtttcagttaatgacaaaatcaagcatgagattaacgattaatgttaaaaaaaacctataattataatagaaattctagaaattgacctctcaataagtctatttaactttttattgttgagccatcagcttcatgaaaaggccctttgtgacatatatatttttatgtagcatgtgtggccaacgttgattagtaagtttttacttccaatttcaggaatcctacaaataaata

SEQ ID NO: 68143 - DNA, 709 bp, Cannabis sativa
  modified_base (179)..(192): a, c, t, g, unknown or other
  modified_base (386)..(393): a, c, t, g, unknown or other
agaagaaaattgcttgaagaacaattgcaagtattcaacctagaacggcgagtactcgaactgggaatatgaaatgcttaacagaaaactggaaacaacaataagattgaggattatagttgttcagtcagatcacggtccgcttagtccactatagcaagagtttcgtaggtctcatnnnnnnnnnnnnnncccctttatatacaaagcaggtatccaattagttatacaaagattgcattcattgtcaatccgtttacacattgaattacaataaactaaataacgtaaacatcaataaatgaatagctgtttcttaattcagcaatgtatgcgcccttttaacatgcgagttgactgttcatattctaatgttaagctcgcgnnnnnnnnacttaattgcgtttaggatgtctgcgttcttatgtagttgcctctatggacatcgtatgacgagctgatagaacctacacatacgagtctatatcggtttatcaaggctgttgggtcattgggaccaactcgcattattgagagtggatctctatgcttatgtatgaacacaaagaggatactcgcacatacctcgctacatgcgagttactctcgtgtcctgcataatacgagttataatcatgcaatcagactttggtcatgctcgctgtatctcgctgactctatcttgagcgaggtttaaaacttcgaggag

SEQ ID NO: 68144 - DNA, 1769 bp, Cannabis sativa
caggataaacctcgccttggtcctccacctcttggacttcaacgtccccagcaatatccctctcttcaatagcaggttgggcctattctgtcctaggcaaggtggcaaggcgagcaatgtgtgggtcagatagtggagattaccgtacagtctatttggtttgcgccatcatattatgcttagacagagttttatcaaacatgtgcctagctatagtcacggcaaaagtggccacaggcttatccacaacagcagggtttgggcggccctcgggcagagtgtcgactacatctaagcagactatgtacatccagtgggacagaagataacgtctccaccctttcctaagttcccaaatgaaacgatcatatccctgacctttaatttggtgaggatagaagtgatgttgcacctcgggttctggggaaggtgtgtgttcactgcttacttcccagtcttcaaagctagagttagaaagattgtcactggacaaagatgggatagcacagagacgaagatgatcctcgtacagaagttgaagcagatcctggtcgatacggtggttgcctccccaaaactcaccagggttcatctacaaaaggtaggagacaaaaaatgagaattggtcggagaaatgaatgaaaaacaggttaaatgtaccgatagaggaatcaaaagtagaaatttcacttagaaatagaattttcaacccagaatttgaaaactttgaattggggtttgattttcactaaacccctaatggatagtgaaaatggatattgtaaggttaaaatcaaagcgcagttaaaatcagacgtcgtggctaagcacaatcaagatttcaaaactttgaacctaagatttctatggttatcctagaacagttaagattcattgttagaaacctagaaaattaagcatacaaacatgtaaaaaaagaaataaagaacttactcactggtttgaagctccttgctctgcttgaatgatgttgtcgagagtttcttaggaatccttcgcagaatttgagagaaaaattcgcctaagagtttcttgctctggttctttaagaatgaaattggctaaaaggataactagaggttttcaatcttattataagcagttcaaaaagggaaaattatcatttcaaaaatttaaaatcctcgaattccccgtaaaagtatacattatgtactcattacaagcagagtaaccatcagcatgcgcagatataacccgtgattgaggcaagactgtcactacgcattaattatttgaaattgaaaaaacccctgttatggatcacatcggttcttcattcaatgcctaggacatgcgtcacccatccagacaagactccaggttgagtgacgtccacgtgcgactatgaaggtcccgcgaagacttgggggcaaatgttatcctgttttttgcacattgatgtgacgataagatcaaatgacatgtgtcctatatttctgataccttagtggagggaaatgtccctagcagcctgcacctgctagttagcatctataatagtcagttatttgagcagggttgttgagaagacatccgaccaggtagaagcgtgtttgtgtcgagcaactttccaaagatagaaactttagagaataatctcattgtgtccaaacacaaagaggatccctataatcatgggattgagtcagaggaaaatggcaacatattctagtttcctatttcatatattgtaattatagaaacattgtaatttcctattttgtgca

SEQ ID NO: 68145 - DNA, 1001 bp, Cannabis sativa
attacctctctcaagtgtaaaccctaaaatatctatactaattaatgatgataattagcacaaaattgcataaacaaataacaagaacaaatatggaaataatttaaaaaatttaattcatgttttaaaatagtttcatcaacactctacaaagagtgtttagttcataaggacaaatataatcacaataataatcatgcatgtttataattaaataactaaacaaaagaatataaagaagaaaaagaaaaagactaataaatgttgatgatgcttaagcttggaacctcttctctctttctcatcaatgtgttctttaatctcaaaattactttctatctctctctagtcatcccaaaagctgaagttataatattctttttataggccagaaaagatgaaaagatgacgttttaaaaataagatagatatcaatttttacgggtggttatagcccccaaagacctgcgctatagcgccatgcaatattccccaagattttattttcgtgcaaaaactattttttcccataatcagagctgtagcgcctcacttatggcgttgcagcgctagaggccatttttcgtcattcttttactacttcaaccttgttaagtaaatcatgcataacttttgcattaagactccaaatgagatgatttaacatgttttgaaaagctggaagcaagctctatcattttggatatcataagctcttcaagaaaatgattaaaatattgtaaaaaaaattggttcaaacatctctgtctatcacaaaattatcttttaagcacaaacctacacacttagagaaaacacatcaaatttatacaaaattttaagaaataaatactaagtcatctaataaagactaggaacgagtctataaatgtacactcatcaatatgccgatgagatatacctacaacaaacttagcatgttggggtttgaatttcttctaccacctctgcctcttcctccacaaccattatttcctttt

SEQ ID NO: 68146 - DNA, 686 bp, Cannabis sativa
ttaataataatctaatctagaaatgttatgacaaaatttattacataatctatgtctgctcgtgttaaaaattatcttaaaataggttaaattaaaaaataaaatggttgaaaattgagttcagtgttctatttataccattttagaaaatataagatcaattttatcatttaataaaataaaaagtctaattaataacttttaaaaaaagtgaccaaaatattatttactcaaaaaaaaaataataagaaaaaaatacaaagtccaatcatttttctttttctcttttttctttttctttttctttttctctttctttcttttcttgtgcagccgtgtcccccaactactagacgaggcgattgagatctttcagataataaagtgcatcgtttcaaacacttgccactaacttcaactaatgaaaagatggcttatcctaacttttatcttacactctcaagtctcaaccaaaactttcttattttttagtctaatatttatatttttgaaccaaactaattgtagtaaaaaaaaaataagaagaagaagaagaggtatacttttgaatgagatttgttggctagataaaaattaaaggctaattagtaattttttcccctgaactttggcatgtaataaatcgtgcccccttaacttttttggccgttaaaaattcttctgaa

SEQ ID NO: 68147 - DNA, 630 bp, Cannabis sativa
tctctttcactcacatggcaaagtttctcgtgccataattctgtttctgaatccaactgcttgcttgacacacatgctttggtgtttgtcacactaacaccttcaagaggatagattccatttgattttcttcccctcataactagcattgaaccctgcaaactttcatgactctattctcaatcttgacaagaaaaccctgatcatctaacattccaacaaagattaaattccttttaagatttggtaccattccgacatctttcaatagtctttccatgccatcatgaagtttcagcctcacagttctaattcctaccattttgcaaaacttattatcactaagatacacagtaccaaaagtctcctggtctgaattcctagaaccatgattagtttggtttcatatgaaatgaatacccagaatttttgatccattaaaatttaaattctcaaaggtaacaagcaaagtactagccgagtcatatccatcactcatcacacctgcatcttcttcagatcttgcatcacctgactttgcctttttagactaagccttctatattttcttctttcttgcaatgataacatttgatgttcttccaaccactaaattgtgatttcgatctt

SEQ ID NO: 68148 - DNA, 1669 bp, Cannabis sativa
tgtagtgactaaatagtgaatataatccattatttatagggaaaataatatagcattttgttcatttaattacataataaagtatttgatatttaattgagtcaatctcacgaaatcctcaattctccccaattcaagaaatcccacacttataggcatctttattgacctatttgtaagggattaagttattgggatgactctggacattctcctccgtgagttctttagtcagacacttcgtcagtgagttgttttcttggttgcttggcaggatggctagcatgctccgctcagtgattgtcttatgttggacgaccctatttcatagatattttgcccaacacctatccaggcagtctcttcgatttttttttatactttccacatgtcacattattccgtaccacatcatcaagttgatttttggaataatacttcgtaacatgagcaaagagatcaccttaaagagtcactggtatgacatttatgcagaaggcatgccactagtaagcaatcatttataacgcgcaaaagaaagatacgaatttttgatggaattgagatagatcaataaattatttatctaaaaatactatttaaataattattggataaatacattctgaaaaaaaaatatatatattagacaaataatatatacaagcatgtgatcaactagctaaatgttaattaaattattttttttttttggttggaaagttgaccttattaaaatctccaaaataaaccgagtaggaaaattctgagaaaagaaaagagtgttaaggaataacattgttcaattaatgttagcttgaattcaattaggattacaagaaaaccaaacaaaatgactatctgaagtaaaaacaaacttaaaaaaagcacaattaacggtctaggaatacgaataagaaaaacatcaacaaatttattacaacacccaataatatctttaacaatgcatcttatatcatagtgatcaataataggcttgttaatgacattaatgacattaaagcagtccgattccacaatcacatgaccatataccccaaacaaagatataaactcaaacttgcatgaatcgcaagagctagactctcgaaaggtgagaaaagaccataacaacaccaagttgcagaagccttagccaacttaaagcaacccctcataaatgtaccactacctattttcaaacctgaaataaaagctcaatatccttaccttcaaatactaactattttaagataaaatgaatatttgttaaagtttttagatattaaattatatgactcgaattaaattaatgacaaattaacaaagtgttgtaagagaaattgatattagattaaaagaaaggtaaaaaatttaatgattttttaattctaaatttttgtttatttgtaatttaatcgtttgtataaaaaatatacgattttatttttctttcaaagaaccatctttttttaaaaaaaaataattattatataataagagttgataaattcattatcataaaaggtttaaaatttatacgcaaaattactaatacttattatataatatatatggaacataggtattacttataaatggttactaaacaaatttaactataaattttaattttaaaatatttaaccatcgaattttgatctaataa

SEQ ID NO: 68149 - DNA, 629 bp, Cannabis sativa
caaggccaccaaattctctcggtactagaaccaatgaaaaaatgccacctagagagccacacattgagttagaagacgtcgaggaggtcgatccgcaggttgaatagcttagccatactgtggctgatctacaaaaacaactaccagactctctcaataggcaactcaaaattagctcgttgaaaagtggtggaacatcgaaagccaacgagctaagtaggaacagtggagagctaacttgtgtcaatggatttgagaagcctatcattttggttgcgggactaccccctgtaggggtcatccgagttggtaagagaaattcccctttgaccaactggtcatgtgggaagtagtgctcaaaggaaaacccttaatgcacagaatacaactgccatgcctagtaactatgcaagtactaatgaaacacaaggtgttgaggctcctcgaagggaaaaaaattttcagcaagattttgaaagaactaaaacacatgggtaccaactaatggaccctccacctgatgaggatcaacctctgaatactgagagagccaacaagactcctccaccaactcctcctcaacgctctcagtgttggaaatattttaccaggacctagatttactaaca

SEQ ID NO: 68150 - DNA, 555 bp, Cannabis sativa
ggaaaggtcgtgtcccaagtgggtgtcgtggaatcggctaccccaattagccgagacccacaaagattcagaccaaagagagcagctgtcttaatctgtcttttccaaggagaagctggggatctgcgagtaattctcactaagcggtcctccactctgtctactcactcgggtactatgtttggtttctgagaaaattggggaagatgtttgtgagatggaaaattgttgaatagttggctaattggatttgatggcgtttttctttttgcaggtgaaattgctttgccagggggaaaagcagaggagggtgataaggatgacggtgacacagctacgagggaggcacatgaggaaattggtttggatccagcacttgtgaatgttgtgacagttcttgaaccattcctttccaaggttttttctgttcttttctaaaaaccttatattattgaaataatgtaatgtgtgaagtattatgtgcttctaatcgttccaagtaaatgcaaattcaacaacataactttgatgcattgcttggtgttcagtcttata

SEQ ID NO: 68151 - DNA, 1791 bp, Cannabis sativa
  modified_base (205)..(212): a, c, t, g, unknown or other
atgactttggttgctgattttgatattgttttttttaattttgctatgcggtctgctaataaggttgtgcgtgccttatcgcgatcttctctttttgaggctgacggtacttttagtagggactccttaacttttgtttttacatccttaattttagatgatttagtttaatgaaatttaatcattattaaaaataataataatnnnnnnnntaataataataataatagtttttattcgtttgactttgtgttttagttgtttaaatggtgacaacaatagaaaagggccaaattaagcgtagcatgtccaggggcggctcacggaattaattaacatttccgttttttctttggctaacgcaattgatttgcagcgcatccaataattattattattacgtaaaataaaatccaccagtacgtataataataataatagtaataatatatgtttgattcccttcgtttttcatcatttaattttcgtctcgaatgttcttctcccaatattttgtctctgttcgttatgatagtttttttttttttttttatgaaccacacgaatttcattacaccaaaattaaactttacaaactaaagatactttataattagcctcaaaacactttctatacaagcagtttgcaaaataaacaaatttgtttcctctctttttacaactcaaaccacactgactctgtcttgattatctttctagatagatctttcgttaccaccttaactctgtgtagtagttggtttaccaattgatctttctccagctttttttttttttttttcacttcttgtcatccatacatagtaaaatcgacaagctaaagctgctgaaaaaacctgcttatttgaactttcctattttcgctttttcaatctaccgtagcagtctagtattgagctagtacaagctttccattgcagccatatttttacctggtgtaaataatcccgagtgtattcaccctcaaaaaatagatgtttgaatcgttttctcatgtgtgccacacaagacacatgtggagttatcggttagatatgtggaaacaataaagtctctcttttgtttttagcctattttgaacagcaatccacataatgaagttgtgtttaggaaagcaatattgacacccactactacaaatatgggctttagaggcagttttttatggcctttcagcatcagttttagtgaaattcgctaccgacgttgattcaggtgacactgtaggattgaaaacaaccgaaactaaatgatactctatggcgtcagttatcaccaaagaaccgactccatatgtacactatgacatcgattatatagaaatagccgacgctatatgcaactataaccaactctataggcctaaaaattgacaccaaatcattaataattacatttttttcagttaaaaacctattataaatgaagaaatttaatttatttaaattttatatttattaatttatattaaatattacttaatttaaatttaaattaaatatattttttaaaaaagttgaattaaatatttaaattttataattaggcaatatactaaattcaattcatagaagcaattaaataaattacaattatatattactcaaatattgtaaaattagtttaagtattaacaagttaataaatctaattacaagttaacctaaaaaataagctagggaagaaaaattctgaggcctttcagtatcattcgtcgaagccttcgtgaatcaccgccatcaatccttctatccactgtcgctgtaatgg

SEQ ID NO: 68152 - DNA, 1037 bp, Cannabis sativa
ttttccttaacatgtaattatatcactttattggtaaacttagttctgtatttgtgtagttatgcttttgatattggttcatttctctttttccctccttttattcatctacttgtttgttttgtcttttcttttcagttgaggcataggtggtaagaatatcctctatggataaatattttcacaattggagatagtatcatatattatggttgagaatagtattatattaatgatagtttcaattggtttgcttgagttatatcttgtaaatgttgtaaatgttgtaagttctggggtctacttgtgtatataaagatggaaatgctatatgacaaagtatgtacttcaccttacttttcatttctctccatgtttcgtgtaatttatgttatttttgagtattttatttttttgttgttggtagatctaatttgtatgaatcataaatttgttgcagttatataatgaaaataatgggggatgctatagatagggagacatcctttatttgtattcaatgctcgccgggtggagttgtatcgattattagtcagcttaacagtgagcaaaaaactttagttaacgaaattagatttggtagcttattaggtttaaagaaatataatttgaaaaggaatttgatccagtggttggtagataatttcaatgtagacgatggttgtttaagagtcaatggaaaagtgtgaaaagaatagtcagttattttcacatattactggtatttatgatggtggggaacacttcttggattcgaaatctgataattgtaatgtgggactcacactactataaaattgggctttagaggcagtttttaaggggttttggtgtcggttttggcaaaattcgctaccgacgctgttccaggtgacattgtagggttcataacagccgacgccaaagggtacttatggcatcaattttttcataacaaccgacgccaaaggatacctgtaatatccagtttatatacatatattggtatttattaagtgtgatacaattatattgtt

SEQ ID NO: 68153 - DNA, 1400 bp, Cannabis sativa
gggtaaaatttgatacgaaaatgtatagatggatttttaccatttttgtgtggaatagatgaaattggagttttttagtggttttactgaaatgaagtttttatttcctttttctagttcgattctgatttggtgaatatgtttgaagtttaatagtaatttttgttcagggtaggctatcggtggattacaagattactcggacttggtttttatgctctgttacttatgcctggttttcttcaaggtggcttctgtcttcatataaatatatttctctatctattgttaaaactcatttatgtctctttaaaaagaagaaagaaaaaagaaaaatcatttatgcttacttattaggctattaatttgtatgtagtcgcatatcattacttcttctcaagccacgtccggagaagtattgtgtatggcgatcaaccaagaaataggtatgctttttttcttttatcttctgttttgaatgatttaagttatgaatcagataccaatatgttatgggttattgtaattttacaggttggatttatatttaccagcaaatagtactgatgaaccaaagccagttgtgatatttgtaactggtggagcttggattattgggttagtgatgatacaaatcaatgcaatcacttatgtctctgtaccatgtgaatgtttggtctaattatattccttattgttattaaattgaatagtctttctgtggattcaggtacaaagcatggggttctcttttaggactgcagttagcagaaagagatatcatagtggcatgcattgattacaggtaaataaaatatcatttaaagcagatatgctgcaatgcattgttatcaatagtaccattgggcataactggcttggggaaaacctttagtacatttgataataaaataaaagaatttatgttatctttcagctccaaattgtcatttcgaacaaccaaaaaaaagttggaaagtaattattaaaaacaaaagaaaaaatagatgcccgtacataattttgtaaggtttgttttcgttgtttgatactattacaatttgtgtttctgtgatagtgtgacaattttacgaacagaataattaccaaaaagaaaaaaaaaattatgtgacatctttccttttctttcctttgttttcagtttttattttttgtagtcactcattactggaaaagtcgattatatatatttaattgttaaaaataactcattaatttcccatctgctgtcaccaccacgactcatcttatgctgatatattgattgcagaaattttccccaaggtacgatcagtgatatggtaaaagatgtttgtcaggggatttcatttgtttataacaacatagcatactatggtggtgacactgacaggtgatta

SEQ ID NO: 68154 - DNA, 711 bp, Cannabis sativa
tagtgggtaagctttcaaatcccgttctttacttgtttccttaaatctgccattgttgtgttcaagccttttcaaactttttacattcttgattctcacattagattgtagtctttttagtattttgatatgcatgatagttttaggatgcataatgtatgatttcttgatgtaaaatatttatttttttagattcgttgtgattcttgactctttaagtcacgaagaacatgatgaacgtgtttgagtcttggaaagacacatattttgatccattagacaccctgaccaacctatggggtcttgtttttaacctggccaacccatggtgcttttcatgagagtggaaatttttagggtttcacctagtcacctggtcggctcttgcatgggtcatgtgaccctagccaattctagcatgggtctaagaatcctgactggctaaatgccttgggaccctggctggcccagggcttcggtcccaaggggttggctagttttttgttctcttttgaccttagcaagaatcttgttatggccttacaaacttgtacaacccttgtcccatatgtggttctcttaggaactctgtatggcactttagggtgagtctattgttgttgaataatctacttaagattcaactttatccaagttattacacttaaaattgtacttcgctgatatccagccttgtacaatggaattatc

SEQ ID NO: 68155 - DNA, 880 bp, Cannabis sativa
tagtaaatacagaatacactaatcctaggatttagacagcttgccatacctctgtaattgaatctagagttatagggatttcttttaatgactcgcgatacgaaagctgaatttgctaagtgttggcgtgctgcgcggattgctcactgctcggtctagaggacttcatcggagcagatgtatgaggtgccctgttcgccttgtgtcttgcaagcaggtacctagaatcgattccacgtgtcaccatcgtgtgatgccacgtcacagtgcaaaaattgggataacatttgccccccaagtctatacgggacttcaaaagttgcgtgtagacttcatccgagctgtctttgcatttggatggtgacacgtgtctggtgcgtctgttcgcgactcgatgtgaggctgactaagtatctcttcgttttttggctaataaatgatcagacgcaattaatgcttcgaaatcaaatttctctcaccacgtttgacggttgcacctgattgcttttaatttccaatatttgcttttgggggaaacgaggcgtctgaggtttttgaaatgattactcctttttgctgttttgcctataaatacgacagagcatttttcacaaactcattttcaccaaccttcttttttgagtaagcttagagcaaaaagagaggtttttagcttcaagtttgttgaaaaattttcacaagaactgttcgttcagctttgtgtaaactaaatccaaacgtcgatcattgagtaagttcgcggttttttttagttttacttttcacatttactttctgaatacgatcttaactttgctgtagaagctatgtagaaacccctaggttcagaaactctgcgattttcctttgtaatgattca

SEQ ID NO: 68156 - DNA, 1790 bp, Cannabis sativa
ttccgcatttaattaatcacttaattaaataatcaaactgggaaattaaaatacggaatttcaatttccaacatacgtcctcttcgagctcacctcgattccactataggatcttcaaaaatcaagagtgcaaagccagattccaaattacaacaggtaagatttggtaatcttttgatgtttacagtgtttatttcctctcgtttctctctctgtaagaacacaactctttcttcttccttctgtatgttttcttcttctgatttctagttgctggatatccgagccataactcttagggctccaagacttaccccactgtgagtctcctccaccttgatctgatatgagttctgtgtgttgttactctgcctttattttgatttgtgagatgatatttatatatattgtagctaaaaaagagagttgagaaacaaacttttaactaacttttagttttgctgtaggttgatagaggccgaaggccacctaagcattttattcctgctttgtaaactccgttttaatattgatcttggacaatgtacaaggcatgtggagatttatttcaacaataaaatataataatattttgatttaataatattataataattttctacatctattttaaaaattatttttaaattaactatattaaaaaaaattatccaaaaaaaaaaatcatttagtactttaaaaataggagatttaaaaagatattaatgctttccaatttgaaaaggttggtggttttgaattgcaagctaacataaatgtgattgttttttttttcgaacaacatagatgcgattgttgaacacggcgagctgaggcatcgtgggtatataccttgaatcaatatcaaacgtatgggtcaattatccatgttcaattaatcaaacacttgattttcagattgtcaatctcaataatatatgttgtttttatttgattatttcatacattatgctaaatcaccaaactaatgtcttttttttttctttttttttttttcaatagaacaaatgttcaactaatgtctctttcacttggtccttttattatgtattttgaaatgttgggtgtaatcccacccatttttatacatttttttctctagtcaagatttttataattgtaaaaataaaaattgtggtaaaagtctctaaaaatttcattttgatgtagataagtctctaacattgaaaaatagtggcaatagtatccatattcgagattcttgtaagtctgtcgttcctcattttaacagttagttgttctcaaacatatcacatattaatttgcggcataaatcctcaaaacaatcactttaatgcaacttagtctttaatctcaaaaaattataacaatagttcccaagctcgatattctcattagtcagtaggtatccaatttaacacctatatttgtagttcttagaattgccacgtgtcaaaagtttattaattttaatcataaatattattttaaaattatttaaataataaataaattattaaaaattatataatttttttcattaaagattaaaaaatattatatataaataaacttctacgatttatcacccaccattcttgatggtggaggtttatcgccgatcagtatcatcttttcatcttcacattctttttcgtcttatcctattatcttagaaaataaaataagcaaaaaaattcctaaatcgctacaccttgctccaatcatctacccttatctgttatgtcggtctttatttttgattgctatatctctgccgttaatta

SEQ ID NO: 68157 - DNA, 805 bp, Cannabis sativa
tatatagtttctgtcatgttctccaactttaatgggaattctctctgcctcacccatattaggtaggtaaggctagtagaagggtttgaaattgaatgtgggaagcaagtggggataactcaataatgaatattatattctgtgtgaacatggttcattctaattgactttttgatgggacatatgatgaaatttttaaattattattgggcaccactttggtgcttattttttgtaactagcgtttcacgattgattaataatatttttagaagctatttttttgtatttaagcatttatgtattataacgatgcataatttaggactcgaactcaagacctccaacatacacgtacccttctatggccacttgagctaacctcaagtggttaaaagctattttcttaagttatataaagtttgatatttaattatatcaatagcgatgtgaagaaaggtactaaacaccagtaatactttttaacaattttctttctataaaaaatgaaagaattaaattttttataataagattagaattcttaagcctttaaattcatgataaaattttagtaatttgataaaaattatatttagtgtgattctatgaaaagaaaaaaaaatattcgaattataccttttacaatgctcggaactgtggtttagaaagcaagaagcaataaaatatatggtaaaaagtatgaatttcatttcaaaatcaatttgatagtaagtaatccatggtattattaatgttaagtttctataaattatggatgtgaaactatctaacaaatattatc

SEQ ID NO: 68158 - DNA, 860 bp, Cannabis sativa
  modified_base (38)..(43): a, c, t, g, unknown or other
  modified_base (696)..(705): a, c, t, g, unknown or other
gccttccccgccgcccctcctcctcctccttcttcttnnnnnncttcttcttcttcttcttcttttcgttcttaatcccaaatccgatttcctcactcccaaatccccatttccaatcaaaacccccatacccattccgcttccacccctacaattctcccacatttcctccccgttcgtatgatgactgctcgaaacggagtcgcatttggaaaactcgggaagctgtagcagccaattcggaatgtgcggagcatggaatggagtcggagaacggctttcgacgttggaatcgacgaagtgtgatagctcggcgagaggggccgaggttaaaaggcagtagttggttcggtggagattggaggcacctgagaagccacagtggaattcgaggtcatggagggcattggcgatgtcaaaaatgttggattgggagcggtttgaggcagcagcgatggaggcggaggacttggctataacttcgatgtactttgtggtgacgagtgttagggtatcaatggcggagaggcgagtgtatttgaagccctttgcgttgcttatatgagcttcagcgattttggcgatggtgaatgagaagtcagggggtgttgattctgattcaatctctgctgctgcatgccgtgtcactctctcactctctcaatttgcggcatgaagaagaagaagaagaaaaannnnnnnnnnaagaagaagaagaaggaggagggggcggcgggtaggcaatgagagagagaacgagaagagaagaagattcaggaattactcaatctaaaaacgatactaactttaaaaaccagtttcatcaatatttagctgctaaaactaaaaaaaaaaaaaaa

SEQ ID NO: 68159 - DNA, 818 bp, Cannabis sativa
attcataaataattataaaattaatagcaattagtgctaattgtctttactaatccaaattactaaaccggtcattacaataatataataataacaattgataacatagatatttacaaatcttatttttttttgataacatagatattattatttacaaatcttcctaataggttgtgtaagttattttattttattttattgtaacacattagtttcttaaataagtttgtaggtaacacaaatgttactaaaaaaatgtaatcggaaagtttcataatcaataaaaaacataatttaatctaaaatgatcacataattttaaaagtaactaaacaaaaaaggtgaccaaaattaatgtatataaaattattttggaattggttgatataataaactttgtttaagtcatttagttactctttagatattaaattaagccaaaaaaaaaaaaaatagactcgttaactaaataaaaattaaaaataaggatgtttttattttattttttttaatgacaaaaaaaaaatatgattcccatatattaaaatggtcatcttaaaaagttggttgcaatgatattctttttgagctaaaataactaacggtgtaattgttttatttttttttttaaaaaagaacaaactattaagagaaacacatgaatatatattttttaagaaaaaaatacatatttcagttttaaaaaattaaatttaaataaataaatataaagttgaaagagtgcacgtgactctttgatttttaagaagtttgaatatatatacatggtctggattgttagtattatgtaattt

SEQ ID NO: 68160 - DNA, 1156 bp, Cannabis sativa
agaggttggagccgtgagtgagtatttttttctgggtttagattcgggtagaagaagttgcaaaataaataatagtaaaaacctagctgccattaaaggatagaaaggaagaagcttgacaatctttagaaccctagaaaacctagctgctaccatttagaagcgaagaaaagaaaataaccccatataaccctagctgccattagagtgagaagaagaagagaagaaattaaaagaaccctaaccctagtagctgcggctgtaaagaagaagaagagaaaatattagaaaccctaaccctaatttgtgttgctgccgttagagagaaagagaaggaaaagatatttgaaaaagtttgaatttttggtgaagaaatagttgtggtttccgtgtgtttcatctagggttagaaaatacattaccttatatatatatatatatatatatattaggttaaggcttattagggtttgattttcttgggttgaagacttagtgggccgaaactttgaaggaaataaagacttttgctttgaccgaatacacattagaggaataagagttgacctttgattggagagagcatattgaagtcttggactgcctttaattgtgtggaccgaaccatttattggtgctcttgatattgtatataacggatattgggctgaaacaaatattgcaattgttattttcaataataccaattatttgtggacgcataaaataataaatttagaaaaatactaattttcacagtattgtattaattgtttatttaagtgtgttagttaaaactaaattccaacacttccaattcctcaagcaaatccacacccaaaatcaagaattgaaatcaaaagagggtttgagagagagagagagagcgggaggttcgggtaagtggccaaataaaccagaaagttccttcatttctcaaaattttacctcttttattaaatgtaaaaaaataagggccaaaagaccattttgcccctagggccaaataacacctttaaactcatacaagggcatttatgtcattcccacacaatttcgaacccaattaatttcagattatccacatataaatataatgccaataatttcaatccaaattgcatttcgggcccgaacccggttcggcccgaaatac

SEQ ID NO: 68161 - DNA, 797 bp, Cannabis sativa
taattgatcaaagtctataacaaatattagcaaaactcaacacaaagaaatgcaattaaaaacagtaaaacaaactgaatttaactagagagaatgaaatcaagattcagccattaaggtactttccattaatcaaatatgcaaggaatgtttatacaagagtgtaattcaatcaagagtatgaggaggagaaagatacatccaaaagaacacaccagaaactggtttaacaataccactatacaactctctctctctctcaccctttgcctctcttgtttctgtaaattgaaaaatgaatcacacttagctaagagttagttgagtctatttatagataaaccaacataactaacttaaccataaaaccggtaacatagttagaaagacctaagtacattcagctaaggcttagtttctaggccactttacaacagttaataatgttataaaaataatataaaatagatacgaagaaaagaagaagaagatgaaaaagagaaagagaaactaaatgagaatttttttgtttattttaatagggtggactcctatttatacaaaaatatgacaaagaatgggaaactaaattaatgtaataaaggaacatacaaccaagcaacaatggtgataattaatttagtatttggacatctataaataatatttcataatacccccttgaatgtccataataattacctcaataaaaacctttttgaataacttggtgaaaagaaaaagagtacagtgtaaaccaactcccattatttaggcattcgtagagatcttctaat

SEQ ID NO: 68162 - DNA, 559 bp, Cannabis sativa
  modified_base (130)..(131): a, c, t, g, unknown or other
aaggcgcaaaaaagcctttttcagcaagcacaacttttctatccttcaaactatacaacctgtaatgaactatatctttaatttcctttacagttttcaacacagtataacaactatcattatagacacnntggtttctattcttccaaatcatataaactgtggcagcaactacaagaattattataccagcatatttacctgacaaccagcacagccaacaatttctgatctttattaatcagtaaatctgattatattaaaatggattttatttaggtcacaaaactcaacattatgttcaattttttttaattaggtaatgtaattttattttttaatttttgaaatagggtttgtgattttgatctttaaaaattcttttaagctattgtggctacattagtttactctttagatgtgatatatatatatataagagaaaataaataattttattgttatacgtattttatgcctattttatattgatctctctatataagaattgtattaaaaaatattttgataaaatttgagtttgattagagaattaatt

SEQ ID NO: 68163 - DNA, 2183 bp, Cannabis sativa
aatcttttcaaaaatactgtatttttataaaacaacagtagaacacaaaacagaacagctaaaaacaacagtagaacaactaaaaaataacggcaaaaacttaacacagtacacaacataaaacttatacagtatttttgaaaaaaatttccccccacagtataaaagtaaaaaaaattgaaaatttcaggtgtaattatccattttttttttccaaacttttactataaaaatgaactgggcccagctctgtcccattttaactagtatatatcattccaaacccggttgcggctctcaaatccaagtctcttggcggcccaaaagagagcccaatggactcgtcttcctcctcatccgctgccgaatctagcacacccgccggagccaccacttcgccgcttctcctcggcgctcttataagtatagacagcaaagtctcgttccatctccacactctctgccgcccattccttcctcatttcatcctcctcctcctcgagctctcagccgattttcgattcttcttccccatctccctctccctcctcccggctcgccagctccgaccatttctcatccccttcctcctcggcctcgtccttgacctcgccctcgtcggtctcatcaaggtcatcgtccgccgttcccgccctcactacaaccccaccatgaacgtcgctatttcggtcgatcacttctcttttcccagcggccattcttctagggttttctttgttgcatcccttgttcacctctccgcctccgtcttcgtcgatgctctcaccgccgagggcaaggtcgtaaatttgctcattgcgtttgtttgggtctgggcagcggccacttctgcgtctagggtcttgctcggacggcatttcgttgttgatgtatttgcaggggctcttttgggtattcttgaaggtctcttcgctttcaattttctgaagattgagaaattcgtatgaggtaacaaatcttcatagcatttcttccatttgtggaaaagtttgattttttatgaatatcaactgatatcaaaagcactgcatctgttaacagcaattgtattgtatgtactaatttgttaagttcctgatctgtaatcttaatcattgatcattgtatggaagatccaatcattattttgagatacagtacatacagtctttcataggggaattagcaatgtacaagttcattttgaataattgtttcatcaagctaaatgaagctcattctgagtttgatatttgttcctgcatttgttgaatgattagtgtgaacaaattttgaccatggaatagtgtggactgctactatcgtgtcactagattattgtgtactaatttatcattctatatgtttaagctaaattagtttaattgagtgaaacaacttctgcaattacgtttgtttatggatagtgatattctaacagaagtattagtcattgctagaaattatggaagtatcatttttttgtttgacctggtctcactcatctctaatattggctatagaattggaaagcctaatatgagttatagatttggttggaaatcttacttgggcaattattggtgctttgtggcttgtaaatgtggaacctaatatgaaataggatcatgtcaaaaaaaaaaaaatatatgaattaggagtagcccatgaatcctaatgttacagtgtttgacaagaaacaatcaactgtattgagattttatctttggtacttgcaaaagagataaaggcctagagttcaaaattgagttttctgataataacctatctaataatagatcttactttatggaacacagctagtttaaacatgtcataacttcctgtctttgcatatgccattgccagtttgggtgagctatctttgttatgttctttcctaagttagaaggtgtttacatcaacacaaaagtgaattagatatttttactattgttattcctaggttatgtgagaaatccatcattttctgcgaccgataattgggcaggggtgaactcggattttcccttcaagaaacatataaattgattttggtctctttaggcaccttcaccttgcagatgtagttgtatccagtttccttctctctcataacgaaaaaccttatcgctaggtagcttaaacagtgagaggattgtggttgacatatcattgttgta

SEQ ID NO: 68164 - DNA, 1019 bp, Cannabis sativa
tacattatagatagaaccaatctaatccaacattaaatggatgttggatcaattagataattgaaactaatttgatctgattggatgataaaattgaacatccaatatataattagatctgatctagataggtctaaaaacattgaatgtggtacaataaacacgcttattaattacaatgtcatatccatagaagcaagattaataagagatagtattaaaactttataagaaagaaaagattaaaaattgagaaattaatttataaagaaagaacttaagattaagagatctttattattattaataataaatttattaaaatattaaaaaaaaaaatagaaactatatacgatagtttcaagcatcaagctataaacaatcatgatactaataaaaaaaattcaaactataaattaataaatcaaagtaattaaataattaactacgaaattataataaaaaaattattttattatttgcatatatatttttagttatattatatgtttatatttgtgattatactaatttatataattattaaaaaatttgtaaaatgtaatgtatattattttttaatatgcacaatatataattattaaaaattagttataaatatcttatttgaatttaaattcatatcttaaaaaatcaacaattattttaaaataaaaataaaagtcaagaggatagtttatattatgaaattattaatttattctgaatcaatatattattttcgtcaaatacatgcacatatttattctttttttatatatagataatcacacaaaagtaaagattaaatatatttaattcttgctccgcccctggttgtagcattgatgctttttatttttttttcaataaaaaattaaagctaaaaagttattgtagctaaaaattaggatatatattaagggataggattttgtcctgtgattgtattttcacggaatgcattccgtgatgtacggcagccgtcagatgagggacttatttgatctgacggctga

SEQ ID NO: 68165 - DNA, 847 bp, Cannabis sativa
gctaactagctagccatatacctacctattcaattatttcgaaaacttaattgttcctagattcttttaagctagagtcaagtcgccgtgtggatttttttttccattataaaaaaaaccaattaatattaattaaaggaaaaaaaagaacaggcaatatcaatttgattaaaataaatatacgtacgtacccaaaggaatatagaggaagagagctctacgtggtccatttctactgcaagttgtttcattgactcgtttataacccttcaggcatgaacagttaaaggtcccatttacatttatacagttcccgttggtgcacggattttgacctttgcactcgtcaatatctgaataattaaaaaaaaaaagagcaagcttaaaagcacataaatagtaataaagtcatctaattttctttttttttttttaaattaatttttttgaaacaattaagtcaattaagtcatctgttcatagtatatctatcaatagtttgtcggggacccgtttgttgcgggtcagaagcgcctcattccggattctgacccgccccagatatccggattttttgccatctctagaaaatggtttgtaatatcatatctataacattgtttgggtttttcttttcgagaatttgattaaaatttacaataatatattcacaaaacaaagaattcaaataatataatattatagttattgtagcggtcatacatttgtgacaaattaataaaaaaaaatataatagtttgtagtgggaatataataatataatggacatataagaaaaggctatatatatatttagctcaattttttagaaatactattggggtca

SEQ ID NO: 68166 - DNA, 602 bp, Cannabis sativa
  modified_base (576)..(576): a, c, t, g, unknown or other
atgtagatgatgacagtaattttcatgacaaaaagagaataaactaaagagttaaataaaggagtatcttcaaatccaaatataagatcttgctcttaataataataactacacattttgatgatgggattaaaatgaaaaatatttggcaacaacaaccatatgagccaaattgtcatcctataattagttttaacattaactagagagggaaaaaatcactcaattaataagacacacaagcgtagagtaagaacaccagacctacaaaacatgaggtctttagaagagaggttccaagcactacaagaaaagtatctttgtgatgtactgatagttttatgatttattttcataatcttcattgttgttgtgtgatgaaactgatttttcactattacaaaataccttttttatgtcctttgtttatgtccaacaaaaataatgttggacataaaatagttttgaaagattttatgtccaaggttaatggactagaaaaaattttatactatgtctaataattgtggacatgaaaaaataaagagacgttatatgttaggttttatgccctanataaaactctttacaatctgattagt

SEQ ID NO: 68167 - DNA, 1279 bp, Cannabis sativa
ctatcaaattattgtaattgttataaatcaatcaagtatagatacttaattattatctaattattattgtgttctatattatatacaaattagtataaaaaagggttgatcgttcaattaaacatgaaagtcttcatcctcttaatgcttctagttgggatacttgtgctgattatgcttgtggaaaattgactaaaacaagaaagaaggttgccaatcgtagtcagtttaatccacactaaaatcagtagaccttattccactacgttgtgcagaaataaatattttataattttaatcgataattttttcgttatggcttcacctccttgataaaagaaaaatatgatgctcttaataatctcaaaatcttttaaattaatgaggttgagaaatcatcaaagttgttcattcggatcgtggacgagaatattatggtcattatataaaatttggacaacacatgaggccttttgctgaatatttacaagaaaatggtatagttgcttaatacactatgcatggttcacatgagcaaaatggcgttgctgaaagagagatcacactctaatggacacgattaacaacatgataagcagatcaaatctgtcagagctcttatggggagaagcactcatgactgctacgtatatcttaaattgtgttccaagtaaatttgttcccaaagccccttttgagttgtgggctgggagaaagcctagtttaaatcaccttcgtgtatgggttgttctgctgaagtaagtgtatcgggttgttctgttgaactaagaatttatgattctagtttgaaaaagttagattcaagaacaattcgttgttatatcattggttatccaatgcacttaataaaaaactatcgcttttattgtcctacttgtgatacgcaaattgttgaatctcagattactaaacttctaaaagttaatgttgctgaaaatattcctttaacatcttttgaaacaaaggagtcatctaaaggaatttttattcctatatctttttcaagagataataataataacagacttatttctactctagttgataatgctcccattgctgatgaatatattgcttcagatatcaaaaatgataatgttcctattaccgatgaaggacctattattgacgaggggcttattattgaacaagcatctgttgttgatgagggtcctgttatcagagaaattttagttgtggaagatgtcattcaaaataggctaattatgattttttccccctaaactttaacatgtac

SEQ ID NO: 68168 - DNA, 1054 bp, Cannabis sativa
atcaatataaaattaaataaaatacataacaatttcttttacttgttcatatttcacaatcatggaatcgaaactctttccaacttcccaacttccccgttcggtggtagaaccacgtctgggagcggcgcctccctatttgggttcacgatggtggaggtagcccgtcgaactgaaaaaaaaaatgagagagagagagagatgagcgcgagagaaggtcagggcattgcgtgttgggtgttttgggttcttggaatggaggcaaatggatctatggcttcggtgcaaaaatagagagatggtgagaagtcgagcgaaagacaaggtcggggtcctggctccgttgagaaactagagagagtgtgagaggttaaggtcgtggctccggtgcaaaaacagagagaggctgagatgagaggcctcatgcggctgttggctgttagaaggttaagggttttctttcgtttataagagagagaggggaaagagataagggttgttagggtttttgtttgagaagagagagagagagaggtgataattatataaattgtattttagttgggatttgataattttttttatttttttaattattttaaattactgctgtatttttttttttaaaaaattagagtattgatatagtgacgcgccaggtgtgtcaggggacatttacccacacgcgcttggcgtgtcaatataggtctcaatttttcaaattaataaaaaataaaaaaaaaatagattttaatctttagtgacacgcattgcaagagactaacactgaacatttagagtctaattgtgcatgtcactaaaaattactcctatctatttagtgacgcgcacttttgtgcgtgtcactaaatagtgtcactaaaaggccaaattgtagtagtgtaaattaagtaagaaaagggaaaagtattccttataaaaatgagagagaacctttccatttgttttctccctaatttgtgtgggtcccactactttcttcctttctaaaatttagtaaacaatagtatgggaatcaataccatatcattca

SEQ ID NO: 68169 - DNA, 2420 bp, Cannabis sativa
tgtgaaccatgtaacgtaaaatgctatttctgatctttattagtaaatctaattatattgaaatgggttttatttagtgcagaaaacccaacataaataactttcaatttggaaataggtcaagcacagcatccgaaacaaccaccagatcaagctgaacttctatccatcgggagtccctctacctcgttcccacgtaaaaggatacccaatcaactccaagtcttgcaagtggcagtcatcaatagtttgttggaatcccgacagaagccaattgggataaggattaccaccccgtttgtcatcatgacttagaacattgtggaggtcacctataatacaccaggtcaaagcagattcagaggacaaatctctaagtaaatcccaagtttaacgtctgagatgccgattaggttcaccatacatccccgtcaaccgccaagagggagtatcagaaacaatgattttcaaatcaatatgcgagtttgaaaatcccattaaactagcttcatctccaaatctccatagagaagccaaaccaccactatgaccttgcacatcaaccacaaataagccttcaaagcccaacaaaatacgaactctctccatgtaatctcttttactaagagtatcacgtaataatataaaattggatctcttgtggattactaaatccttaaggaattgaaaagcgcatgggttcccaagcccatggcaattccaactaagtaagctcataattcttggtgggcctagaaactagagcccacctgaaaaattgttttttgtcccctcaacaatatcattatttatattatttttaccatcattcattacctcttccatactaacgggcccatcaaacaggcacaattgagtcgttctacgttttgtgtcaattatcaccagcacattgcttgtgacagcttgcaagtgagaatccctattattatggggtttattaatatccacctgagctggcaagtgagaacccatattaatatgtgatttattaatacccacgtaaggcagcatgtgagaatccctattattatgggaattattaatgtccatgtgagctggcaagtgagaacccatattaatatgggatttattaatacccacttgaggctacatggaaaaatcccttttatcgtgagatttattgactgaaacagttgggtcaactcccacattacttgccccaaccaccacggcttgatcgtttcccccaccattcgtctccatggctaatggcatcgacccctagtagtagtcttcctcaaccgcagggatccctgccgtgttcatagccgagtcatcctcaacccctggtagtagtactcctcgctggcagcaacaaattctgagtagttgcccagccacttggctccgatcctatatttacggcaatgttgttgtgctcgcatgaacgatccatatggcttcactatttctgcaagaggcgtagtgaacaaagaaggacaatatccctccccatgacccgatatcccacataagaagcaaaacaatgggacatgttcatattataaattgcattagaactcctctgtatcgtccttcttaactctccttcttcttttcaaaggcttagtgacatcaactgtgaccctcaaacacatataagttctccacattaccatgaaattcttgggatcggactccacaaattttccaatataattacccatattctttaccactgcctcggacatgaatcccggacggaggtcatgtaattgaacccaaatatccacattagttagacggacaaccaatggatcatctacttgctgtagttgctggaacaccagtaaagagcaattaaacgtccaaggacttttgtcaataaccctccgtatatcgacttcatgataaaattggaacaggtactaattatcacccagttctttgacaaacagttcatggcctggttgccacaaggaggccatcaattgttgcatagcgtcgaaatcaatacttcgttgggttaagaacctacccaccaaacaccagcgatcgtcaatagttggtgctggttgaatagtctcaaataaagctaaaacatcttcttcctcatcctccatagcaatattagctctttgctttgacagatcaagagttcccatactactagaatccataaaatgaccaggcagaaacaaaacacgggaaaaaaaacttcaaacaatatgatcaaaccaacatgtcatagagacaagacctaattcataatctaaaagttgtatggaaagaattttcaaaactgtcgttcttttcataactttcatcgatttttttttcgtaggactttcacgagttttgacatgtctttgttgtttgctaaatgcttagtaatttcttaattgtgtataaatttatattgaatcatgttattt

SEQ ID NO: 68170 - DNA, 1262 bp, Cannabis sativa
  modified_base (26)..(37): a, c, t, g, unknown or other
  modified_base (446)..(461): a, c, t, g, unknown or other
aataacaatgataaattatttaaatnnnnnnnnnnnntttcctgattaacataaataactgctatttccaaattaactaagcgggctttacactcaggttggatcctcctggagcgagtcgtccgtttagactgtgagtttgaaggatttcaggatcccatgggctttttttcaggacagtgatgagtttcttcatatggtatgttaacgttctctatgttgtcagccatgaaggacaatgctttattatatgtaaggagggttttttctgagctttttcacgaaggctctcaatgaaagcacaacctgttaaagtagatttttgttaactagatttgagcctaaacaatgataaacttgcacacagtaatgaaaacagtaaagaaaataaaaagaaaaggatgaacttaaaggttttttaacgtgattttgcagttaaaattctnnnnnnnnnnnnnnnnaatcttattagatttctgatacagttccagggcctttttttctcttatgaatttttcgtccctttttcagtctaaattgcctctatttataattccataatcagacagttaagtacagagttgactgtaatctttacaacaattatcccttaaaatcgtggggtttgattacatatcacgtaatataaatgcggttaatatttgaatatcacacagctgtgattagtctacttttacagggtcaaggtactcgtgttttaaacacgttataaatcatgacgttctgggatttcttgataatgaacttggtcgcgagctagagcttttcccctatcttttcgaggttgataatataagcctcgtcgcttcttcgcttgaagatataacacttcattttgaaaattgtagttcttaatataaaaaggtactttagcagttaacattatttgaatgtcagcttctgctcgagagaactgactcgtcaagactacaaatctcacaaaaagatgtctgaagctgattggtgaaagtacaaggagtgtgccttcctatagggagatgggcgcctcgcaattagttgcttaggtttacccgactgttatacttagtttgtatattgtatattatatgctaagtgtcttcacaatcattatacctcgcttacgtctattcatgcataacgagattgatatctcaccatgtgcatccaatgacgtatggtttctcgttaaagcatgaggcaacagtttgtatatctctatctcgcgtaaggccttatagtcggcaagttgtaaatatact

SEQ ID NO: 68171 - DNA, 592 bp, Cannabis sativa
aagaggagtcatctgaatcattagtggctgccttgtccttgcctttagatataagcaaggggcaggtgggcctgatagattgcctctaggcctcatcagcggagtggcgtccccgacggttgccccgtgagccaagcactaacagaaggccctttctctcttctctaaattcttggctatctgggatagaggaacatagttgtccatatcgggagtatgctcgcctcctaggctagcctcctcactagctagggctccatctaaccagcttgatgggcccttagccctcgttgtaatgactgcattttaggatatggattagcaaaggcaattagcgttgagtattgataattatataaatagttattgatttatttaattgttggtcccatttttagaaatgggtattagagttataatttctcgattctagagattttattaaactctagatgttttatttgtattatatatgaaatatgcaatttttataatttttacacggtgatgacggaaaatgcgatggatggccatttaaatcacatgggtaagtttagaacctttttcttagtggagataaatagaatatcaa

SEQ ID NO: 68172 - DNA, 2762 bp, Cannabis sativa
tgaaatggagttttatttaggacataaaacccaacacactatactttgtttcacgacaattttttgacagcaataacacttaaaaactcctttttattctactttcaaaagaaaataggaaaaatatacactacttacaatatttatattgttttctaaaagaagtcaaatattcaattacatccctttatttccacctcccatcatatataaaattaaattaataaatcaataattattaaactaaatttattttatttatatatttttttattaattcttttatttagattgatttgatatattatttaatttattaaaataaatattaaagtatattctttgaacatattatgtcattcttgtttctaatattattggttaattcatttttagtcaaatttgtttcttgatatttttgaaaaagtatttccatattatttattttttagttagaaaatttctcctttattattggtgtaaaataaatttagcgatctcaaataataaattttattgtaaaatattaagtaaaagaagatggaaaaaaatatgtaaaattttgcattataaattttcattgttatattgtctccataaatttattttaaatttaaacaattaatacaatattttcaaaaatcaataattcaatatgaatactaaataacaagtttaaaacgcacagattagttagcaaatatatatatgcataaattttataataataagtttttatttatcgacaagaagatttttgacattttaatataaataaactaagttcttacgaaatcttaccaccattaggagagtctgcccgcttgttgtgctatgtggcagttgatgtcccttatgggttttaacggtttttttcaaaattttacccagaaacttacagtttcttagcagtttccttcagttataaattattttctccatttaactacctgattcttccttgtagtttcaatcctttgccctgttttttcatatccatcatctcaccattgtgcttttttcgttagtcatggatccgctcaccagtaagatgaaggcaaaaattactctaactgaagatgaggagtctgtgtttgaatttcatgatttagaagctattccaccttcgctttccgttgacacagttctgtatgcaaagatccttacaaagaagaaagtgtggctgtctactttgcaaaaccagatggctgagcattgggatgggaggtaccctgttaaagtttctgaatcgtctgaaatgttcatgcttacattcggatgtgagggggataaaattcgtgtgcttcatcgtgaaccttaccatttccaaaatcaccatattgttctgcattctcctgaaattggaaagaatttcacttctgaagatctcaagttcactcccttctgggtgcaagtttatcgtcttcctttcctaagtaagactaaatccttggctattgttcttggtaacattattggggagtatattgatgtgtttgaggattcacttaatgagggttggggaccttttttgcgtatccgagtcaaaattgatgtttctaaacctctaaagagaggtcgcatgatttccctaactcatgttcaagataagttttgggtggatttccgatacgagcgcttgccgaaatactgtatggagtgtggcaaaattggccatccatataataagtgtcaagtttatcttgagcaattggataatggagaagaacctgcccttgagtatcagcctttcattaaaggatctccccttccacactaaagttatgatcggtacagaaccgatttctctaaagttgatgtgtggccattattgactcgacttgcaaaaaaaggactcacttctgcaattccacaattgcaatcgcgtggtctgtctctgccaagacaactattggaaggtgaatcctctcagcaaaatgcaatcaaggatgcggttaccaatgtgggtgttaatgttcctgcacaaattgttgattcaacacctcttacttcttcatcaccatctgttatttttaagccttccaccctcaatcataatgctagcatctctcaacattcggctgggatcaattataaccgtggaaaagcaccactcttggcttaagactctaccaataatttcacagatcttacctccatttttatccctgcaatatcagcatcattttccaacaacacatttgcaacttatcccccgcctagccagttggcttctgttacaaacaagcctcacatgtcaacacgctcaactttatttacaatgacagatgcccctccttccatccctgctgctactgacttcatgattgagaaagaaaatttgcatccgaatgtacaagttaagagacatagtgatggtctttcactgagacaaactttgaagagatgcagaggaactatactgaatgacttcacttcagccttgtcagttgaaggtgatgaacaccacccagtttctcccaattacatggattttgctggtgctaacgacaatacagcggcaactggtttgcagtcccgcaagcagccatgaaaatagttagttggaacgctcgcggtttggggaacccgagtgctgtccggaaactccgtttgcttgtcaaagagcaaaacccctctgtgttgtttgtaatggaaactaaattagcttgtaattcaatttctcattttcgtaatcttttacattttagcaatgggttagaagtccctagagttggtcttagtggtggtttaatgttgtt

SEQ ID NO: 68173 - DNA, 606 bp, Cannabis sativa
tttcattcagtctcccaatctctaaagcccaccgggagaatttgaataagatccagtctcctttccagatcacgaatcagagtgtcaatttttccaaattgtgatctgttacaatgtaagagagcgactcatgtagccccaattttcttgaagatccgggccgacccccagtggtaactaacagacttccaagcagaatccacaactaatctactcctttcatccctagtccaggcttcctcaaacttaaaattcctttgaattttatcctccaaacccccagaaagtagacactgaggacagtgatccgaatttgaggtctgggaagagcagagagccgcctttgggaaaagattaatccacgctccattagctagccctttgtccagggctgatttgacgtggttggatccagagcggtgattatcccaggtcagattgtctccctggatggccaggctgatcagacccctggaattcaccaagctggagattaccggaatgaattggtctctgcctttagatccaactcgttcagattcactcaggacaaagttcgtgtcacccaagatgagccacggtccgccaaatctgtcccctatcttc

SEQ ID NO: 68174 - DNA, 778 bp, Cannabis sativa
ggaaaacaagagagatgaagttatcaaaataggatttatcttcttcaagtattattactttaaagttatgctccttgaacattttagcttgttaaaaatctcctctggtttattcattctatttttgagttatggtttacttttagtcctacatagctaacatacaagctacataatattttgttggtgctgatgtgtcatgttaatgccacaagtataaatttaattaaaattataaattaaataatataaaataataaatcaatataaaatttagagaacatgacttgaaagtaatagtttaggggataaattctatttatttttattattatttgtatgaaaaaaaaaatagaaaaggacaccatttttgcaacatatagccattttatatttttgtatatagataaattatattccaatttgtttctttttatgactgcttagattatagctataagacttatcgtatcattttgtttatttttataaaaatttgtttaatttaattcatataaaatgtcatgtagaatataaaattattacagaaaacatttgtttaatatatggaacgttatgaatatctttattgttcagtcattctacacttctcacaaaaaaaaaggtttcaaattcgaaacccactttctccaattaaaaaaaatgtatatatacatatagaacgtcatgaatactcttattgttttagacgagagcattgttatgggacactaaggtggcgtttggttggagggaatgaaatggaatggaatggaaa

SEQ ID NO: 68175 - DNA, 1104 bp, Cannabis sativa
tcaatctaaatcaaatactaaattcctcgaatctgtaattttggtttctggatgttccgacattactttgtaggattctgattctacaggaaaatgtactactattacagaaagtaggcagtttggtaattggcaatcccaaaggaaataggaatcaattcattcctatatgccatttttgtggaagaaaaggtcacattcaacctagatgtattacaatgcaaaacatgtttaattctgaatattttggaaataaatatgtttctcaaaaataaaaatggactgtcaaaaataaatgtttgattgtttcttcttgttttaaatcaattgcttctcaaatgtggtattttgacagtggttgttctaggcatatgacaggtgaaaaagactatcttgacaacattataccagtgtaatgtggagatgttacttttggtaatggtcttgttggaaaagtaataaggatgggaactcttaattttgaaggtctaccgaggcttaagaacgtaatgtcggttaaaggactaagttttaatttccttggcattagtcaaatttgtgatcagggttacactattaattttgatagtagtcattgttattttcttaataatcaagatgaaactattttgcaagggttcaaatctaatgatatttgttgcaccatcattacatatgctacttgtcactctactcttgataacaccactgatgtaaaacttggacacattcattacgaaaatctaaaagaattattcaatgtagggattttcacaggattacctacattggataaagaagctctaggcaaaggcggaccatgtcagttcggaaatcaaccaaaaacatctcacagaaatgttactgatatgtacacttttggagttcttgaaattcttcacctggacctgatggtccaattcagattgaaagtttgaatggtgaaagatatttttctatgtatatagatgatttctcttggttttcatgggtagaatttctttagagaaaaagttgatacttttaatacttttaagtatgtttgctttaaattgaaagttcaaaaaaattgcagcattagtaagatagttcgttttaagagtg

SEQ ID NO: 68176 - DNA, 516 bp, Cannabis sativa
tataatattatatactatatatagctaaaaacaataaaaaaataaaattgaaaaagtcaaatcaaaaggtaactaattattgattgtgcattacatataggtaaaaaaaataatatattaatataaataataaaacatagattttatttatttaacaaataaaatatattagttaaaatcattgtgtataaatatttttttaaaaaataaatattatttactttttaaaataaaaaagaaaattccatagacacataggtgtggtcctatattaaataatgaatcaataaataagataactaaaatatatttataatatttttaattgattgatacatatatttattaaatttataaaagttttaaattaaatttaggagaataacactaagattaccaatgaatatagtcactattatcttaaaatagagacgttggtcaccaaaattcataaacataaaatcttatttttgcacgcattgctcgttgttagcccccctcacatttaatcctagc

SEQ ID NO: 68177 - DNA, 1129 bp, Cannabis sativa
accgtgttattgaatattagtggtgattaatatttttttataagtgatattttatgattagttagtgattatattctttaaaatttatgtatttagcctctctaacgatatagtatttcttaaaaattattatattaaattatataaaacctaatacttatagttaaactaatagtaatattaacacatatgagataccttttaatatttttttttcttatataagttttaatacttaattatacttataataataatataatactaaaaaaaatactaacaattcaaatatatatattaattataatttatatacatgtatacaataatatatattattattattaattacagtttatataataacttctctattcgtttctattttttagtaattttattctttattaacttgcatatataatatatttgattgttttgttacgatttaatacacaaacttaattatattaatattgatttacaaattttattatgtgtatcaaatcaaatctaactcttcttcttcttccttttttttttggtttgataaaccaatctaacattacattttattttttatatgaaacctatatatatgtgtatatatacatttcttgaagttatcatttttcttttgggttctttttctttatgcatacatgtgaatgtgataataaagttggcacgatttatctgtcaaataaaataaaataattgttatatagttagggcatggttaagttttcttattatcctgccttggcatatatgcatatatatataaatatttatactatatatataggcatggcattatatatatatatatataggaaaggtacgttttcgtggtccacaaagctagaattattaataagagagaaagagagattttatttcttcaacattatgagtcttctcatatgatcatattccccgtatatatataaaatctctaaaagaaaagattagagagaaaaccctagaaagcaagaaatatatatataaatagtataattaatatgataattttatctttttgacgtttgaaaacattggaatctatgctatggtggaaaagaactactttggttgaaaaatcaaccctagccacataacatggact

SEQ ID NO: 68178 - DNA, 1428 bp, Cannabis sativa
caaacgaaagtttttcaagaagctcttttgaatatatatagagtaaatgtattgagtttaatataaattcaaatttataataaatatcaactacagatattaattgactaactaaaaaatatctctaagtattattagggttatttatataatatgcaatccgtgatctcaaatccttactattcatgaccaaatcatttgagactagactaaataaatttagtatcaatgatttcgtcaattcggcccgtttataattctttagttcgattttagttttaaaattcttgtccgtagttcaaactaaatcaaaccgtctaattctttatataccttaatcagggactgacccacttgtgttaatgtggggctacaaaaatattgccttttaatttttttttaatttgataattatagaccaaaataatagagaagctctcacaaaattaaataaatctagtaagagtgattatataaatattttttaataataaaaagtgtccgtaccttaatgtgatttttttattgaaaattgatatttacggataattttaaatatactattgataaatattttaatattattttaaaaatatctatttttattattatttacatattataagcattaaaataatgaaatttaataaaaaaataaaataaaaaatagatcatttacaaactacaaatgatgatttcgaaccaaattaatctgttggtttagtttgaacatttaattgacatggtttaattttaaatataaaaaatcaactttattaatttggttccaaaaaaaaaaaaaattagactaaagcaattcatgaacacccctaaatactataacaacaaataaacaaaaacaaattcccttttcccatctatataagaaatatctccaaattgtactaactaaaaaaaaattctgactaaatactaacatgtacccccaatataagatcacttgacccattaaagacacaagataactttatactatctcttcatgtatttgtggttgcttgttttgtcataatttgttgttgctcaataataaatttattcattctcaatcgtgttttaatttgatccaattcaattaaatcatatttttttgtacataaagtttgcatgtaatgttagttattggagaatatcatcttacatgaattaaatataaaattattattactaggtaaaaatctgtatttctagtactgaaatagcacaaaagttagagttttagaatattagagctaatatctccaatttaacttatgctgtcaatcaagcttaatattataataaaagggtaaccgttgaagcattatgaagtaaaaagaaaaagggtgattgagaagaaagaaacaaaaaaataataaaagaaaagaaaagaaaagtgaaaggtggtcattataggcatatatatat

SEQ ID NO: 68179 - DNA, 617 bp, Cannabis sativa
gtgctccaccaaccctcacttagccgcatttcctgattctctattaaaatgcactagctttccttgtaagataatttttgacatgataacttcaaaattgagtcatggctgtgagacacacttgatctgtctcgaaattatgtttcaaatgcaagttgaaccagatcatttggataaaaattgacggagttatgcctattttactaaaggtagtttatgctatcttgtacccgttgcgagcactaccatggccaaatggcgaaggttggctatgcatgttctcgaacccctcgggctgtgtttttacttggattttgatggtgagtcttgtttttggaggtctcgggacccaaaaatatcatttcgacatctgaaaccctaataggtgaccactgccaccagttggggctgaataatggcacaggtcacccatggcttgtgggaagccatgggtggtgtctctcacttgtatttggcacatggatattaaaaatatagtttgctcaataaattcctcttccttgtgtagtaactaacttgtgccactttactatggcattggtctccaattttggagagcattgccattccattctcttatggcacaggtcacctaa

SEQ ID NO: 68180 - DNA, 712 bp, Cannabis sativa
ttaaaaaatccaattatttcttccaacaaccgacgggagataggagggtttactaatatatatacctacgatttttaccaaaaaaccgcctctaaatgacaattttcgaatctggtgggtgttttcacaccctttagcttccctttttataaaatgggttaaaaaaatggaagctaaaggcccatatagtagtagtgctttgaaaatgtctaactcgcattctctactcgactcatgcaagctgctctcatgctggaagctggtcaggtgtcctcgcgcgtcctggttgaatcttctagcctctgatgactttgagtacctaatctccttgcacaattcattaagggtagaatcttctgtgcaggtgatgaagtctgccacgtgtcacccaagtggacgccacatcaccttgtgtagaaatttgaataattctagctcggacatctcaatctcatacctagctagcccttggacccaaggaatcagaatcctagcccttggatcgggcatctcaatcacggacctagcctttggacccaaggatcccaattggacccctgacgcccaaccaactttctcttacatgtcttttttagtcctcaattaaataaaaaaattacaattgacctatatataaaaataaaattctactttttttatataatataaaaataaataatattacacacggcaccttaatcttctttgaata

SEQ ID NO: 68181 - DNA, 588 bp, Cannabis sativa
tttgcatccatatgtcatagagtacaaagtgtgacctgttgacgttctctctgttgttttgtatgcccaaaaaacccttggaagttctttcagccagtgtgctttacaagcttgaaacttctttttgaaggttgtcttcataatctagtaaacaccctccactggtctgtttgcttgaggtctagccacaactataaagattttaattattctgtgtttgaacttgtgtctgttctcgaagttcttcaatcaaattcagagattcttgatgtaaggcatgattttgagtagggtcataagtctctctcttatgtaaggtattgtggattcaactaaattactacttcgcatccacgtgtcatagagtacagagtgtgacctattgacgttctctctattgttctgtatgcgcaaaaaacccttggaagttctttcagctagtgttctttacaagcttaaaacttctttttcaaggttgtcttcataatctggtaaacaccctccacttgtcagtttgcttgaggtctagccacaactaaaaagattttaattattccgtgttttacacaaaaaatagtgaattgatca

SEQ ID NO: 68182 - DNA, 863 bp, Cannabis sativa
taattatttttcaattattcaaaagtaataccggcagaatgccttttctgccggtaataaccccattaataccggcggtttggctcctccagtattactttcgccggtactgagtgaaaatgttgtagtgacttatagtattaggttttgattattgtttagttttatttgtgcaaatgaaaacctttgtgtttattagcatagttttttatactgttaagtatgtaagtgagttgatttagtagagcattaaagctcgttttggttgtttaggtagcaagaaaatatcttcaaaagatttattgtaaacaactgataatatttccaggtctgagcttgttttaattagcttttgttgttcggagttgtttaatttagtgagaattctttccctttcatcaaataaaaaaagttcaattaattatttattatgcatataaaaataagcaatcgtgcttaaaatatttaaattttatttttaatattaaaaactattttaattttttaaaaagtaacaaatagtcctaaaatgttttattttatttttctttgtgataaaataactaaaaatattatacattatttattcaaattttacaaaacaaattaattaaaatcttaaaatcacctaaactaacattaaaattaagggaatatattttatttaataaaaatattagttttaattaaaaaagaacattgctattgagttgtccaacaccttttataagttacatcttacaattaattaatgacatttattattttcttaaattacataaaatttaatacttaattatactaataataatataatattaaataaaatattacacatcaataatattttttaacaatttaaa

SEQ ID NO: 68183 - DNA, 652 bp, Cannabis sativa
taaaaaatcatatgtccccttatccgtgggattttgctcctatttataagataatatgtttgtaattattttacatttaaattcaaatcgtaaccgttttatggaacgttgttagttcccatgtttcattttgatcacgtgggggataacaataagtaacaacataaccgtgtggtatccttatccttaaagatagtcactgttgatatggacaattacatcttgcttaacctgtagatggttaatgctgatttgaataatagcatgtcttccagcaatggcatgagcactagtgtactgagcaaacttaagaactgctctttgactataacgccttgcagactagacgatcatgtctcgcatatttctcaattgttatccttagctattgtaatgtgaaaaatacgctaaatgttgataaatgatctgtctcgttgagtttcttatgcctcgctatatattgtttgaggttgtattgagtaacttcacttattcctttagaataaacgaatcttgtcctcggatctatgtattctgaggtaggttgatgtctcgtcaatacaggtattaatggcttgtttggtacgcaggactagattggattagacaggctaatttgtccaatccagtgtttgggcatggcagaaatctg

SEQ ID NO: 68184 - DNA, 547 bp, Cannabis sativa
aaaacaaattaaaaaaatagtgtcataattataagaagcatatatatgagcattgttattgggtaccagtgttgctaacacccttaagacgtgtcgcattgtgattggctagcgatactccctaaaagttattatattaaactatatgggacccaatacttaattagaccaataacaatattaacacgtaaaaaagtgcttgacactaataccagaacctttcagcatttctccatatatatatagttgtccaaattccattccacccttttcaacctagtctattggtagatgcgccacctagtaattataagcatgaaaacttaagcactattagatattattagagcattactactatttggtattagtggtgtctacgatctctagacctctagacatgtcgctttatgattgattaactatattcttaaaatttattacattaaattatatgagaacccgatacttagtttgagaaataataatattaacagataaggtggtgttagatactactcgctctttttaacattagtcactctca

SEQ ID NO: 68185 - DNA, 843 bp, Cannabis sativa
  modified_base (628)..(629): a, c, t, g, unknown or other
ctaaaggaaaatagcgaggcaccggagaagagtaacacataccttagcttatagtaagcaaactaagtataaaagtcagatctacgcgaagaacaagaatgcgagatgaccatctcgctacaaggaagctttctatagtttcatccaactaacaggagtgagactcataacccatgcaagtcagaagatttctatatacccgcgattgacgtaagacatatcttgttaacctcggaaagaagaatggttccagctcgccattgggatcactaccatcaagtttctatcaagacatctctagatttaacaattaaagacgtgtttaatacacgatatttttgacccagtaaaagcagaaaaatcacagctaaatgattttcagaatcataaaccacatttacatttcttgatatgtaatcaaatcccacgatttaagggataatgactgtaatcatattttggtcagctttgtaattaactgccactatgcaattataaatagtggcgaacaatctcaaaaaagggatgattaaactcttatgcaagaggccctaaaaaaatactaagaaatctgaataagattgactcgtggacaatgcagaattttaactggaaaaccacgtaaaannctcggtgtgcatattttatttttctatagcttttattatttccgtgttgaattaccaccatgaggctcaaattcagttaacgaaaatctgcattaacaatgagatttattagttcgaaatcccatggaggagggcttatgggacatttttgagttgctaaaaccttagttatattacaagaacacttcttttggccccacatgaaaagagatgt

SEQ ID NO: 68186 - DNA, 1209 bp, Cannabis sativa
tagaaagggagttggtgggtcctagactgcttggagaggtccactagactaactatccaaaaatgagaactccaaagaggtactcgttctagataggaagtcaaggacgacgcaggaagagagacgatagaaattaacatcaaactagaaggatttggggcaaaatgaagaatctgccagcacttctgttgcaaatcgatttactttagaaatttttaaacaaaaatttcgaaagattatgcagttcgtggtgcctaaatctacctaagatggaaatcgcacaattaagaaaccccaatctcatccatgaacagagcatgcaaatgcaattcaaaaagataaattcaaaaaacatgacccatggacaaaaagaaaacatacctggtaatgatattgaagaagttaagttgatcgtcgttgggtctagctggggaagttgatcgcactgatcacaaagtcgagatgtaagagcgatcagtgagtcaatttcagtgtcaaaatccaggctcgcaatttcttctgctgtaatagtcttaatcactagagaaggaagatgtgggaaccttcgtgcccttatccttagcagtagacgaaggcaaaagtccatgacatttcttaggttaatgaagaaggctttgctttgaaggagatttgaagttctgaggattgcagggaaacttgtaagccttagaaagttgaaaaattttaaaaagaaggaaaagaggtaacttgaagttactacaggtatctatacccaaaaaggcgatggacgtgaggaggatatagacggccacgatcttctctccagaaacacaatttccatccaacaatctactcgtgtcctagcatttaatgcattctagaatcaatgtgtgaaacaatgatgaaaatgctcattctttggtttttgcacaaaaaattgaacaaccatcaaattatagtcatttctagaagatgactcctcgatggtcgtgccttatcacacacgcttgtctgacacgtggacacatcatcatcaccgacgaaagccagcttttgcagtcgagtggcattttgaaatatcactatttcatttttcaatttgcacatgtccaaattaagagagtggtgcaagcttccatcatacacaacattctggaagcttgggggtaaatattatccgtgtttctggcattggactggtgaactccaaattaacattcaagaccc

SEQ ID NO: 68187 - DNA, 2980 bp, Cannabis sativa
agggttcaaacagtctgttgcacttgtataaatggttgttcgaacattgttttttacattgtaatttattctaaatttctcaaaattttgcaggatgtcttaaataactataacgtacacaactatgaaaaaaattaaactaaaaaaatttgttagatgccaaaacaaataaaaaatatatcagtgtacctcttttagggggtgcattttagaattaccctataatatttaatgctacacaaaaaattattgtggatgcttctacaatgcacccccttaaaagggatgcactgatacatcttcttcctgtttcggcatccaaaagaactttttagtctatttttatatatttgtgtacgttatagtaatttaacatatcctataaaattaaaaaaaaaaatcatgatatagaaaataatgttcaaacaatctattttacacgctataaaataaaatagtcacgcgtgcaatacactgtttgaaccctgttttcagcatgttaaattttcccaaatttattaaaaattttgaagatatcttaaataactataacatatgaccataagaaaaaaatttaattaaaaaattattttggatgaatatcctttaagaaagtgcattgtaaaatatttttattattttgtaccttatcgttatcattaagattaaagggacttaattgcaaaaacagttgtattaaagaaagaaatgatacatggtaagaaatctcccgcgtacgtggagcaggataaagcttaaccagaaaattaaatcgccgtagtccaaatattaaatcgccgtagtccaaataattgagcggcctcaaattgctcacctctctctctctctctctcttcagtttgattttctttcttctgtgtgtttaagctcagtgatcttcgtctatggtggttggtctccgttaaagtaaagatgaactctaacccttccaataatccacaatcaacgacgcccgcagatgcctcagccaagaagatcagaaagccctataccataaccaagtccagagaaagctgggccgaggaagaacacgacaagttcctcgaagctcttcaactgtcagtatatatatatatagttatataaagtatatatgtataactattttactttcagttctcaattatgttgatttgaattgaattttgtacaggtttgatcgtgactggaaaaaaatcgaagattttgtgggttccaagacagtcattcaggtttgtaagctatggcaatacaattttttaagagaacaaattacgagtttcttcgtctcgtttttgggtttgagttgaattgatcttcttctgcagattaggagtcacgcccagaaatattttcagaaagtgcagaagaacgggactcttgctcatgttcctccaccacgcccgaagcgcaaagctgctcacccttaccctcaaaaagcatccaaaaatggtttgctcatgttaatgttaaagttagaagataataatatgccattttgtgtagaattcacgctaaacaagtattttgttttatgatttgggttatcttgtattttcagttttggttccccttcaagcttccttagcttatccttcttcaatgaatcctatggtgcctgcgtattcaccatgggatgaagtttctttgttgataagtcccacatcaagtaaaataacatcccaggaagaatttggtaatcttcaagcaactgaaggcatgcgttttttattttctttctgtgtgttctgtattagtcgtagttttgtggttttgaattttgttaaaggggactttcaaatgcttattatggcatacaacgttactgattcagctgatattgcatcaaagggggctgcaaggaatagtaacaacagtatttgtggcattgcaagctcaagtagatcaatactaggttctgagataccaaagcatgggaaacaaggttctgtgctccatggtaatcatccaaattataattaaattaggctgaattatgttgaagatgattaggttgtttgtcttttatgatcttttatttttcctatcacaggacccgattttgctgaagtttatagctttattgggagtgtctttgatccagacactaatgaccatgtgcagaaactcaaggagatggatcccattaattttgagacagtgagtttcttcttcacctttttcgttccttcattagctcattctttctttctttcatctagaagcttaaaagaactagttgcaggaagtatattttagttccagtaattttctattgccagtttgggattcagacattaatgctttatatgtcttctcttgtatcatgctatctgaaactggagaatttttgtcactctaataagaaagtgtacaagaaatgagcattcctattaggtagtggcatgttgcaagtgattactgaagttcccaaaggtagcataaagttatattggcaaccaattgtcagcagctactatgtaaaacattgatcatgaacgctagaatattatttatctctggggctcagtaatagtacttttctttgttctgccttattttatgaattggatcatattgatacaacttatagatctgatgcattggttcaactattaaaagcaggtttggttcaatgaagccgacttgtctatatagtgaaagttgtcacaagtgaaacctcgtgttacttttaagttatcatgttagacttcagaacagaagaggttactggataatgtgatacattttgtattgcccacattagcacataatttattcatttgactaaatttgcttcaggttttcattgtagttacatgcatctcatatttctagatttgttattgttaaaggtgccaatctaatgtaaattagtacattaactgcataatttttgttgcataataaaattgaacatttgaagtaatgtgcattattgtattggcgattcttgcaggttttaatgttaatgagaaac

SEQ ID NO: 68188 - DNA, 650 bp, Cannabis sativa
aatttctgcctccatgatgttcctagcacagggctcccggtcctcgcaatcggaatctgagtcatctcccttttgtctttgggagactctagcgatgtctttgcagaggatcgccaattcgtctaagattccctcattcaaagtttcccttgacaccggtattgcctgcttattcttttcgaggtgcttccttaggtcaccatgttttttcgctaattttttatcttaaatcaaccaggggatgtcttcgaattttcctccctctttccccaggctcttggtgcacagacacactcttttggtcctctcggtcctaagggccaagactctttcaagggagcttgtccctctgcggacctttccctttcaagaaatcagagcggacctttcgcggatcctgggcctttttgtttctctcggagattgaagtgagatttttcttagggtcctccttggaaggataccgtatgggacttggcttcctagttttgggcctttgggtgcttggcgaggactcttcttgtgtttcctctagtcctgcaggcatgactttgggatgcacgtggattccaactgtctccatggccttttgcatggcaaccattatttcttgcatccttctattttattctttttgggcggctagttcg

SEQ ID NO: 68189 - DNA, 558 bp, Cannabis sativa
  modified_base (331)..(332): a, c, t, g, unknown or other
tcataaataatactcattaaaaatgcaccatgttatatatatccttatgtattacaatgcttatatatatttagagaattgctgtgtagataaatagtaataattcagataaatattttttttacagataaactgtctgtatgcactatttataaaaaagtttacattaaatatttttgaattatttacagtataattatacttaaattataattttaaaattttataggtctttaatctgttaagtggtaagtaaattgccacgtagtaatttttgattactttaaattaataaatttttattttttatttaaaaattattttaaatatnnatactaataaaaaaataatacgtaaatttatacttaattaaatataaattaaatactattactattagaaattaaatttataaaatattaattgtctacaattaaaaattaaattcaaatatttatggcacaaattatttaaatttttgtatatagaatcgtatatttaaataattacataatttatttgcatttttcattcattcacttcttttttttttttttt

SEQ ID NO: 68190 - DNA, 666 bp, Cannabis sativa
gcagttagggtacttttgccggcgcaacaatgcgccggcaaaagatgattttcttgtagtgtcacttcgggggaggtgagcatgcatcaatagctaaagggacttcactacttggtgtgtttcagagatcggattggcaaattgaattataaatgacttcgactaagttttagaggaagtctaaacttgtttaagtcaattgtatttataatttttgtgactttactaactgatttcattctttgagcgtgatcccgtgaactagtagtatttgaaggaatattgatacgtccacaactcaacccatcatgatcttgtatgaggtcaaagaaatcaacaacaaagttcagacaagtaggctctagtgtgtttatgttattcaagaggacctttgggttgggtatgttgtaaaaactacctgattaacaaaaagttgataacatagccctagggagtggtgaaccgtaggagggctacgcttgagaggggggctctcaaggactggggaagataggtgggttatagagctaagagaggatcgaatatttgtccattgggattgggcatggatgagcctctactgagccagcattgatgaaaaaataacaaaagaaaaacttatcatatcgtaacattaaccggtatacgattaaagatagctagtta

SEQ ID NO: 68191 - DNA, 881 bp, Cannabis sativa
gataaactttctctgtgacttgaagaggagtccaacccgtagagatcaaggtttttaccacttccaccaattcgtcccttcatagaacacacgagcaagagtaacgatggcctttactttcaagagtattttatactcctattcttccatcgagatacattacctttcaaatagtcgaccctttcaaaagacatgcttctcttattaacatgaagagaagagctaaagccatgtgattgtcatctcggctagagagagagaaggtcgaaccctctttaatacttaaaatctttagaaagtcaggttgattatggcatgccaaagtatatatgctgatgtagggttctctgaaaagccttagactatgccattcgagcaaagtgatgaagattcttagagtgttactatcattctgtctcaaactgtgatggaagaagtgacttttgtttgaaatgacaaaatatttagggagaatatatgtattcttagaccaagatgacagagaagttacctctgctagggctgctccagagaagcatagggaatcagtagattgttgacatccatgctgtgttcttatacttgggttcaaacttagtggagcaattgcatgagtaaggctcctcacttcttgccaatagtgaggccctgattggtgttagggctgagaacatcctgttgcagcgattagttaggccagtgtattcaataatgaagtttgccaatgcatgccccttgattgttgttcaaggttgataagtgatctcaaattgacctagttcaactgcctacttgagtaggggccctgatgcttctggtttcatcagaacttgccttagtggttggtcaataagtaccttcactatgtgagcttaaaaata

SEQ ID NO: 68192 - DNA, 1194 bp, Cannabis sativa
ggtaaattccaaaaaccattcgctattcttttaattattatattaaattaattcattattaatggacaccgtccactataattagattctacctaaagttttctacaagagtactacatgtttataagaaaacccaccccagtaaccaaatttaatatatagctcattattaacctctagaatactagcacaagatcctaacatatagcggccggtttggttggtttctaacttggatgataattaattgtaaattgtattaaagattaagagagaataatattatgggttcagctactagatcagcttgggttgtggcagcaagtattggcgcagtagttgaggcattgaaagaccaattgggagtttgtagatggaacttcgttataagatcattccatagccagacaaagaccaatataagatcattctctcaggccaacaaactctgtcctcactcttctcttgctctctcccaatttttaactaaatcagatgacacttttaagcagtctgaagactccatgcgaaaagtcatgtacttcaactgttggggctagctagttattaatttctacttaaaagtataattattaaatagtatgtggagccccaaaaagccttttcttatatgatgtttaattgttgacatatcaatcccatatgtttctcatattttatgacgcatttgcctatataaatataaatatattattttaaaagaaaatataaatatatctttatctatattaaaaatcattatatgacagaatgttatttagcattcttatgtttttccattctatcaaattttaacagaatatatttttgtttatttgacagaattttcatagataacttttaaataaattacttttaatccataacggtaaccttaatatgaattcacctatttagaaacatcaattcctttaaaactataacattgttgttgatctgtgattggagatgactcctacgagaatggactatcgtattcttaatcttggatttcgtctatcttccaattgagatttcgtttgtttcactggatattttctcaattaatttccgttttcggatggagataccgctctccaatcgatttcctttattgattctctttacatcaagagtagtcttgataagatgatatcttagagtcgagtacttccgagtaatagaaggttgact

SEQ ID NO: 68193 - DNA, 933 bp, Cannabis sativa
  modified_base (770)..(771): a, c, t, g, unknown or other
tatgagtgacatcattttgtagtaaaaacttttaaatatgtatctaaatcaagtttcaaaagaagcttggaacataaaggtctttgataatttaaaacaatgccactactatgttctttgttccttaaacttctaaatatgagaacttatcttgtctgtggataagatttgctcacagttactgactttcttaggtttatttgtaaaccttgcaagaaattatgaatatggaataacaatctaaaataatcaactatgtgttaataatcacattaactatattaggatgaattcatacaaaataaattaaaaatttattggtgataatgaagtgtgatttatttttcttaattttacagtaaaaatctatacaatctagatgaagttatcagaataaattttgaaaatttctacttgtattgtaaaaatatatgaatagtgatgtaataaaatttcataattattaatacatagttttggtgtttaaatgaatcatgtttttcctaatgtataaacatgcttaaatatgaaatcctattagacaaaaattgcctgtgggctaaatttttgatttaataagattagatttagatgtagtttcaatagatttacacaattgatgaaaaacttaaggtttaatatttctatctcaatgaaaagtgtgaaacatttaattattttataaatatttcaaaattgtatcctttaagataaaattattaaattaaatctacataattccctatgggataaattaagagaatttaatnnaacatattatcctaattaattatataaacataataaaattcttgtggggtaaagttattacacctatataattaattataagttatgtatattaaagtaaactttaattaatatataattttatataattaaagatgttgtggctaatccctaattatttaa

SEQ ID NO: 68194 - DNA, 722 bp, Cannabis sativa
  modified_base (48)..(48): a, c, t, g, unknown or other
  modified_base (291)..(297): a, c, t, g, unknown or other
aagcaaaggttaattacagctccagtgttacctctgccttctgacagngagaagttcatggtttattgtgatgcatccggacagggtctgaggtgcgttctaatgcaggccgatcgggttattgcctatgcctcccgtcagttgaaagattatgaacatcgataccggactcatgacctaaaacttgccacagtagtgtttgctttaaggatttggcggcattacctctatggaaagagatgtgaaatttatatacaccataaaagttcaaatatttctttactcagaaannnnnnnatatgagacagaggcgttggttagagttggttaaggattacgattgtgaaatcctttatcatcctgggaaagccaatgtagttgttgatgccctgagcagatagggtcctaggcaagtagctagcatggttcaaatttcacctcagttagcaaaagatatggtcagatcaagcatcaagtttgttgtaggcaaacttcataacttaacgctgcaatctgatctgctagaatgtattaaagatgctcagctaactgatccaaagctagtaaaagtcagagaagaggtttcagttagtcaagctaaagactttacagtatcagattgtggaatgttgttgtttaaaaccagggtctgtgttcctaatagtatggaacttagaaatgaaattcttgaggaggctcataccactccatattccttgcat

SEQ ID NO: 68195 - DNA, 787 bp, Cannabis sativa
aaatctttttgaaagaaatatgtctggagcttcgatttatatgtttattttttttttaaaaaaatatatgtatatatatagttgcatgatataataaggtttccaattaatatataattttttttaatgtataagaaaaagaaattatatacatgaaaaggaagtaacaaagcttaattatatccaaagcctttcgtgtcactaaaagggaaaacagaagaaaaacataaaaagtgagattctgatttgtatggacatttggtcttatggggatatcaaataataaggacttatgataagtttaaccacaaatttttgtgttgaagatgattcctaccaccaatatcaattgtctatataataacttgggcctatatataattttttttttgacccatgcattggcagactacttgtatttcggctttgatttggttatgttctcttgatttaagacttagtgacctttcatgttttggaatattgttcacagttgttattttttgtgcagttaaaaacccatgtttgcctcacttatatcaagtgatatgtctagattctagagccttactttggcttctagttccatggtttttattttaacactgccgtatatagattttttttttaataaaaatcatatattaattactaaatccgatcaaaacaatagaacgcatttcggaggaacagttctccaactgaagcacacgacctgtacagaaacaaaagtcttttgttaagcaatgagccaacttatttgcagatcgttttacaaaacacaaat

SEQ ID NO: 68196 - DNA, 1237 bp, Cannabis sativa
attttatgttgttcatattttatgttggtaacagtagaacgtgccgtttggtcgatagatcacattttcttatgttttagaattttagtagtagcagggcaatttaaatagacattgggaatgtcagaaatatttgtggtatagatttgaccaaaatacccttaggtgataatgttgcttcttagtgaaggaagggcaaaatagtcttttgcctttatttgacctttgtcttttaatgacctaatagattaatttttgatattaatcagattttattaattgaaatattaataaaacatgaatttcttctttgtacaaaattagaaacaaaacactctctctctcaacccttaggaaaaccagcaaaagataaggctctcaacttagattaattgtcaggtgtttagatagtaattctattagaattctagggattcaactcaaggtaagcttctttactctcttctccttgagtttttatgtttcaagttaggtttctatgcttgaattgagttagggttttgtagttttaagaagtgtttatttttgtttttagaggatgctttaatggtatttgagctattttagaactgatttaagtgcttgtgttttgattgaacaaaatttgagctttagagctcaaatattgctctctcatggttttttagtttctgagtgtattgttggattttattgcttgaattctacttgttgtggtctaattaggtactctaaaaggtttatgttgatttgagttgtttagaaggttcttaagggttcctacactgaaccgatcgatcggttcagtttggacctgtaggaactgaaatttcgattcatcccctgtcaaccccatagaactgatttttcgattggggaaacggtctaccggttggggcatgttagggcaccctagattttcccatttttacgatatgtaggatatttccatgttatccatcgatagaaaaacttttagttttgattttaagtccctgaaaagtgatttagcgtgtcactcatcaattttacgaatattgtgacttaggggcctgtaaatcgttgagcagttgttccactcaggttggtcgacacacttaaatttagaaacgaggtaatattagtataatgacatgcatatgtgatcacaagtttagtatacatgtttatgattgcctgttagattacattagaatagcggtatcaatatacgtagagttatattggataccgatag

SEQ ID NO: 68197 - DNA, 1448 bp, Cannabis sativa
agaagaagaagaagaagagagtattcaagttgttaatgaaaaccaacctcgttttccgccattgttaaccactgctctgctgctttgcttagtcttagtgatactgtattttgttccttaacacttctaattgagaagactttttttcataattaccatttcttttctttttcaattgatttataccacttttctaattgtaggttttagggtgctattctttttttttttttctttttttgaagaaatgcttacatatattagattaaactcagttagacctcacggtcattacaaaatataatatcgggcatagagaaaagtggcacagagccaaacctctgatgggaaaaagctcacttagccacattatgggctataaaattacatggtctacgaaaaaattgaaacgtacaaccaataaaaaagggagaggtgtttttacaaaaagagacatagttatcaagctcccaacaggactccttcccattaagtacgttgatcactaccctcgaatcgaatcactctccacattatgtgctattctttttatggataattaggatattttttgtcctcttaattttgatgtgtaacgaattatgtcattcgatcgttaaaaatttctcctgagcatgcattattgagattatggatggacttttcataatttcgttcaattttactaacgtgatgattgtccaaggtcggccctcacataggcaggctaagctcgtgactaaggcacacactttctggagcccaaaataaaaaataaatggccttattaagtaaaattaaatgtattgtaaataacagatattcataagttagttggttggggtgtatggcgtattacacagtgagtttgagtacaatgacaatctttttcaatattttttttttatatttctgaaagtgagggtcctaaaatttaaatggccttaggcccatatattctcaaggttggccttgcgattgtccttatactaaattgtgccccctaaactttaatacgtattaaattgtgtctctcgaactttgacatgcaacgcgcagtgcctcctgaacttttattcacgtctgacttttattaataaaattagacaaaagttctttaatataataatttcaataatttgcgagaaatttttaacaacttaaaaaattcaggatacataattttatcaaaatttagagagtaaaaatattaattatccttttttattccaatttgatctatacccccggtgaaacttttattttattttgttgagagttgggtaaaatcttaaattggaccatggcccaactccaataagcccataaactacaaattatgagaatttggttttggttgcctatacaagcaaatgggataagttgaaaaatacatattttttgtatccattaattaaaaatattatcatattatatttcattaaaat

SEQ ID NO: 68198 - DNA, 703 bp, Cannabis sativa
aatacaatcaatcacctctctacaattcgtatcagaaactgagaataaattcgtaaaatacttcacaacaacatcagctaaccgattctcccaatccataaaaaccccctaagaatttttaagtttcgtaatatgattgttgcgccgtctattactcgcttccttatggaaatatttgctattttggtcatcctctttcaaccaaaattgcttagctctctgcttctaaaatatctctctttgatcaagaattgcaaaaagtttctttctaacctcactatatcgagcaacagaaatgtcatcccttttattcttcaaatgcttcaactcagcattacaatctttaattcttcttcgaaagttacgtgttatttccttgccccactaggctaaagaatcaacacatttattaaatttattcaaaattccccccacactatccctatcccagcagtcttcaacaatttggaagcacatggattcttttaaccatgcattttcaaatcaaaaacggtgtttctttgttgtttgatcaacaattattggttcaagaaatattggagagtgatgatcagaaggagaagtttcaagattaaatagctttgcaccttgaaataattgagaccaagcttcggttacaagagctctgtctaggcgaatttcgacccataacatcgagcctttactcatttcccaagtgaat

SEQ ID NO: 68199 - DNA, 768 bp, Cannabis sativa
tatttaaaactgtcaggaaaaatttagtattcccgacagtttaaaatcatagtaagcaaaataagcgacgttttttaataaaatacgaatttttaggaggctcttatacctaaaaccgtcgggtatagtatcgtaatcaataatattataagcaactaaaaaattactttttcatttagaaaaataaaaaatatcgtgaatttagtatttcatgctaacgttacactaatattattgtaaataagttggttgtaggtatttttataattattttacattctatctatataattgtaagttttcttatattttataattgaatatatatattttgaatggataactcaaaatatttaattttaatttactttatgattatttgtttatgagaaattatactttgacaatgtgaaaaacaagaaaattaaaataagtgaaaatatggcccaaaccaaagaaactgatagtactttttatattacatactgaaatttctaaatttttcttttttttttttttattgtgggagaatttttttaaaaaatactgtgtaagtttatattgtgtactgtgttaagttttcacaattattttttagttgtttcactgttgtttaaattattctgtgttgttgttttacggttgttttataaaaagacagtattttataaaaaattatgtgtgacagtaaaattataaatttttacttaaaattcaatattttggtaaaaaccccaaactgaaaatgttgcaagagtaaagaagccc

SEQ ID NO: 68200 - DNA, 897 bp, Cannabis sativa
tcctactccgagcagatcacaggaaaagggtacgactgttcattttggaattgaggaagggttggaggcattatcttccatccaactggacatacattgtttggccaggtattgctgatacccttcctattagccatccaagttctggtaactttggtatcccaattgctgtgcctgccatcgatgttgcacgatacacacaataatatccatccaggaagaggatgatggcccgcacaaagaagacgatgcaaaaagtcaacgcatctgatccttatgtggctcaagtcgccacatttccaagtgtcgagcaggatccgcccgccatgaggagaaagatcatgagggggacattgaggtccaggagatagaggagtaggacaacatccgtcctggtagccctcctgaggttgaggaggaacgagtggttgaaactccaaattttggaatgtataatgagtccggggagccaatgtctgcggagggtgacgtcttggttgagggggaggactatgtcaccgatgagcttactgaagcagttctccacaagaggcaaagtgccttaggtgccagatgggtgacccctccgtccaaaataagtgaggcacgcatgagggccttagataaggctgggtacctaggcggacttgagtgttacgtctcctcttcgaaacaccgagcaagtaacccacaaaaagggttttgtgcctggtcaggtgatcataccaagcaaggggcaatggtgcccgtgcacccgtacttcaagagggtgattattttcgcctttgtccgacacagttcactcctaagggcattaagtatttgtctgccctgttcgtccactagccattcaaggatggggtgtgtcatccccacatgaggttaactagttttttg

SEQ ID NO: 68201 - DNA, 1413 bp, Cannabis sativa
cattattattaataatttgttattgattgttaaatttgtgtacagaaataattagaaattattatgtttttatccaatttgtcatatataaccaaataatttaaagatcaaatttacaacaataaaacaaatggtgcgtgttattatcttactaatttattttttttgcttctactttctaaggtaaattacttattatttattaccgtaaataataatataactgaataagtgttgaacttaatatatttcgagctatgaaagtttcttaatgaagaaaaaaagcgaacaataacctataatcgaaacaccttgtataaggtgtttcaatgaaggatacaattggaagcatgcttctaagctctaaagtggtatgacataaatagttaattattgctagattgtggcacttaagacttgatcatgtaagccaaagagagcttgaggaacttgaaaaacatgggttctacaaagataagttgaaaaaaatgttagaattttgtgatgaatatgcctcttggggaaggcttgaaggattaaattcaacaaaagtagtctatattcacatagatctatgggatccatcgagaattctcacactatgggtggattctactatttcacgagaatagtgatgatttcagcagaaaggtatgggtacatttattggaaagtatggaccaagcttttgccacttttgtaaaatagagaaagctgatggagaattaaacagataataagatcaaagttctaagaatagataatggacttgaattctgttcagataaattcaaactattttgtgtcaatgaaggaattctaagacataagaaaatgattataactctccaacaaaatggtttgactaaaaggataaatagaagagggtgagatgcttgctcctagttggtttgacaagaaaaatatggggagaagcactcaatacaacatgtcacttgatcaacatatgtccatctattgctaatcaattcaagacacatcaggaactttgaacaggaaaacccctaaagtttgactatttaagagtttttggatgcattgtttttgtgcacatcggacaagataaattgaaaccaatgacacttaaatgcatgtttcttagatacttaaaatggtcaaggattacaaggtctagtgccttggagaagaacacaaaaaatacatgatcaacagtgatttgactttttaaggaaggtgagatgcctatggaaaccaaatccacatcaaaagacaatgaaattgatcgagagacaatgttttgtttgaggtggatcaagcagatgtgtcactttatatagatttaaatgagaatgagtcaatagaggaagatgatgttgggttttgtgccctaaataaaactcatttcattataatcaaatttacttattaata

SEQ ID NO: 68202 - DNA, 880 bp, Cannabis sativa
  modified_base (27)..(30): a, c, t, g, unknown or other
actaatcagattgtaaagagttttatnnnnggcataaaacccaacataaacttgtttgggccttctcgccgcagccacaagtggtctcgccgcgacgagatgtggttaaaaagaaacctgctctctgtagtcaacttatggctgcgaccatggttttgctcaccacggctatatagccttcaaaaattaggctcgctgtagtcgacttatggctgcggccatggttgtgctcgccgcggtgtgatagccttaaaaaaataggctctctatagtcgacttatggccgcgaccatggttgtgctcactgcggccactggcaatgcccagaaaaattattattttattattttttttttatttttttttgaacagtacaaaaataaaagaaaaccaatattcagtttacaagtttaataaacataaaccaaacagaagaaacaagaaaagtaataacaactaaaaaaataagagagttcaactaaaacactatgaaaacttgggttgcctcccaatagcgctgtcttttttgtcatatagccggacgtcgactaagttcttcaaagaggcgctagaatcatgccggacttggcttggtcaaaatgacctcccaagtaaagctttaaccgctgcccattgactttaaaagtctcggggctttcaccttttagttctacagctccatagggaaacgccttgaccactgtaaatggtcccgaccaccttgactttaacttaccaggaaacaatttcaaccttgaattgaaaagtaaaacttgcggcccaggttgaaattcctttttgactaagcttcggtcatgtcacttcttcgttctttccttgtagatctttgcattctcgtaagcctcatttctaaactcct

SEQ ID NO: 68203 - DNA, 610 bp, Cannabis sativa
aatgtgctcaaatatgggttagatctgctgctggtaattgttgacaatagtggccaaggtataacttttggaccatcttgcttcctcagtcatttcttcttctgctattgttgttgttgttggtggtggtggtgttattaggagggttttgttgctccgaaacaatctttaaaacattcatcaatgctctcaatcggtcccatatgttcattccatagagtgcttctacgagcgactcttggaactcgaaagcattctctgaaatgggatactgttgttggaaagaaaaaagaacaatgtaatgagtttctgagtctttttggatgataaagtttagtagttttcaattctgacctgaataggcttaggtatctttgttttgatgtacggccagaatctatcctcggcaactgctttcacaagacagcaagcacgcaatccttctacgccagcaaatcttccaaatccactgtctttcacaccaccaaatggcaaggactagaaaagcattgaatattttaaagtttaattatctcattaatgacagcctaaaacgaaagaatccacgggcagatgcatttgtggcggggagagtgcatttaaagaaaca

SEQ ID NO: 68204 - DNA, 744 bp, Cannabis sativa
aaaaacttttaattaatagtttttctccctctttctttattgaaaagtgtattaaaaatttttaattttaaattagataagcaacatatcttaaattaactaagcaacgtgcgttaaattaagtaaacaatatatgccttaaatagggtaaataattttttttttgagtaaagtaaacgagatatattattaggtaaacaaacgtgagtaaacaacatgtcttattaggtaaacaacgtgccttaaataaagtaaacgagatatattattagataaacaaacgtgagtaaacaacatgtcttattaggtaaacaacgtgccttaaattagataaatttcgtaccttaaataaggtaaacaaaaacaactaccttaaaataaggtaaacaacatacattattaggtaagcaacatattttatattaagtaaacaatatgttttaaattaggtaaccttattatgtaaacaacgtgctttaaatggcacaccttattaaaataaacgacacactttaaattttccattgcccaattcttgttcaatctatgtatagagaactatgtgccttataagtaaacaaaaatatttcttataaagtgttatcattaaaaggtaaagcacgaaccttttaaatgcaaaaaacaggccttaaaagtaacctttattcattgattgggattgcaaagcaattgtattatttggtgtcataccacctaagtctttcaacttttcttttttttttt

SEQ ID NO: 68205 - DNA, 1411 bp, Cannabis sativa
  modified_base (1223)..(1226): a, c, t, g, unknown or other
atcttggtggtgccgggatgcagggaatatggagtggtatgagcctcttcaagaattttatttttaagttctgcactaccaggaacacaaaccctggtcctaaacaacagcatcccactatccgacactgtaaagtctttggcttgaccagctgaaacctcttctctaatctttactagctctggattagatagttgagcagttttaatacgttctaacaaatcagattgtagcgtcaagttatgaagtttgcctacaaaaaacgacatcaggacctcccagaaaaactagaggtgcttgtttgcagaacttttcatgcagggttccatccgattcactaccaccactggtttgtccggcacagtaggggcaggtgccactggaatttctgaagcaggcactgcaggagtaccctgttgtctcaaccgtcgaatctcatcatcttgttcattaatcctggcttgcattgctgcaaacttattttcccaattttgggcatcctgagcaacttgggtagcttgggcagcctttggcaggttaccatcaccccggccacatgccctgcccctgggacctctacctcggccacgaatattaagagcaatctgagctcccttaacaccactggatccaaccgaattaccctggctcctagtacttcgcctgacgtccatactaatttagaacagcctacgtaaccaagagctagtttggtcacaccgtgatcaaagaaaaaacttactaatgccgcttatttggaaattaaaaacatgcgcctattctactatcaagctactaacattcttcctaacatgcttttcttaaatcatactataggaaagaaactactaaagcagtaacagcttactgaatcgtgaaatgagcaatctgctgatgatgattgtacatgtcatgatgatcttcagaagacaacctagcgattctgataccaaattgtaacaccctaactagcataggcgtgttagggtgactttaaacgtattgtgcagctcgtttctaatcaacaaggttaatgaaaaacgtgattaattaaaactttactatttaattaataaacttaaagtattacatatatacaatcccgggatcctgttaacaaaatactctttaaaaatttgctatacacataaacaaaagtttgtcgcccagtgattatacagcaaaagcctcgatgtctaaaagattgtacgctccaggcctannnnccctgacatgtacaatcttcacctgctcactctcacggctcctcagctttagccttgtccttacctacacatgaaaatagcactgtgagtcgacagaattagtaagaaaagcacaacttaaacataaaaaaaaaacccaggttataacctggcgcccgtacacccgatcataaccctaatccccg

SEQ ID NO: 68206 - DNA, 1078 bp, Cannabis sativa
acaatctcaatagttcagggggaatttttaacgaccaaaaaaatttagggggcatgatttggtatatgtcaaagttcggggggaaaaattgccaattagcctaaattttaaaaacacaaattttacgttttcaaaaatttttaaaaacaatttttctccattctcctgctctctcgtctttctcgctctccatccatttatgagttcttcatccatggctttcactctaatttcttctggtaaggtttgactctcattaatctctctcctatcgctgtccctgtctctaagttttatttttgtctttcagatctgagaacgaagaacaagagatttggttctaagaactgaagattttctttaggtatgaggattttctgctattgatatttatatttatgatcttctaatttgtctttgatgtgtttttgttcaatcccttgtatttttctaatttgagattttcacttgagtttgaggataatctctgctcactcttttcattctcttttgtatgacttctcgttgatgggttttcactgtggtgaaccctgttctactactgttaatacatttgtgaagctcattaaaactcgtatgttacctagatttaatataaaattgtatttaagtctgcccaaccaatcaaatttccatgagtttgcgttttgaatttttttaataagttgattatgagtctttagaatcatttccaagtatgatttttatgatgactagatttttcccatataaattgttttctgtagtatctagccgtattgattatgtttcttgcttagtgttatgtggtgagtttagttccaagagaaaaatatcagtgtggtaacaattcgatttaagattttttactaagtttggatatggtgatggctatgttaaagctcttgttacgtcaaggaataaagtctttactgctcatcaagatagtaaaatagtatggaaggcgtctaggagatcaaagaatgttctcaagcttgaggacactgttagggtttataaaacacttaagaaatatataaatcacagatctaaacatattcctaaaagtgctttaata

SEQ ID NO: 68207 - DNA, 912 bp, Cannabis sativa
  modified_base (368)..(376): a, c, t, g, unknown or other
tgcgaggaatgcaggacacgtgtcgcttgtgtattttgccaaatcattgtgcaaaaattgggataacatttcccccaagtctgcgcgggacctttgtggtcgcacgtggacttcactcggttcggatctttatctgaacgggtggcacgtcttcaaaatgtcggttgataacccgacgtgactctgaccaagggtctcttcactttttggctcattaatgctgattgacatgtacctcaaaaccacgcctaagaattaacacgttttgacagatatccttcaggtaattgagtggataacgtacacttttggggaaaattcgaggtatttaaaatttgaaataattactttgcctcactaatctgctnnnnnnnnnggctaaaaaccttaatcaaccacttttagccatttttgcttttgaagaatcaaagcaacaaatctattttctttcaaatccttcgaagaatcctcaggaaacaccaaccaacgtcatctgagcaaatctaaagcttcgaacagtgagtaagctcttcatttctttcctcttatatgcttgaatatttgattttttgggttcctgttgcataacctgatggttcttgaattcattctaggaaaaccatagaaaattttaggtttaggaatgtgacatcttgacaatgtttaaccatgttgcttgattataactgcgttttaatttcgattccacaatactcactttcacttgcccattcgaggcttagtgaaaatcaacccttaatttgaaatttttaaaatctggatttcaaacctccttatcatgcaaactttctattttggatcccttgatcggacctggttggtataaccaacctatttctgttcattatcccgaccaaatgctcatcttgtgtcctaccttttgtagatgaa
